United States Patent Application Publication US 2012/0309003 A1 - sequence listing, part 4

SEQ ID NO: 595 - DNA, 419122 bp, Escherichia coli
  modified_base (113042)..(113042): a, c, t, g, unknown or other
  modified_base (152406)..(152412): a, c, t, g, unknown or other
  modified_base (401859)..(401859): a, c, t, g, unknown or other
  modified_base (401862)..(401862): a, c, t, g, unknown or other
  modified_base (401865)..(401865): a, c, t, g, unknown or other
  modified_base (401867)..(401867): a, c, t, g, unknown or other
  modified_base (401872)..(401872): a, c, t, g, unknown or other
  modified_base (401882)..(401882): a, c, t, g, unknown or other
caaaaatgtgacttgaagcaaataaagcgatgaaatcagctatcaaccttccatggtatcgcaggaaatgagctttacagataactggtcagacgaagaattcattcgtcagatgaaagaattattcggtaacgaaggagatattcatgtcacttgcaaccaccgtgaaggagagcaagttacagagacgcatgtacacgcagcaggcgttaatgtatcgccagaagggagatcgtgaaggtgttcgcgtctttttaaatgcggcaaagactgaagtattaaatcagcgttatttccttgggccatgcccattctgagaacaaacatatgagcaaagaattttacgcaagactggcagctattcaggagaacttgaacgcgccaaagaatcagtacaactcattcggtaaatataaatacagaagctgcgaagacattcttgaaggcgttaagccgttactgaatggcctgtttttatcaatcagcgatgaagttgtgttgattggtgatcggtattacgtgaaagccacggcaactattaccgatggcgaaaacagtcatacggcaaccgctcttgcacgagaggaagaaagcaagaaaggaatggattctgcacaagttacgggagctacaagctcttatgcacgcaagtattgcctcaatggtttgttcggcattgatgatgcgaaagatgcagataccgacgagcataaacatcagcagaacgcagcagcaaagcaatcaaaaccatcacctacacctgaacaggttctaaaagcattcactgacgcagcattgcagaaaaacaccgtggaagagcttaaacaggcgttcgccaaagcgtggaagatgctcgaaggcacaccggagcagcacaaagcgcaggacgtttacaacatcagacgagacgaattagaaggagctgctgcttaatggcacattcgattactgtaagactaaacaagcccgcaagagagtttcaggccggggaaaatatcggattcaacatccgtgctggcgttcagtattacgatcgccagacaaaaaagaaagaatggacaaactacagcaccgttgtatttgccaagccgggagcgcaagcggattactaccgtagtgttcttgttgaaggtggcattgtggaaattaccggagaaaacatcagggttgatgtttatcaggggcaaaatggtcaatccatcactcttgaattactgaatgcaaagattggatttgcaacttcaggaaacagcccgcagcagcaaagtagtaaccagcagaacactcctgtatacgacgattccatcccattctgatttagaaaaataaggatttaattatgccagcgcctctgtatggtgcggatgacccgcgccgctgttccggcaattccgtatcggaggtgctggataaattcaggaaaaactacgacctgataatgtcgctaccgcaggaaacgaaagaggaaaaggaatttcgccattgtatatggcttgcagagaaagaagaacgcgagcgaatttaccagacatcaatccgaccattccgcaaagccacatacacccacttccctgaatatatcgacccgcgcctgcgtaattaccgctcacgctatggcgctatcagtaatgactgaggaattaacaatgaaaacaatgaagctaaacatcgacctcggaaaatacgttattaccggaacaaaacacgatctgattcttagcgaaagaggaattatcaaagaagacgagaatgcagggaaagaaacactaagtcgtatcggttattacagcaagtttgagcatctggttaaagagttatgcaaccgtgaaatcctgttatctcaggcgcagacgctacaggatattcagcagcatatcgagactttaggtgtgtcacttagcatggctattgaccagttcgtggagagtaaatcatgagaggacttgcatacaatcccggcattcttccggcagaaatgattattcgccagcgcgtaaagccaatgccatcgagagaggaattgcttaagagaaattcttttccatcagtgaatcaaaacaaatatctgaatgcgatgtggcgtaaaggaggcaaccagtgagcaagattgactatcaggcactgcgtgagttagcaaaacaggcaacacagggcgaatgggtcgcattcatttcgccgggcactgatacatatgcggtgcatacgccgggggatgaacgttgcggagacattatcaaatggcctggctttgacggccagaaaaatgcagagaacaacgcagaatttatcgcagctttcaaccctaaagtagtgcaggcactgctggatgaacgggaaagaaaccagcaatatatcaaacgccgcgaccaggagaacgaggacattgcgctaacggtagggaagctgcgtgttgagcttgaggagacaaaatcaaaactcaacgagcagcgtaagtattacgaaggtgttatctcggatggaagtaagcgcatagcagaactggaagcacgggaaataaaaccagccaaaggtgaagttcttgtcgttgtttctggttttactggttgcggaaaaagcgccattgccggggaaatagaaatcgcgatgaaggctattggtgtaccggttcagtggactaatggcgatgcggaaaagcgcatgacaggagctgactggctgacagcgattgagatgtacaaaccaacagtgcgcatcgtggaagttaatgtgccacgcgccgcaggcattcgcatcaaagagggtgagtagtgcgtgtggcatgtatcggcttgttaccgtacccgactcgtttttgggcttctgcgctaattgcaaagccacatgtcctgatagctgacaacatcatcccggcaccaaagcgccgccataccggtattgcagcggcacgacgagcagcaaagagacgcaggagagcaaaacgatgaaaaaccgtaaagcaaagattctgttagctcgcagaaacggtgttggggtctggcgatgggtgaggattagtaacagacgagtgaggttgatggggtgttgcggggtgatgggtcacagttgttgcaaaaagcccagcgcggcgcaaaaccgctggaaaaactacttgcggactaaaggagagtgatatggctatcgctgcaagttacaccatgcatctctattgtgattgtcgccagtgtacggaaggtgtatatccagtgccagacttcggtgagtatatcggtacgtcatggtctggttgtgcaaaagaggcccgtaaagacgggtggcgaataagcaaagacaaaacacgtacttttgcgcccgggcataaagttttgaggattaacacatgaccactattaccaaagaacgtattgaattgttcattaaaaatccgcttgaaaacgggcttactcgtggcgaacaaatggaactggcacgaattgcactggcatcactggaacgcgaacagattcgccacgagcatgccaaatggtctgactccacatttggctgcgttggccccattggtccactgaaacacctctcaaaagaggcactggaagccgcagccgaaccagacgatcttagcgagtgggctgatatgcagtttctgttgtgggatgcacagcgccgtgctggtatcagtgatgctgaaattaccgctgctatggaaaataaattgaagatcaacatggaacgccagtggcctgaaccaaaagatggtgagcctcgcttgcacattaaagaacccggcaactctccggtaactccggatggctggataagctgtagtgagcgaatgccggataccaaaacagccgttcttgttgccgtggagtttgacaggaaaggtgactggcgaatgaaatgggcgacttacatcccgggtcatcctgacgctaatgatgggtggataattcctggtgcgtcgtggaaaccgtcacactggatgccgctaccagagcctccactttgaaagcgaagcttatacatatcttttacatcagcaatctattgttaatctccaatcaatgttacgttgtcatctcactcatgctttggaggtagtgatatgtcttgtccaaaatgcggttctggaaatattgcaaaagaaaaaacaatgcgtggatggtctggtgattatgtgtgctgcgattgcggatacaacgactctaaagacgcatttggagagcgtggtaaaaacgagtttgttaaaattaataaagaacgcgaaggcaacgaaaaaagctaatttatttattcatatatgaaaacaatgtaaccaatattcgaattgaagaactgaaagaacaccaagccgcctgatggcggttttttattgcctgatttgcaggttcgattccctattcggagatagcactcatgcaacacgaactacagcctgattcactggttgatttgaaattcatcatggctgatactggcttcggtaaaaccttcatctatgaccggattaagtccggagacctgcctaaagccaaagttatccacgggcgagcaagatggttatatcgtgaccattgtgaattcaaaaataagctcttaagccgcgccaatgggtaaaatagcgggtaaaatatttctcacatctaaaaaacaccattccaatcaatcccctgccgcctcaagtagatgtctgcaggggacaccagatacccttcaaacgaaatctaccttcaccccgtaaaagatgggtttggcagcacacttgccttatatctactcatttttactgcaacaggttgaaatctcagcactgtcagaaagcgctgatgactaaacagccctgagccgggcgatgtaaccatcacacagaatcctgatagcgaaatatggcgtgactcgatacttcactccgcaatgcattccttgatgaattcgcaggaccgtgatacacgggacaggtcactgaatgacgacaatgtcctggaaatcagcgaaccgcgcatctgaagtacatttgagcgactgtaccagaacatgaatgaggcgtttggattaggcgattattagcagggctaagcattttactattattattttccggttgagggatatagagctatcgacaacaaccggaaaaagtttacgtctatattgctgaaggtacaggcgtttccataactatttgctcgcgttttttactcaagaagaaaatgccaaatagcaacatcaggcagacaatacccgaaattgcgaagaaaactgtttggtagcctgcgtggtcaaagagtatcccagtcggcgttgaaagcagcacaatcccaagcgaactggcaatttgaaaaccaatcagaaagatcgtcgacgacaggcgcttatcaaagtttgccacgctgtatttgaagacggatatgacacaaagtggaacctcaatggcatgtaacaacttcactaatgaaataatccaggggttaacgaacagcgcgcaggaaaggatacgcaacgccataatcacaactccgataagtaatgcattttttggccctacccgattcacaaagaaaggaataatcgccatgcacagcgcttcgagtaccacctggaatgagttgagataaccatacaggcgcgttcctacatcgtgtgattcgaataaacctgaataaaagacaggaaaaagttgttgatcaaaaatgttatagaaagaccacgtccccacaataaatatgacgaaaacccagaagtttcgatccttgaaaactgcgataaaatcctctttttttacccctcccgcatctgccgctacgcactggtgatccttatctttaaaacgcatgttgatcatcataaatacagcgccaaatagcgagaccaaccagaagttgatatggggactgatactaaaaaatatgccggcaaagaacgcgccaatagcatagccaaaagatccccaggcgcgcgctgttccatattcgaaatgaaaatttcgcgccattttttcggtgaagctatcaagcaaaccgcatcccgccagataccccaagccaaaaaatagcgcccccagaattagacctacagaaaaattgctttgcagtaacggttcataaacgtaaatcataaacggtccggtcaagaccaggatgaaactcatacaccagatgagcggtttcttcagaccgagtttatcctgaacgatgccgtagaacatcataaatagaatgctggtaaactggttgaccgaataaagtgtacctaattccgtccctgtcaaccctagatgtcctttcagccaaatagcgtataacgaccaccacagcgaccaggaaataaaaaagagaaatgagtaactggatgcaaaacgatagtacgcatttctgaatggaatattcagtgccataattacctgcctgtcgttaaaaaattcacgtcctatttagagataagagcgacttcgccgtttacttctcactattccagttcttgtcgacatggcagcgctgtcattgcccctttcgccgttactgcaagcgctccgcaacgttgagcgagatcgataattcgtcgcatttctctctcatctgtagataatcccgtagaggacagacctgtgagtaacccggcaacgaacgcatctcccgcccccgtgctatcgacacaattcacagacattccagcaaaatggtgaacttgtcctcgataacagaccaccacaccttctgcacctttagtcaccaacagcatggcgatctcatactcttttgccagggcgcatatatcccgatcgttctgtgtttttccactgataagtcgccattcttcttccgagagcttgacgacatccgccagttgtagcgcctgccgcaaacacaagcggagcaaatgctcgtcttgccatagatcttcacgaatattaggatcgaagctgacaaaacctccgacatgccggatcgccgtcatcgcagtaaatgcgctggtacgcgaaggctcggcagacaacgcaattgaacagagatgtaaccattcgccatgtcgccagcagggcaagtctgtcgtctctaaaaaaagatcggcactggggcggaccataaacgtaaatgaacgttccccttgatcgttcagatcgacaagcaccgtggatgtccggtgccattcatcttgcttcagatacgtgatatcgactccctcagttagcagcgttctttgcattaacgcaccaaaaggatcatcccccacccgacctataaacccacttgttccgcctaatctggcgattcccaccgcaacgttagctggcgcgccgccaggacaaggcagtaggcgcccgtctgattctggcaagagatctacgaccgcatcccctaaaacccatactttggctgacatttttttcccttaaattcatctgagttacgcatagtgataaacctctttttcgcaaaatcgtcatggatttactaaaacatgcatattcgatcacaaaacgtcatagttaacgttaacatttgtgatattcatcgcatttatgaaagtaagggactttatttttataaaagttaacgttaacaattcaccaaatttgcttaaccaggatgattaaaatgacgcaatctcgattgcatgcggcgcaaaacgccctagcaaaacttcatgagcaccggggtaacactttctatccccattttcacctcgcgcctcctgccgggtggatgaacgatccaaacggcctgatctggtttaacgatcgttatcacgcgttttatcaacatcatccgatgagcgaacactgggggccaatgcactggggacatgccaccagcgacgatatgatccactggcagcatgagcctattgcgttagcgccaggagacgataatgacaaagacgggtgtttttcaggtagtgctgtcgatgacaatggtgtcctctcacttatctacaccggacacgtctggctcgatggtgcaggtaatgacgatgcaattcgcgaagtacaatgtctggctaccagtcgggatggtattcatttcgagaaacagggtgtgatcctcactccaccagaaggaatcatgcacttccgcgatcctaaagtgtggcgtgaagccgacacatggtggatggtagtcggggcgaaagatccaggcaacacggggcagatcctgctttatcgcggcagttcgttgcgtgaatggaccttcgatcgcgtactggcccacgctgatgcgggtgaaagctatatgtgggaatgtccggactttttcagccttggcgatcagcattatctgatgttttccccgcagggaatgaatgccgagggatacagttaccgaaatcgctttcaaagtggcgtaatacccggaatgtggtcgccaggacgactttttgcacaatccgggcattttactgaacttgataacgggcatgacttttatgcaccacaaagctttttagcgaaggatggtcggcgtattgttatcggctggatggatatgtgggaatcgccaatgccctcaaaacgtgaaggatgggcaggctgcatgacgctggcgcgcgagctatcagagagcaatggcaaacttctacaacgcccggtacacgaagctgagtcgttacgccagcagcatcaatctgtctctccccgcacaatcagcaataaatatgttttgcaggaaaacgcgcaagcagttgagattcagttgcagtgggcgctgaagaacagtgatgccgaacattacggattacagctcggcactggaatgcggctgtatattgataaccaatctgagcgacttgttttgtggcggtattacccacacgagaatttagacggctaccgtagtattcccctcccgcagcgtgacacgctcgccctaaggatatttatcgatacatcatccgtggaagtatttattaacgacggggaagcggtgatgagtagtcgaatctatccgcagccagaagaacgggaactgtcgctttatgcctcccacggagtggctgtgctgcaacatggagcactctggctactgggttaacataatatcaggtggaacaacggatcaacagcgggcaagggatccgcgtcactcttcccccttcacgaccttcaataatatgcaatgcagcttcccgcccgataatgtcatgtggaagctgaattgtggtcagcggcggtaaaaacagatgcccgacgccaaccagattatcaaagcccattacggcgacatcctgcgggattcgtacccccttcgccagaagaacctgataagccacaaaggctgcgcgatcgttaccacatatcagaacatcaaaatctggtttgcccggtttgaagtgggcattgagtaaacttgcgagatcggtgtagtgatcatcacctgttgccatgtgaaattgtttcacctcagccagatctcgtccagcatcacgccaggcctgctcaaatccctgccgacgataccctgttgccaacgcactttccggtagccagaagcataacggttgacgatagcccgccgcgagcaaatgctgtgttgattcatattgtgcagtgtaatcatcagggatataactgggtaacgctgggtcatccgccacacagttcgccaatacaatattttcaccatacagagactcaggcagcgtgatatgtcgcagccccattgtagtatagataatgccatccggacggtgggcaagcagctgacgtgccgcgcgggcagcgtcatcttcagaaaaaatattgattaaaaaactattccagccgaactcgctggcggtttgctcaatggcaagcagaatatcaacagagaaaggagtggtagccgtgtcctgcgccagcacggcgagagtcgacggcttacgtccttgagcgcgcatcttacgggcggaaagatcaggaacataattcagggtctggattgcctgcaatacgcggtcacgcgttgcaggacgcacagattctgcattatgcatcacccgggagactgtcatcatcgacactcccgccaggcgtgcgacatcctttaatgaagccatacccaagccgtttgccgtaaaacgggcactgtagcagaaacagacgtcactggcgagatctaacgccctatcacctgacacagcaatacaataaaaaataacaataattcccggacaattgtccccaattccgcctctgttctcgccaacgagtaaccatataggcaagtaagtaaaacatgccaactggcatcgccaacctggagaagaaaatataaatatggatcattgtgctgccgctgtatcccgacatcagcccggaaattattgcgattgctatcggttcaggtgcaattggctgcacgatcgttacggactcgcttttctggctagtgaagcaatattgcggcgctacgctcaatgaaacatttaaatactatacgacagcgacatttatcgcttcagtcgtcgctctggcgggcacattcctgctgtcatttatcatctaagcgcaaagagacgtactatggaaaacgctaaaatgaactcgctcatcgcccagtatccgttggtaaaggatctggttgctcttaaagaaaccacctggtttaatcctggcacgacctcattggctgaaggtttaccttatgttggcctgaccgaacaggatgttcaggacgcccatgcgcgcttatcccgttttgcaccctatctggcaaaagcatttcctgaaactgctgccactgggggattattgaatcagaactggttgccattccagctatgcaaaaacggctggaaaaagaatatcagcaaccgatcagcgggcaactgttactgaaaaaagatagccatttgcccatttccggctccataaaagcacgcggcgggatttatgaagtcctggcacacgcagaaaaactggctctggaagcggggttgctgacgcttgatgatgactacagcaaactgctttctccggagtttaaacagttctttagccaatacagcattgctgtgggctcaaccggaaatctggggttatcaatcggcattatgagcgcccgcattggctttaaggtgacagttcatatgtctgctgatgcccgggcatggaaaaagcgaaactgcgcagccatggcgttacggtcgtggaatatgagcaagattatggtgttgccgtcgaggaaggacgtaaagcagcgcagtctgacccgaactgtttctttattgatgacgaaaattcccgcacgttgttccttgggtattccgtcgctggccagcgtcttaaagcgcaatttgcccagcaaggcagtatcgtcgatgctgataaccctctgtttgtctatctgccgtgtggtgttggcggtggtcctggtggcgtcgcattcgggcttaaactggcgtttggcgatcatgttcactgcttttttgccgaaccaacgcactccccttgtatgttgttaggcgtccatacaggattacacgatcagatttctgttcaggatattggtatcgacaaccttaccgcagcggatggccttgcagttggtcgcgcatcaggctttgtcgggcgggcaatggagcgtctgctggatggcttctatacccttagcgatcaaaccatgtatgacatgcttggctggctggcgcaggaagaaggtattcgtcttgaaccttcggcactggcgggtatggccggacctcagcgcgtgtgtgcatcagtaagttaccaacagatgcacggtttcagcgcagaacaactgcgtaataccactcatctggtgtgggcgacgggaggtggaatggtgccggaagaagagatgaatcaatatctggcaaaaggccgttaataacgtttcaacgcagcatcgcaatcctttccctgggtgagcgatgctgccgatggcgcagacttaagatccccggtcttacccgctataaccccctccttttatcatcacccaacgcctttcgctgtaaacggcggtttcgcaaaccaaaccaaaaccgtaagtaagataaaagcaatagccgccatacggaaaatctcatttgcagaaatagaaagtgactgctgggttatttcattattaatttcattaagaactcctgaaagcgaaccatagtatttatccataatttgtgacgatgaattaaacacggggttaaattgatcgatggttgctgtcaactgactatggtgtaacgattcgcgtcgtccccacagcgtcattgtcaacgacgtaccaactgatcctgacaaggtacgaaaaaaattactcatactcgaggcattggcaaatttattatctggcaagcctgaaaacgaaatcgttgttaagggtaaaaagaaacaggcaacggcgaatccctggaaaaactgtggcaaaatgatgcctgtaaaatcaatcgttggcataaatgtcacagaacgccagtaatagcaaaccgcatacatcaaaaaactaaatgtcactaacaaccgcatgtctattttgttgccataacgtcctatcaaaggtgaaattaatagtggcatgatgccgatgggcgcataagcaagtccggcccatatcgcattataccccatcgtttcctggagtaactgcggcataaggacgatcgctccagagtaaaataaatacgcgcatgtgatactcacaataccaatggtgaagttacgggacttaaacaaactgagatcaagaatcgggttctctgaggtcgactcccaaatgactaaagagatcagagaaataactgatactactgttaatattattattgtactcgagttgaaccaatccagatcgcgccctttatcaagcataatttgcaagccaccaacaccgagcactaacagggtcagtcctggtagattcattttgaccggtgaagtttcagtttctcttcctttaagtaaggttaagcataatgtcaggacgataatccccatagggacattgattaaaaatatccaaccccagctaaagttatcgcaaatataaccgcccaatatcggcccacatatcggagcgataatcacggtcattgaccataatgccagagcaaatgttcttttttctggtggataattccttaataataaactctgtgacagtggaattaacggccccgccattaatccctgaacgactctaaaaaatatcagcacatcaagattggtcgataaactacacattaaggaagacagcgaaaaaaaagtgactgaaagtaaaaataaccttaattcgcctattctttgtgccagcctgccggtaacagggatcgcaatggcatttgctacgccaaacgaggtgataacccaggtgccttcgtctgttgatgctcccagaaagccagatattgtcggtattgcgacgttagaaatagtggaatccaacatttgcataaacgtcgctaatgacaatgcaatagtaacgcaccataacgtcccaccggttaatggtgccggagttgatttagtgattgccattaaagttgtccattatgcgaaataatgttgctaatttctttttctatcggactggtatcgataactaaagccttactggtataagccggcatggaggtcacggttgaagccagctcaggcatctcggcaatgtcttcgttcttcgtatcaatagttgctgtcatcgataaaccaatacgcaagggatgttccatgagttcttttggatcaagagaaacttcaaccggtacacgctgaacgattttgatccagttccctgtcgcattttgtgcaggtaataaggagaacgcattgccggttcccatattgatccctgtcacccgaccatgaaacacaacattttcaccataaagatcgctgataatattgaccgattgaccaatccgtacatccgtaagttgtgtttctttaaagttggcattaacccacatttgacgtgccggtacgacagccattaacgattgtccggggctcactgtttcgccgacctgaacacttcgctgggcaatatagccggtaaccggactcttaatatccgtacgtttaagcgccaaccaggcttctttagttgcatccgccgcttcaacgacttgtggctgacggtttaatggtgtgttcattactaaagctttattcgctttataagcctggatagcggcattcaatgccgctttgctacttattaacgtatctttggtatgctccagcgtttcttttgaaataaccccctgcttcgctaacggcactcgacggttataatcttctaaagattgttgatactgaatacgtgctgaagcgacttcggcactgtattgtttatcctgtaagtatagtttattcgtttgccgaacaatatttgccagattatttttagctttattgagtgcgatagtggcatcagttttatccagtgaaactaaaatgtcaccttgtcgaacgtagttcgtatctttatgattaacgacagtgacactacctgagacttgtgcagaaattggatctgcattccccgtgacataggcgtcatctgtactaatcatgtcttctaattccattgaccaataggcataggcacctgaaaacgcaataaataaaactaccgccaataaagaaaagtattttcttctgttagaatgttttttatttgaattaatctgttccactattatctctcatttctcatagatgaaatttatgaattgaatgaaaagagcattcattcttcatatcaaacacagtgcatgtgttgcacattatcccaggaacgttggaggcctaatttaaatgaggtgcaaaaaaaacaacagaggactaaaccgtggcttttgcaatacaattcttacgcctgtaggattagtaagaagacttatagtgccaacttgaaactataaatcatcggtacaatccctgattttattgttgacatttcatttatgccgactatttatatggtatacttgtcgaattatcttaaaggaagctcagattttcttatttttattgagaaaatgagatgacgccttatgtctgtattactacagggagaagggagatgcttcattgcaaagggaataatctatgaacgcaataattattgatgaccatcctcttgctatcgcagcaattcgtaatttattgatcaaaaacgatattgaaatcttagcggagttgactgaagggggaagcgccgttcagcgggtggaaacacttaagcctgatatcgtcatcattgatgtcgatatccccggagttaacggtatccaggtgttagaaacgctgaggaagcgccaatatagcggaattattattattgtctccgctaaaaatgaccatttttacgggaaacattgtgctgatgctggcgctaatggattcgtgagtaaaaaagaaggcatgaacaatatcattgcggctattgaagctgcaaaaaatggctactgctatttccccttctctctcaaccggtttgttggaagtttaacgtccgaccagcaaaaactcgactccttatcgaaacaagaaattagtgtcatgcggtatattcttgatggcaaggataataatgacattgctgaaaaaatgttcatcagcaacaaaactgtcagcacttataaaagtcgcctgatggaaaaattagaatgtaaatcactgatggatctttacacattcgcgcaacgtaacaaaatcggctaatcacatgaagtttttaccctatttttttcttctctgttgtggtctttggtcgaccataagtttcgcagacgaagattacatcgaatatcgtggcatcagtagtaacaaccgtgtcacacttgatccagtacgtctgagcaacaaggaattacgttggttagcgagcaaaaaaaatcttgtgattgcagtacacaagtcccaaacggctaccttgttgcataccgattcgcagcaacaggttcgtggtattaatgctgattatttaaatcttttaaaaagagcgttaaatatcaaattaacactccgggaatacgccgatcatcaaaaagcaatggacgcgcttgcagaaggtgaagtcgatatagtgttatcacatttagttacttcgccgcctcttaatagtgacattgctgcaaccaaaccattgataattacctttccggcgctggtaaccacccttcacgactcaatgcgaccgcttacctcaccaaaaccagtaaatattgctcgggtagcaaattaccccccagacgaggtaattcatcaatcgtttccaaaagcaacaattatctcttttacaaatttatatcaggcattagcatccgtatcagccggacagaatgattactttattggtagtaacatcattaccagcagtatgatttcccgctatttcactcactccttaaatgtagtgaaatattataactcgccgcgtcaatataattttttcttgaccagaaaagaatccgtcattcttaatgaagtactcaatagatttgttgatgctttaacaaatgaagttcgctatgaagtttcacaaaattggcttgatacaggaaacctggcctttctgaacaaaccattagaactcactgaacatgaaaaacagtggattaagcaacatcccgatttaaaggtgctggaaaatccttactctcctccctattctatgacggatgaaaatggctcggttcggggcgttatgggggatattcttaatattattaccttgcaaacaggtttaaatttttctccgatcaccgtttcacacaatatccatgctggaacacagcttagccccggaggatgggatataatacctggcgctatttatagtgaagatcgagaaaataatgttttatttgctgaagccttcataacaacgccttacgtttttgtcatgcaaaaagcgcctgacagtgaacaaacattaaaaaaaggaatgaaagttgccattccatattattatgagctgcattcgcaattaaaagagatgtatccggaggttgaatggatacaggtcgataatgccagcgctgcatttcacaaggttaaggaaggtgaacttgatgctctggtcgcgacacagttaaattcgcgttacatgatcgatcattactatcctaatgaactttatcattttcttattcctggcgttccgaatgcatcgctttcgttcgcttttcctcgcggagaaccggaacttaaggatattattaataaagcactgaatgcaattcccccaagcgaagttctgcgcctgacggaaaaatggattaaaatgcccaatgtgaccattgacacatgggacctatatagcgagcaattttatattgttacgacattatccgttttattagttggcagtagccttttatggggattctacctgttacgctcagttcgtcgtcgtaaagtcattcagggtgatttagaaaaccaaatatcattccgaaaagcactctcggattccttaccgaatccaacttatgttgtaaactggcaaggtaatgtcattagtcataatagtgcttttgaacattatttcactgcggattactacaaaaatgcaatgttaccattagaaaacagtgactcaccctttaaagatgttttttctaatgcgcatgaagtcacagcagaaacgaaagaaaatcgaacaatatacacacaggtatttgaaattgataatggcatcgagaaaagatgcattaatcactggcatacattatgcaatcttcctgcaagtgacaatgcagtatatatttgtggttggcaagatattactgaaacgcgtgatctaattaatgcactcgaggtagaaaaaaataaagcgataaaggctaccgtagcaaaaagtcagtttctggcaacgatgagtcacgaaataagaacaccaataagctctattatgggcttcctggaacttctgtcgggttctggtcttagcaaggagcaacgggtggaggcgatttcacttgcctacgccaccggacaatcactcctcggcttaattggtgaaatccttgatgtcgacaaaattgaatcgggtaactatcaacttcaaccacaatgggtcgatatccctactttagtccagaacacttgtcactctttcggtgcgattgctgcaagcaaatcgatcgcattaagttgcagcagtacatttcctgatcattacctggttaagatcgaccctcaggcgtttaagcaggtcttatcaaatttactgagcaatgctctcaaatttaccaccgagggggcagtaaaaattacgacctccctggttcacattgatgacaaccacgctgttatcaaaatgacgattatggattctggaagtggattatcgcaggaagaacaacaacaactctttaaacgctacagccaaacaagtgcaggtcgccagcaaacaggatctggcttaggcttaatgatctgcaaagaattaattaaaaatatgcagggcgatttgtcattagaaagtcatccaggcataggaacaacatttacgatcacaatcccggtagaaattagccagcaagtggcgactgtcgaggcaaaagcagaacaccccatcacactacctgaaaagttgagcatattaatcgcggatgatcatccgaccaacaggctattactcaaacgccagctaaatctattaggatatgatgttgatgaagccactgatggtgtgcaagcgctacacaaagtcagtatgcaacattatgatctgcttattactgacgttaatatgccgaatatggatggttttgagttgactcgcaaactccgtgagcaaaattcttccttacccatctgggggcttacagccaacgcacaggctaacgaacgtgaaaaagggttaagttgcggcatgaacttatgtttgttcaaaccgttgaccctggatgtactgaaaacacatttaagtcagttacaccaggttgcgcatattgcacctcagtatcgccaccttgatatcgaagccctgaaaaataatacggcgaacgatctacaactgatgcaggagattctcatgactttccagcatgaaacgcataaagatctacccgctgcgtttcaagcactagaagctggcgataacagaactttccatcagtgtattcatcgcatccacggtgcggctaacatcctgaatttgcaaaagttgattaatattagccatcagttagaaataacacctgtttcagatgacagtaagcctgaaattcttcagttgctgaactctgtaaaagaacacattgcagagctggaccaggagattgctgttttctgtcagaaaaatgactaaatagcggctcccacaatgttcaaatgtgggagctatttaccagcacatcttacatttatgatgagaactcctggcgaatttgttccccatgctggtcgagcgttgccgctcccggcataacatgcgggtccgcgcagccgctgatttttatcggattacccggcatcattattcccccggcttcaatcaacatatttcttgcctgagtttgtggcaatttaatggcctcagccacacttaataacggcgcgacgggtacaccaacttcatgtattctggctaaccaaacttcagctgcctgcgtttttaacgtccgctcaatatattgtttaagaatagcctggttttgtacgcgtaaaatattgctgctaaatcggggatcattaaccagctccgtaagctccagtgcctggcataacgcagaaaaaagcttgtcattaccacaacaaatcgtaatcggcttatcctgagtattgaaaacatcaaaaggtgccatgtagggatggcgatttcccagacgttgtggtgacttcccagttgcgatatatgccatcagaccatgctccagaaaactcagcgtggcatcaaacatcgctatatcgacatgcgcccctctctggctcttttcgcggccataaagtgcactcactattccgctgaataaatagacaccgccgcatagatccgcaagagaggtaccaacgcgcactggcggagcatcaggatatcctgtttccatcattatcccgctcattgcctgaatgatggtatcgtaggcaggagcatcttttagcggaccggtatgtccgaaacctgacgatgaagcatatatgaggcgcgggttgatttcttgaagcgtttcccatgaaaaccccagtttttccattgtacctgggcgaaaattctcagctaatacatcagcttgtttgagcatatttataaatatacttttatcgtgatcattctttaaatcaagaaccacactctctttgccatgattaataaaactgtaatagagtgactgtccatccacatagggaccaaatgtgcgggtatcatcaccatgacccggcggctcaactttaattacccttgcgcccatattacaaagaagttgagttccgaaaggtccattaaggacatgtgtcatatcgataactaataagccttcaaacggccctttgctttcattatttgtcatttgcttatgccttgaaaaaagccgaaggtgaaaagacacttcggcatttatgtaaaatcaataacatgattaattatgaaaccagtcgactgacataaatccacaagggagccgtgacgacaaagcccagtacgctcacagccaatgacgctgtaccagtacgggtgtagacattaaaccggctggcaataatgattccggagaatgccggcggtaatgcgcctgccagtaccatcatctgcagatgttcgctgttcaaatgacatgccataccaacgagaagcagtgccagtggcatcagaatcagcttcaggaaggtgttataagcaatttcggcactgaactcgaatttatgtgcagccagagtcaaccccgcagcgaataccgctacccctgagttagccttcgcaatcagattaaaggttgggtcccatgctgccggaatttttaccccaaccaacaccaggatcgttgccagaacaggtgcccatactactggctcctttgccgcagaaattaatgcgctcagattactattcttcttaccatccgctcctgaggaaggattcagcaaatacagaccaataggaatagtaattgcgttaacaataatagaaataattgctaccactaaacctgttgatacggaatcaccataaataggatcgagaactgcaaaccccaggaatccaatggtaggtgaacccgcaattaatgcacatacagctgcttctgcatgggtacgtttaaaaaatttgtagcaaccaaaccaggagaaaaagaaacatccgacaataaccacaagtgatacaagggtcagacgagtgtccgcaaaaatcatttccctgtttgcccgggtaatagaaacaaatagagccgcaggaagagcgtagtttaataccagtttattaaatgcgcgggcttgatcttctgaaaaagtttctcgtctgccgctaaaataacccaacagcatgattacgataataggcaataaatcgccaataaaaaatgttagcataatagtatttccgataagggtcccctcaccatcgcataatgagttggcaagaggagacgatgtcagtatttaattaccagcgacttgttttgggttaagtttggtaatatggccactttcagttcctgctgcagggtcgatgaccacattaataatggtcggtttgcgcgactgaataccggtggttaaagcatgacgaagttcatctgtcgtggtgacgttatagccaacgccacgaaacgcatccattaatttgtcataccttgcatggtgcaacagatccgttggtgatggtgcaccagcgccactgagatcaacaccgtctcctctgtagatgccgccattattaaaaataacgatcgtcaccggcaggttatatcgacaaatcgtttcaatttccatcccactgaaaccaaaagcactatcaccttcaatggcgacaaccggagaaccagaagtcacgctagcaccgatggcatagcccataccgatgcccatgacaccccaggtaccacaatccagacgacgacgtggtttatacatatcaataatatttcgtgcattatccagggtatttgcaccttcattaactaaataaatatcctggttctcgcgcaatacgtcgcgcacagcacttaatgcattaaagtaatttaatggttgagtatctgtacttaatttttcatgcattttttgtgcattttgctgcttgtggatatttaaaatatcgcgccataccagtggagtcgtaaatgtgttttgtttcagttctgccagcataccttgcatactggatgcaatatcaccaacgactggcacagcaatggggcggttgctgtcaatttcctgcggttcaatatccagttgaataaactgtgtatctgccgaccatccttttttaccgtgtgccaataaccaattcagtcgtgcaccaacaagcatgacaacgtcagcatttgccagggcaaacgaacgcgcagctgccgcagaaagtggatgcgtatcttcaaggatccctttcgccatagacattggcaggaatggaatctgagtactttcaataaattcacgaagctgttcatcagcttgtgaatacgccgcgcctttgccaaggataattaatggccgttcagcttttgctaaaagcgaaattgcgctagtgactgacttcgggcatggcaataatgctggcgacggattttcaactttaacaatcgtggttaacgcttcgtctttttccatcgtcgcggccaggacatttgctggcaaatcaagataaactccgccagggcgacccgatacagagacccggatagcgcgtgccaatgcaatgccaagatcctgcggctgattaacgcgaaatgctgctttggcatacggttttgccgcattcatttggtccagctcttcataatcaccttgctgtaggtcgacgatcgcgcggtcgctggagccgctaatcatgatcatcggaaaaccatttaccgttgcgttggccaatgcggtcaaaccattgaggaatcctggcgcagaaactgtcaggcagatccccggtttttgggtaagaaaaccgcttgccgcagcggcatagcctgccgactgctcatgacgaaaaccaatataacgaatgccttccgcctgggcatggcgtgccatatccgtcacaggaatacctacaacaccataaatagtgtcaatattattctgttttaatgcttcaacgatgatatgcataccatctgtcatttgaagttgatctgacatgattaataacctcgaaatttttataaattgggagccagaagcccccgttaatatcagatggcgtggttttgcttcattgcagcaatttcatcgtcgctataacccagctcctgcaatacagcagcggtatgttcacctaatagcggcgcagctttaatatccggcgtaaaggcagagaatttcattggacaaccaacggtcagatattttccacgcaacggttgttccacttcaacaacactgccactttggcgcaaagagggatcaagtgaaatttctttcatacttaaaaccggtgcacaaggaatatcaaactgagtcaaataggccaccgcttcatgtttatcaatagtgacagtgtatttttcgatttcagcaaaaatatcgaaaatatgtggctgtcgtgcatgggctgtactgtatgccggatcggtaatccattctggtttgccgatggctttacaggtgttttcccagttttgctcctgaatagtgaaataaatataggcgttaggatcggtttcccagcctttacatttcaggatccagccaggctgaccgccaccacctgcattaccaccgcggggaactgcatcaccaaatgtaccattcggatactgcgggtattcttccagataacccaatttatcgagacgctgctggtcacgtaatttcacgcggcaaaggttcaatacggcatcctgcattgacatggtgactcgttgcccacgccccgttttttcgcgatgcagcaaagcagcaagtaaaccgatcagcaaatgcattccggtgttgctgtcacccaacgctgcagcgcttaccagcggcggaccatcccaaaaacccgtagtggatgccgcgccacccgctgcctgagcaacgttttcataggcttttacattcacataaggcgaacactcatcaaaccctttgatcgaaccaaaaatcagacgtggattgatttcttgaatatgctcccaggtgaagcccatgtgatcaatggcccctggatgaaagttctcgactaagatatcagcttcgcggatcagcttttccattacctctttgccttccgctgttttggtatttaactcaatagaacgtttgttactgttaagcatggtgaagtaaagcgcatcgatatcaggaatatctcgcagctggtgacgcgttacgtcaccaacgccgggacgttcaattttaataacgtcagcgccaaaccaggccagcatttgagtacaagatgggccagattgcacaccggtgaaatcgagaactttaattccttgaagtggagttgacatagcaatacctattagttaattaaatatgtgttaatttagcgtttatttaaggcgtaatatcttctataaataacccgcaaaatatcgtcgtagctgcactcgatatttttaaaatcctgtatcaagtgctgaaaatcatttcatcgccacttccaattcctttctgcatggtaagtagtgaggacgaaaagaagaatatgataaatattgattcgtggtaatcagagagagtcgcgacatttgtgatgttattcttacaactgtaagaagcgccggtgatttacaagtaagggtatgattacgctttttaaagcgtaccataaaacataacataataaatgatttgtgatgacacgggattattgggatttactttgaggaagataaaatgcgtgtttatagaaccgcgagcgccaaataattttatgaccacaacctgtcgtattgtggtcataaaaaattgtcggctggagggagttaaatcctttacctcaatatactgcctgtcagcattagttcacaaacagtgcttcgctgtcgacgatgattccatcttccgcacctttaagcgccaggtttgcctcgtagtattgctttttatcaagcagtttctgcgcatcagcaagtgcattacgagtctgtttaagcggcatcagatattggttttccattacgccaacaccggccaggcgaagctcttccattgcgccctttttatcccctttcgccattttttcattggcaatttttatcgcggcttctttttcgggtgttgctacataactctcagaaattccgacagatgcattaatgacaatatattggtcatcattgagattggtctttttacctggcttagcgaactttgcccattcggtactgtcatctgacaacaaagctgaagcttcattggtcagttcttttgccttttccggatcgccatgaaacagagccaggcgcgctacctgcacgtcacgcatcgcatataaaccttgttcagagatacgctctgctgctgccgttttctgggtttgctgaacttgctgagtttgctgttgtgccgctaccggtgcattatcagcagcccatacagttgaagatgccagaattgctgtgaccatcgtagccataattaaacgtttcatacttacctcattctttaacagttttagaaaacgccgccatcatattgggtgagcatgaaatgagaaatcagagagcaacggtcattttgaaagggttatcttacagttgtagttattatcgcaagaagtattttagtcttacaattgtaggaatctgcttcctgtcgcagagaactattcttatgtaccacaaagagatgtcatttattatatcgatgtaaatattgattaattatatgtaaatacagccataacatcgtaggttctcagtgaaccattttcaggataactttctatgaaagtaaacttaatacttttcagcttatttttattggtctctattatggcatgcaatgtttttgcattttccatttctggtggtgtaagtgagaggagctataaagagactgaaaaaacatcagcgatgacgaccacacactctacaaaacttcagccatcacaggcgattttgtttaagatgagagaagatgcgccaccattaaacctcacagaagaaatcacgcctacttatccgacaaaggcgaattatcttattcatcctgtgcgatagcgtctgtcacatggcaggtgaacaatcatgtctgatgctgatgtgaacacctgcccaaatgagccatcctgacccactatcgcctgccataccccaccataaagcgaatcatcaagccacaagccggggcaagaaacataaatatccccgtcactagttcattaccgccagttaaccacatggtgaagtaataaatgagtgcagcgaggctcaccatgccgaagaaagaagagaccgccgataccacgttcagtacctgaccgatgtagccgcttacgcagacaatacacagggcgagaaacatccataaataaatcatagctcaacctcctgccgcgctaaaaaacctgtaacttcagtcactttaatagtaagacaatccttaacctctggcaatttttgctaagcatcaatgaaaacagcatgttaaatgcaagactgttgtgtacggaaaaatatttactttgcacgattaataatcagtagctgaaagcagtcagcgagtgataaagtacagataccgcattcatgctcctcgtggttatgtcctgactagtctttacactctttacaggaaccattgtcgtacatgatggcccaaccaattgagtgtaccgctgtcgacatggaatcttctgcgatacaacaattcgtatctacagaaggtaactatgtttccacaatgcaaattttcccgcgagtttctacatcctcgctactggctcacatggtttgggcttggtgtactctggctttgggtacagcttccttatcctgttctctgctttctcggcacgcgtattggcgcaatggcgcgaccattcctgaaacgtcgtgaatctatcgcccgtaaaaacctggaactttgtttcccgcagcattctgcggaagaacgcgagaagatgattgccgaaaactttcgttcactcggcatggcgctggtagaaaccggcatggcatggttctggcccgacagtcgcgtacgtaaatggtttgatgttgaagggttggataaccttaaacgcgcacaaatgcaaaatcgcggcgtaatggttgtcggcgtccattttatgtcgctggaactgggcggccgcgtgatgggactgtgccaaccaatgatggctacctatcgtccacataataatcagctgatggaatgggtgcagacccgtgggcgcatgcgctctaacaaagcgatgatcggcagaaataatctgcgcggcattgtcggtgcactgaagaaaggtgaagcggtatggtttgctcccgatcaggattatggtcgtaaaggcagctccttcgcgccgttctttgcggtggaaaatgtcgccacaaccaatggcacctatgttctctcccgtctctctggcgcagcatgttgaccgtaacgatggtaagaaaagcggattacagcggatatcgtttgttcatcaccccagagatggaaggctacccgacagatgaaaatcaagccgctgcctatatgaacaagattatcgagaaagagatcatgcgcgcaccggagcagtacctctggatccaccgtcgctttaaaacgcgcccggtgggagaatcgtcgttgtacatttaacaaactgctcttactctttccctcctcaaatcggccataataacctcatggtttttatggcttttttcttaaggttttttccttcgctgaatatctaattattaccgtcagaaattaaactgtcgccgatatgagacacttgtaagttactaaaagtaaataagaaaatgcctcttgtctcgtttcagttttaggcgtacattagcgccgtctcgagcagtttagctcagaattctggggtgatgcccacggtaaaatacagggcttttaaggtcgctttgcccggtgtcaactcactgtatcaggtgtaatgaagtcattcaggcgtaacagtaattacgcggagagatgtaaagtgaaatatttctttatgggcatttcttttatggtcatcgtttgggccggtacttttgccctgatgatctaaaagcaaactgtgcaatgaaaaacaggagccatcaggctcctgtttgcatttctgacgacggtgtttattccgcgttttcgtgaatatgtttgctgctggcgggtagtaaaccgtcggcacggaacatcgctttaatccctctgatggcctgacgaatacggtcgcggttttcaatcagtgcaaagcgaacatgcgtatcaccatagtcgccaaagccaatccccggcgagacacaaaccttcgcttcgttaaggagcttcttggcaaattccagcgatcccatggccgcatatggttccgggattttcgcccagacatacatcgaagccttcggcatttcgaccatccagcccgcttcatgcagccctttaaccaatacatcacggcggcgtttgtactgttcggcaatgtcgcgcacgcactgttgatcgccctcgagtgccgcaatcgccgccacctgcaacggcgtaaaagtgccgtaatcgtgatagcttttgattcgcgccagggcactgaccagcgttttgttgccgaccataaagccgatacgccagcccgccatgttgtagcttttcgacagcgtaaagaactcgactgccacatcgcgtgcacccggtacctgcataattgacggcgctttccagccatcgtagacgatatcggcataggccaggtcatggaccaccagcacatcgtagcgtttcgccagcgccactactttttcgaagaactccagttccacgcattgcgcggttgggtttgacgggaagccgaggatcatcatcttcggtttcggataactttcacgaatggcgcgctccagttcgttgaagaaatcgacaccttccaccagcggcactgagcgtacctgcgccccggcaatcaccgcgccataaatatggatcgggtaacttggattcggcaccagcaccgtgtcaccatgatccagcgtcgccagcatcagatgcgccaggccctctttcgaaccaatagtgacgatggcttctgattccgggtcgatttcaacgtcgtagcgatcctgataccagcgggaaatggcgcgacgtaaccgcggaatgccgcgtgaagtggagtaaccatgcgtgtccgggcgctgggccacagtacataatttttcgacgatatgcggcggagtcgcaccgtccgggttacccatgctgaaatcgataatatcttcgccgcgccgacgcgcagccattttcagttcagcggtgatgttaaaaacgtagggcgggagacgatcaatgcgcgtaaagcgacgttcagggcgagtgtcagccataatttcctcagattaacgttagcgcccggaccgtccgagcgacgctgccacaatggtggctgttttgaaaatagcctgattaatttctgtctgtccagcgttttagaacatttttatcaatggctttaaatgaggaactccacttcaaaaacaggaaatttttctacgctaacaagaaaattaccaccaattttattaacattataatttcaataaatttaccagccagaagtgcattatcaagagatacattgctaatacaccatttatctttcaatccccttttaaatttatggtttttcctcaaaaacggcctgctggtcatcagccttcaggttacctatcatagaggtttaatccttattcagagtcacccgtgcacgaaatattcaacatgctgctggcggtcttcgatcgggcagcgttaatgcttatctgcctgttctttctcatccgtatccgcctgtttcgcgaactgttgcacaagtcggcgcactccccaaaagaattgctcgccgttaccgccattttctcgctgttcgccctgttcagcacctggtccggcgttcccgtagaaggctcgctggtgaacgtacgtattatcgcggtgatgtccggcgggattctgtttggcccgtgggtaggcatcattaccggcgtgattgcgggtattcaccggtatttaattgatatcggcggcgtgacggcgatcccctgctttatcaccagcattctggcgggttgtatatcaggctggataaacctgaaaatccccaaagcacagcgctggcgcgtcggtattctcggcggcatgttgtgtgagacgttgaccatgattctggtaattgtctgggcaccaactaccgcgttggggatcgatatcgtctctaaaatcggcattccaatgatcctcggtagcgtctgtatcggctttattgtgcttctggtgcaaagcgttgagggcgaaaaagaggccagcgccgcgcggcaggccaagctggcgctggatatcgccaacaaaacgctacctctgtttcgccatgtcaatagcgagtcattacgcaaagtttgtgaaattattcgcgatgacattcacgccgatgcggtggcgattaccaataccgatcatgtgctggcctatgttggcgtgggtgaacataactatcagaatggcgatgacttcattagcccgactacccgtcaggcgatgaattacggaaaaatcatcattaaaaacaatgatgaagcccaccgcacaccagagattcattccatgctggtgatcccattgtgggagaaaggcgttgtgaccggaacgctgaaaatttactactgccacgcgcatcagatcacctcgtcattacaggaaatggcggtcggtctgtcgcaaatcatctccacccaactggaggtttcacgcgccgagcagctacgtgaaatggcaaataaggcagagcttcgcgccctgcaaagcaaaattaatccccatttcctgtttaacgctttgaacgctatttcatcatcaatccgtctgaatccggatactgctcgccagctgatctttaatctgtcgcgttatctgcgctataacattgaattaaaagacgatgagcaaatcgatatcaaaaaagagctgtatcaaattaaagactatattgccattgagcaggcccgctttggcgacaagctgacggttatctatgatattgatgaagaggtgaattgctgcattcccagcctgctgatccagccgttggtggagaatgccattgtccacggtattcagccttgcaaaggtaaaggcgttgtcaccatcagcgttgcagagtgcggcaatcgggtacgcattgcggtgcgggataccgggcacggcatcgatccaaaggtgattgagcgggtcgaagcgaatgaaatgccgggcaataaaattggcctgctgaatgttcatcatcgcgtgaagttattgtatggcgaggggctgcatatccgccgcctggaaccaggaacggaaattgcgttttacattcctaaccaacgcaccccagtcgcctcacaggctacgttattgctttgagccggagtgatattgtgaaagtcatcattgttgaagacgaattcctggcacaacaggaactgagctggctaattaaagagcacagccagatggagattgtcggcacctttgacgacggtctggacgtgttgaagtttttgcagcataaccgcgtcgacgccatttttctggatatcaatattccgtcgctggatggcgtgttgctggcgcaaaacatcagccagttcgcccataaaccgtttattgtgttcatcaccgcgtggaaagaacatgcggtagaagcgtttgaactggaggcgtttgactacattctcaaaccgtatcaggagtcacgtattaccgggatgctgcaaaaactggaagcggcctggcaacaacagcagaccagcagtacgcctgccgcgacggtaacgcgtgagaatgacaccattaatctggtgaaagatgagcgaataatcgtcacgccaattaacgatatctattacgccgaagcgcacgagaaaatgacctttgtctatacgcggcgtgaatcctacgtaatgccgatgaacattaccgaattttgcagcaaactgccgccgtcgcattttttccgctgccatcgctcattttgtgtcaatctgaacaaaatacgcgaaatcgaaccgtggtttaataacacctacattctgcgactgaaagatctggattttgaagtgccggtcagccgcagcaaagtgaaagaatttcgccagttaatgcatctttaatcgggaactttcatgaaagcaccaggcttgcccgccgatcaacaatttttcgccgatctgttcagcggcctggtgcttaacccgcaactactggggcgcgtctggtttgccagccagcctgcctcgttaccggtgggcagtttatgtattgattttccccgtctggatatcgtgctgcgcggcgaatacggcaacctgctggaagcaaagcagcagcgaatggtggaaggagaaatgctgtttattccggcacgcgcggctaatttaccgatcaacaacaaaccggtgatgctgttaagcctggtgttcgcaccgacctggcttgggttatcgttttacgatagccgcaccacgtcgttgttgcatcctgctcgccagatccagcttcccagcctgcaacgcggtgaaggtgaagcgatgcttaccgccctcacccatcttagccgttcgccgctggagcagaatatcattcagccactggtgttaagtttgctgcatctttgccgtaacgtggtgaatatgccgccgggcaattcgcagccgcgcggcgattttctctatcacagcatttgtaactgggttcaggataattatgcccagccgctcacccgcgagagcgtggcgcagttttttaatatcacgcccaatcatctgtcaaaactgtttgctcagcatggaacgatgcgttttatcgagtatgtgcgttgggtgcgaatggcgaaggcgaggatgattttgcagaaatatcatctgtcaattcatgaagtggcacagcgttgcggttttccggatagcgactatttttgtcgcgttttccggcgtcagtttggtctgacgccgggagagtacagcgcccgttttcagggctaacgtcagaaggttaattctgtttccagcagcgtcaggatactttgtgcatcttgcgcggcaaacaacgactggcggaagtttttattcaccagtttacgcgccagctgcgagaagactttcacatgattcatcccttcgttagcacccagcgtcagcatgatcaccagttcgacttcgcccatttctgactgccagtcaatcggtttcgccagccgggcaatgctgatactgaaatgacggatccactgagatttggtgtgcgggatcgctacgccaaaaccaacgccggtggtaacaatctcttcccgctgccagacatcttcttccagctcaaacggatgttcagtgcgcccgttaacgccgaggttgccgcacaggaactggatcgcctgctctttattgctaaaatcctgatcaacaaagatattctccagcgccagcagtgggcgaacgtcttcttccggcgtaaaggcggtgagtaacgcttcaatttcctgcgcactgcggcattcacatgcctgacgcgccagttcccgacacgcctcgctatccagttgacgaagctggcttttcaccgccggaatacgcgggctactcatactcagctcatccaggcccagcccaagcagtagcggcagataacggctttcaccgcccagttcaccgcaaatgcctacccatttgccccgctgatgcgcagtggtaacaatctgctgcaacatgcgcaggaacgatggcgtaatcgggttatacagcggcgatacgcgcgggttattacgatcgaccgcatacagatactgggtcatatcgttagaaccgatactgaagaaatcgacctcatcgcagaagtggtcgatgatgtaacacaccgacggcacttccaccatgatacccagagtaatcgtctctgcatgacgcaggccatcgcgcttaagctcaacgatcgctttttggatctcgcccttcacccataagatctgatcgaggctgtgaaccatcgggatcatcaactgggcgttgccaaaactggcagcgcgcaaaatcgcccgtagttgagtgcggaacagggcagcaaattccgggtaaatacgtaccgcgcgatagccgaggaacgggttctcttcctggggaatattcagataaggaatgcttttatcgcctccgatgtccattgtgcggaagataatcggcttgtcgcccgctgccagtagcacctgctggtaggcttcaaattgctcctgctcgtccggcgcgctgtcacgatccatatacagcatttcggtacggaacagcccgacgccttccgcgccgttggcaaacgcgcctggtgcttccagagcggtgccaatattcgccgcgatatcaatacgcttgttatcacgggaataggccagctgcgcggcagcctgcgcctgttgtttttggcgtttatccgccagcgtctgcgcaacctgataataaccgctcaccgcgtcattcgggttaatcgccagcacgccgcactgggcgtcaagcaccgccggttgcccggcataacgggcaatcgcatccagcggcaggccgctcagtaccgggatcgccgaggcgcgggccagaatcagggtatgcgaggtgcgcccggttttctccagaatcatgcccgcaagatttttcaaatcaaggctcaaaaactggcttggggttaaatcttcagccaccagaatggtcggtttttccagcaccagattgttgcgcggcttcagttccggccgggtgatatgcagcaactgttcgctaatatcgcgaatgtcgctaacacgttcgcgcagataatcgctggcagaagcagaaagcttggcgcaaacctgctccatattgctgatgatcgccgcccccagtccctgatgctgttctgtcatcaggcgacggatattgcctgcaaattcatcatcctgaatcagcgacaaatgagcgctgaggatagttttgctttcgccgtcacgctcacgcaattgctggttcagttgctcggcaagcgttgccaggctgtgctccagccgggtggaatcttgcgcactggcggggattgcccgataactgtcgaggctgtcgctttgtaacagggtcagcgtacccacgccgacgccgcttgccagcacattgccgtacagtaaatccgggttaaggcggcttaatgaacgcggcagcggatgcgccgtcagttctgcctgcgtaggctgaacgctgtcgctgtcgataaagcgcacctggatgtactcttccagcacgcgccgcgcctgctcttcatcgctgccgctaatgttcaggctgcaactgtcattaaatagggtgccggtgccaatcagcgccagcgaacttttcgcatcggcctttgcgttctggcgatggttaataaaggtgacttcactttgccactggctgcactgttctttaagttcccacgccggacgagcatgcagaccgttaggcaaaggacagagaaattgaatcgttaacataaccgctccgggttaatcaggagatcatctgaaatccgtcagttgaacaaccgtctcacgggtaagacgttgaataagggcagataaaagttgctgcatctgcaaaatgtcgcggcaatcggcaatcgatgccgcacaatgtccgtggcgcgtcgctggccccatcaccaccgtgggcacgccggtgccggttaaatgcaccgctccgccgtccgtgccgccgttgctgaacatatccgcctgcaacggcacgccaatttctgccgcgacggtttcgatccaggcggtaagttttggcggcgcaatcagcgacttgtcgcttaacaccagcatcggcccgttaccaatctggcgatggttagccgcgctataatcaaagtttttcgcccagcaggcggtatcaagcacaatggcgacatccggcgacaccgcgcgggtggcagtttgcccgccgcgtaatcccacctcttcgctggaacttgccaccagccacacctccgcaggcagttcggcgtcgtgcagctcacgtagtaacgtcaccagcagatagcaaccgaggcggtcatcaaaggctttccccatcacccgctggtgagggagaacctgaaaagttgtatcaaaggtgacgcgatcgcctggacgaattcccgcctgcatcacttcgtcatacgagcgcgcaccaatgtccacgcgcatggcgctgacgtcattcccctgccggtcgccgtcaagcaggcctggaattttgcactcttcacgggtggtgatgcgcaccggctgcagctggcgggcagccatgcgcacgttgccaaccggcagcacgtcaatagcgccttcgcgggagatgctgcgcaccataaatcccacttcgtccatatgggcgcagatcatcaccttcggacctgtcgattcattgaggcggatcagcaccgatcccagaccatcaaatcgcacttctttttgcaggcgatccgcttcttccagtaggatctgccgcacttcctgttccgaggaggcgatcgcatctgcctcgctcaacgcttttaatagcgataaatccattatgcctctcccgtgagcaacactgttttcggcatggcgtagagcacttctgcgccttgcggggtaaccagcacaacatcttcgatgcgcacgcccccttgccctggcaaataaatccccggctccacggtcagcaacatgcctggctgtagcgtcgtggtgtcccgcggtgaaaaacgcggatcttcatggacttcaatgccgatagcgtgaccagtgttatgaccgaaatagtcgccaaatccagcctcggtaatgacccggcgcgcggcgtcgtcaatctgctggcagcgcacgccggggcgaattgcagagattgccgcgagctgtgcctgcaggacaatctgatagacgtcaaacagcgggtgagattcggcgctcaccccttcgccattcaccagcaaggtgcgcgtcatatcagagcagtagccctgatacagcgcaccaaaatcgagagtgacaaactcgcccgctgcaacaatcttgtcgctggctttgccgtgcggcagcgccccgcgccagccgctggcgacaatggtgtcaaaagaggctttttctgcgccctgctggcgcataaaccactccagttcagcggctatctcgcgctcgctcatccccgcctgaataaagcggcgaatatgctccgctccgcgatcggcaatcccacaggcgaggcggattatctccacctcctctggcgttttgatttgccgcagcacatccggcgtggcgctaaccagtttcgcattgagttcagactgccagcggtgcgcggtttcccaactcacctgctggccctcaaaaccgagcgtttgcaactgttcatcggcaatgatttgattgacgatagtggtaagcgtgttcgttgcgtcaagcaaatgcagctggtagccttgcgcacgggcttccacctcaacgtaatagcgcgaatccaccagaatgtgcgcactttcacggctaatcaccacataacctgatccggtggagatccccagatgcggctgtttgttctgccgtgaggagagaagcactgcatccagttgttgcgccttaagccagtcgcgcagcgaagcgagtaatgtcatctggattttccttcttacaggctatcgattaacaatttgcctttacggaacatcatcagacgcaggaacaccaccatcagcgcagttatgactgcccccagcgcgatccccgccatatagacgcccaggttagtgaccagcggccatgcccagatagcggactccgggaaccattgcactgcgcccagccagacagcggcggttgagccgacaatagcgccgaccatatacgacggaatggcggtgatggggctttccagcgcaaacggaatcgcaccctcactgatccccataaacgccaggaacatggcggtcttaccctgcggataaagttgagcgttgaacaggcgtttgccggttaaacgacggtcgataatggtcgccagccccagaccaatcggcggaataacgatagcgatagaacgcgcggtaaccggtaatacgtggtcggtggtaaagctgaaggcaacgaaacctgccgctttgttgattgggccaccaaggtcgattgcggtcgccgcggcaatccccattgcatacatcagcgcgcccttctcacctgcggcagtcagcacggtacggataccgccgttgatccagccaccaaatggggtgatgacatagtacatcgccagcatgacaaaaatggcggaaagaatcggtagcaaaaatgtggttttgaacgctaacaggaaatctggtaactggattttctggttcatccatttcacaaggtaaccagcaacgatagatataatcagcgcaccaatgaaggtggacggcaccggcgaagaggtcgcccattgcatagtgctgggatcgaagttcagcagttgcgtcggctgggtagacatcaacccgccgataaaaccagccgggaacgccagtttgccgccgatagagttcgccacaaaagcggcaaacatcggaatagcaaagccaaacaacacgccgccgaaggactgcgacagccaggcaaatttcagtaaggagaggtcgaaaccggagaatttcccgctattaagagcatccatgatgccgatctcagcaggaattttaagccagctataagcaatcagctggctgaaagcgaggatcacaccgcccataattaaggtcggcaccatgcgtgaaatccctgacatcacatgctgcgggagttcaccccagaagctgcttttagaggcctgcggattcttaactgccgctgccgcaccggatgcgccaggcacaacggttgcactgcgttttttaatggccataacaattatccctgtcgaatattactgttgttcagaggcaatcatctcttcgatttctttgatgatgcctacagcgtttttaattgcgtcctgcaaagtgatttcataaacgtcgcgtgattcgaaacgttcgttatcttccggggtaactgccacggaatggatgatgatggtcgcttcggcgatatcctgcgccgtcaggcgattctggatgccgtccgcgccctgggtttcaattttcacttcataaccggcttctaccgccgcttcttccagcgcctgagcggccataaaagtgtgagccaggcccatcgggcaggcacataaggcaatcagtttcttactcatcgttaattcctcgttcagtgatagttgacgagtgaaattatgaacgtgcaaaacaaatcgccgttaccagacaaataatgcatttactggagaattaatcccgctgtatggaagtgtgacgcaggtcggccttgtgaggggacacaaagaaaaattgaattaactgtatgatttaaaatattatcgggagagttacctcccgatataacaggaaggatttacagaatgtgacctaaggtctggcgtaaatgtgcaccggaaccgagaagacccggattgtcatggacgatgagatacaccggaatatcatggacatattctttaaagcgccctttatcttcaaatgcggcacggaaaccagaggctttgaagaactcaaggaagcgcggcacgataccgcccgcaataaacacgccgccaaatgtcccgagattgagcgccagattgccgccaaaacggcccataatgacgcaaaacagcgacaatgcgcggcggcaatcggtgcagctgtcagccagcgcgcgttcggtaatatcttttggcttgagattttctggcaggcggttgtcagctttcacaattgcgcgatacaaattcaccagcccagggccagaaagcacgcgctccgccgaaacatgaccaatttccgcacgcaatatttcgaggataatggcctcttcttcactattcggcgcaaaatcaacgtgaccgccttcgcccggcaagcttacccaacgcttatcgacatggaccagatgcgcaaccccaagccctgttccggcaccgtaaaccgcaataggtttaccttctaccggttctgcgccaccaaactgaatcagatgctcttttttcagcatcgggatcgccattgatacagcggtaaaatcgttaataatttccagatggctaaaaccgagattctttttcatttcggcaattgagaacgcccaggtatggttggtcattgccacccagtcaccggtaattgggcaagcgatggcaatacagccgtctttcacctcgaccttatgttcttcaagataaacgcgaatgaccgcttcgaggctggggtaatcaagccctgaataggtcttagcctgcgagatttcaccactggcaatatcacacagagcaagacgtgcgttggtgccgcccacatcaccgactaatgcatactttgtcattcttcaactgctccgctaaagtcaaaataattctttctcacactgtaaatacctgggggcataacaacaacgccggaaaggcaggctccctgtaaatatcgatctgggtcacacaattactttatcgtttcagcaccaattgcagcgatgcctttttgcaagctgggcaaactaagtatctgaccccgcataaggaatagaacatgctccatccgcgagccagaaccatgttgttattatcgctccccgccgtggcaattgggattgcgtccagtcttattctgattgtggtgatgaaaatcgcctcggcattacagaatttgctctggcaacgactgccgggaactctggggatagcccaggattcacccctctggatcatcggtgtattaacgctaacgggtattgcggtggggttggttatccgtttcagccagggtcatgccggaccagaccccgcctgtgaaccgctgatcggcgcaccggttccgccctctgcgctaccaggacttatcgtagcattaattcttggtcttgctggtggcgtcagcctggggccagaacatccgatcatgaccgtcaatatcgcccttgcggttgccattggcgctcgtctgttaccgcgcgtcaaccgaatggagtggactattttagcctctgccggaaccatcggcgcgctgtttggcacacctgttgcggcggcgttgatattttcgcaaaccttaaatggcagtagtgaagttccgctatgggatcgtctctttgcgccgttaatggcggcagcagctggtgcacttactaccggattatttttccatcctcatttttcactgcccattgcgcattacggacagatggaaatgaccgatattctcagcggtgcaattgtcgcggcgattgccatcgcagcagggatggtcgccgtatggtgcttaccacggttgcactcaatgatgcatcaaatgaaaaatccggtgctcgtgctgggtattggcggatttattctcggtattctgggggttattggtggaccagtttcgctgtttaaagggctggatgagatgcagcagatggtggcaaatcaggctttcagcaccagcgattactttttgctggcggtaattaaacttgccgccctggtcgttgctgccgccagtggctttcgcggtgggcgaatcttcccggcagtgtttgtcggcgtggcattagggttgatgctgcatgagcacgttcccgccgtaccagcggcaataaccgtttcttgcgctattctcggcatcgtgctggtggtaacacgcgatggctggttaagtctttttatggcggcagtcgttgtacccaataccacattgctaccgctgctctgtatcgtcatgcttccggcatggctgttattagcaggtaagccgatgatgatggtcaatcgtccgaagcaacagccaccccacgataacgtttagcaaaaaatgctctcctttatgatttaagagttatggcgatgatacggggctttacctccccgtaatattgcgttaacaggccgctgacggcttcgatcgtgaaggagaataacaatgttcaggtcactgtttctggcggccgccctgatggcatttaccccgcttgtagcaaacgcaggtgaaatcaccctactgccatcaatcaaattacaaattggcgatcgcgatcattacggtaattactgggacggtggtcactggcgcgaccgtgactactggcatcgcaattatgaatggcgtaaaaaccgctggtggcgtcatgataatggctatcatcgtggctgggataagcgtaaagcgtatgagcgtggctatcgtgaaggctggcgcgatcgtgacgatcatcgcggaaaaggccgcggacatggacaccgccattaaacacattcgccaatggagcacaatgcctgatgcgacgctagcgcgtcttatcaggcctacaaaccggctctttaacgcgtagggcggataaggcgtttacgccgcatccgccaatagtgccagatgcgacgctcattcaactacaatcccagcgccgttcctaccagcaaccagatattcagcgccactaccagcactacaatcacccagcctgtctgttttacgcgtttgctgttcaccagatcgcccatcaacttgctgtcactggtgaaaatcagcagtggaaccagcgccagggcgataccaaaacttaacagcacctgactcataaccagaatccgtgtcggatctaatcccatcagaatgacaataaatgacggcaacatggtgactgtacgacgcacccacagcgggatatggaagcgaatgaacccctgcatcaccacctgccccgccagtgtccccaccaccgttgaggacagtccggcagcaaccaggcttaatccaaagaccgttgccgcagcatggcttaacaacggttgcagcgtcagatatgcctcatcaagatcggcaacaccagtatgaccggaaaagtggaacgccgccgcagctgtagccatcatcgccagattgacaaaaccggcaatcgtcatggcgatagccacatcccatttggtggcggaataacgttgttgacgcgaaccgccatgtaaatgctgagtgagcgaagagtgcaaataaatcacatgcggcataatcgtcgcccctaacacgcctgctgccaggaagaccgcctccgaagtaggtaaactcgggatcaccattcctttacccagctgcgccaggttaggctgggagaaaatcaactcgacaatgtaagccgcggcaacaaacaacagtaacccgccaatcactttctccagcggtttttgcccgcgacgttgcagcattaaaatcaggaaagtcgcgatccccgtcagcaccgcgccctgcaacaacgaaacaccaagaatgagtttaaaaccgatcgccgcaccaataaattccgccaggtcggttgccatcgcaataatttctgcctgaacccaatagaaccacactacgggacgcggatagtgatcgcgaatctgctccgccagatttttaccggtggcaatccctagtttggcagagaggatctgaatcagcatcgccatcaggttggcccaaacgacaacccacagtagctgatagccgaagctggcacccgcctgaatattggtcgcaaagttaccgggatcgatataaccaatcgccgcaatgaacgcaggtcccattaatgcgagcctcatcttgcgcgccgcccgtccgctgctactctcaacgcgatagttcgtcatcttgtgcctctaaaacatagcctttgctatgtttcatgctatgccaaacgagaatgattatcaaattcatttaaatgggttgtggtgatttctctgatagacctggattatgactacgaaaagattgatgacttgaatgttatggttatgtttaatgttagcacatttacataactttcagcttccatacacaacatagcagaaatgtatgacagatcactatttttgaagcttgtcacaggacgtcattatagtgtgtgtcagatctcgttttccttaaccatgttacatagaatgtgcacggaaatttaacctgcctcatatttggagcaaatatggaccgcgtccttcattttgtactggcacttgccgttgttgcgattctcgcactgctggtaagcagcgaccgcaaaaaaattcgtatccgttatgttattcaactgcttgttatcgaagtgttactggcgtggttcttcctgaactccgacgttggtttaggcttcgtgaaaggcttctccgaaatgttcgaaaaactgctcggatttgccaacgaagggactaacttcgtctttggtagcatgaatgatcaaggcctggcattcttcttcctgaaagtgctgtgcccaatcgtctttatctctgcactgatcggtattctccagcacattcgcgtgttgccggttattatccgcgcaattggtttcctgctctccaaagtcaacggtatgggcaaactggaatcctttaacgccgtcagctccctgattctgggtcagtctgaaaactttattgcctataaagatatcctcggcaaaatctcccgtaatcgtatgtacaccatggctgccacggcaatgtccaccgtgtcgatgtccatcgttggtgcatacatgaccatgctggaaccgaaatacgtcgttgctgcgctggtactgaacatgttcagcacctttatcgtgctgtcgctgatcaatccttaccgtgttgatgccagtgaagaaaacatccagatgtccaacctgcacgaaggtcagagcttcttcgaaatgctgggtgaatacattctggcaggtttcaaagttgccattatcgttgccgcgatgctgatcggctttatcgccctgatcgccgcgctgaacgcactgtttgccaccgttactggctggtttggctacagcatctccttccagggcatcctgggctacatcttctatccgattgcatgggtgatgggtgttccttccagtgaagcactgcaagtgggcagtatcatggcgaccaaactggtttccaacgagttcgttgcgatgatggatctgcagaaaattgcttccacgctctctccgcgtgctgaaggcataatctctgtgttcctggtttccttcgctaacttctcttcaatcgggattatcgcaggtgcagttaaaggcctgaatgaagagcaaggtaacgtggtttctcgcttcggtctgaaactggtttacggctctaccctggtgagtgtgctgtctgcgtcaatcgcagcactggtgctgtaaaaccatacataaaaaagccggggatcattccccggcttttttacgcctgttaatcagctaatggctgcgggcgaccaatcaaatacccttgcagatattgcaccccgagcttatgcaatagcgcctgctgctgttgcgtctcgacaaactccgcgaccacactcaatgacttcgctttcgccagatcggtaattgatctcacaatcatcgcatccagcgtattcgtgacaatatctttcacaaagacgccatcaattttgatgatatcagcctgcaaacgctttaaccgttcgtagttggcatatccggtgccaaagtcatcaatcgcaatccggaaaccaaacttatgcagctgctcgatgttgtacatgctgctttctgcgttagaaaacgcctgctcctcggtgatctcaagaatgaccgcctgcggggagatgtgataacgcttaaacagacgaataatccgcccggcaatattcttttgcagcagcgtgagcggcattaaattgactgaaaagcgcggtccttttttgtcgcaagggtgtgttgccagccacttcaacaaggattccagcacttgcaaatcaaaacgcgcgctaaggttaaactgagcaataaggggcagaaacttatccggggtcataatgccgccgtcatatttcagtcgcgcgaggatctcatcataaccttcaccctctttgttgcgaattggctgggcgtagagcagcaaatcaccctgatctaacgccgtgcgaatggtattcagcaatagcacctgtttagtggtctgcccggaaaccatctcctctctgctatccagcgccagcacatgatgatgtgcgcaggattgctccgccagccagcttaactgccccaacaagggttgcagggtttcctgatttccatcaaaacgcccccaggcagcaccatagcccatatccagcccggtattgttccagtgaatttgccgactattcaggatgttaatcatatgctggagtcgcccttccgtttccggcccgctcagcactaacagcagttcactacccggcaattgatacaacttttcgttttcctgcatcaacggcagcagcgtacggcaaattgagcggatacagtgaacgcgcatcattaagccgtaatgacgactcataaactcaagattatcaatgcgcaggcagcaaaaactcttgcccgcctcttgctccggcgcttgttccaacgcacgaaagttgggtaggagcgttaacggatctgtcagcgcctgcaaatgccagcggcgattaagccattcactgcgatgataaatgcgcaccatatagagcaggcaaacgctaaaggaaatcagcaccgcaagaataaatgccagcgaatattcggtttccaccccttgcaaaaagttctggttgtaattcagcaggcaaagcgttgaaacagcccaggtgagatttaaaaacggatagcgaagcttaccgaccccgagggtaaagatgatgaagaaaacgggtaccaagtaaccggcaataaagtcgttttcataaggtgtgcacaacagaagtagcagcacgcttaacgctgccagccagcttaaggtaaatgcgcgtttctctttgcccaacgacggagcgatatccctgcgccacaatatctgcgcaaagtggggacttacaatcatgcgagtgagatagtagaaaagcatgttgtaaatcagcacagcggtgaaaaggcttagcaaatcaacgaccgtgaaaatggcatccgcatcgccgaaaaaggtggatatctttagcgggaaatcaaagaagctccccacaagatacatgctgcatttgatgccgatcggcgtcaccaaaccaagccagaacagacgttgccagacatatcggctggtcaatccataacgccaacgcgtccccagctgccagcgtaatattgcgcaggcacacaacacgacaaacgtctggctaccgagcatgaccgcagtctgtaaaaaagagagatgaaagttccacagattggtgcaaaacatcccgcataaaacgggaacgacaccgcgccagccaaagataaacaagattgacagcattacgcacagtggcatccacgccagaaagatataactggaatggataatggcaagtggcgaaataaaacgggatagctgaataagtaccacggtgagcgtaaacgctagtgtgaatatcttgatattttttatcaggttatgctccacaaacatgagtacactactctcactgatcggggttttcaggcacacaaataataagtttattcgcatcgcgaagcaaacaggggccagcctgttgccgatttttcatccaatgatgctttcaccaggcggcgctaacccggacgtagactgtattacaaaagcggcaaaaagcagagacaaaaaacccccgctttgcagcgagggttggaaatttggtggagctaagcgggatcgaaccgctgacctcttgcatgccatgcaagcgctctcccagctgagctatagccccacgatgcgtttacgtaccaaatttgctgggtgcaaaatttggtggagctaagcgggatcgaaccgctgacctcttgcatgccatgcaagcgctctcccagctgagctatagccccgtcacgtaaagcttgtcgagttgacgggcggcatcatatgaattccgcccgaatgtgtcaacggcaaattgcaacgtgtagtttcaatcgctgaaaaatcaggcaaatgaacaattttggaaaaccgctcgcattcagtagttattcatgtcacggtttcctgtaaagtggtgttataaaatgaactactaatagacccacatacattcagggaattgttatgttcaaggagaggatgacaccagatgaacttgccagactgaccggctatagccgccagaccattaataaatgggtacgcaaggaaggctggacaacgtcaccaaaacctggcgtccagggtggcaaagcccgactggttcacgtcaatgaacaggttcgtgaatatattcgcaatgctgaacgtccagaaggtcagggagaagcgcctgccctttctggtgatgcgccgcttgaagtattgctggtgacactggcgaaagagatgacgccagttgaacaaaaacagtttacatccttgcttctgcgggaagggattatcggattgttacaacgcttagggattcgcgatagcaaataatatgaaaagattacgcaacaaaatgaccaccgaagaactggctgaatgcctcggtgtggctaaacaaactgttaaccgttggatcagagaaaaaggctggaaaacggaaaaatttcccggcgtgaaaggcggtcgtgccagacttattctggtcgatacgcaagtttgcgagtttattcagaacacgccagccttccataacacaccaatgttgatggaagctgaagagagaattgctgaatacgctcctggagcacgcgccccggcgtatcgacaaatcatcaacgcgatagataatatgacagacattgagcaggaaaaagtcgcgcaatttttgtcacgtgaaggaattcgcaatttcctcgcccgtctcgatattgacgaatcagcataaataaaaaacggcaggatattatctcctgccgtttatctttttacacgctaattactgctgattttcgcgttcagcaataaaatccagcgctttgttgatacgctcgatactgcgggtcttaccaattgcgtgaacggtaacatccagtgctggagactgccccgcaccggttacggcgacacgcagcggcataccaactttacccatacccacttccagctcatccgccgtcgcctgaatagcgtgatgaacgttttcagcggtccagtcagtaatcgcggccagtttgtcacgaaccacttccagcggctgacgcgctaccggacgcagatgttttttcgccgcatcggcatcgaactcagcaaaatcttcgtagaaataacggcagctctgtgccatctctttcagcgtcttgcagcgttcgcccagcagtttcaccagatcagccagctgcgggccgttacgggtatcgatattttcctgctcaatgtgccactgtaagtgagtagcaacatactccggcggcagcgcgttaatgtagtgatggttcagccacagcagcttgtcggtgttgaacgcactggcagatttgctgacggcattcaaagtgaagtatttgatcatctcttcacgagtgaagatttcctgatcgccgtgggaccagcccagacgcaccagatagttcagcagtgcttctggcaaataaccgtcatcacgatactgcattacgctgactgccccgtgacgtttggacagttttttaccgtcatcgccattgatcatagaaacgtgcgcgtaaaccggcactggcgctttcagggccttaagaatgttgatctggcgcggcgtgttgttgatatggtcttcgccacggataacgtgggtgatttccatatcccagtcatcgacaaccacacagaagttataggttggggaaccatcggtacggcggataatcagatcatccagctcctggttgctgaactcgatcggaccacggatctgatcgtcaaaaacaacagaaccttcctgcggattagcaaaacgcacgacacacggttcatcatcagcatgatgctcatggctgtggcggcagcgaccgtcataacgcggcttctcacctttcgccatttgctcttcgcgcagcgcttccaggcgctctttagagcaatagcatttataagcagtgccctcttccagcatctgatcgatcaccgcattgtagcgatcaaaacgtttggtctggtagtacggaccttcatcccactccaggctcagccagttcatgccatccataatggcttcgatagcttccggcgtggaacgctcaagatcggtgtcttcaatacgcagcacgaactcaccgccgtggttacgtgcaaaaagccaggagtaaagagcagtacgcgcgccgccaacgtgcagatagcctgttgggcttggcgcgaagcgagttttgattttcatgaaatggccttacgtttagaaagatgccgacaaccggcaaatcctggaaaaattgagtgggcgatattctatcactcccgcctgattcctcaatgtagttcgggtttctaccttacgcattattgttttcgttgacaaattgcgcaacacggtctgttttgcgatcatcttgcttaaatttacgacgaacgaacaatttctttagaaaatgcgttgactcattttgaactctccctataatgcgactccacacagcgggggtgattagctcagctgggagagcacctcccttacaaggagggggtcggcggttcgatcccgtcatcacccaccaactactttatgtagtctccgccgtgtagcaagaaattgagaagtgggtgattagctcagctgggagagcacctcccttacaaggagggggtcggcggttcgatcccgtcatcacccaccactttctcgccagctaaatttcttgtaaaaatgtgaagtaccgaagtgggtgattagctcagctgggagagcacctcccttacaaggagggggtcggcggttcgatcccgtcatcacccaccacttcgggtcgttagctcagttggtagagcagttgacttttaatcaattggtcgcaggttcgaatcctgcacgacccaccaatgtaaaaaagcgccctaaaggcgcttttttgctatctgcgatactcaaagattcgaacctgcagcaggtttgagttgagcgcagcgaaacaacggagccgctcgcggcgacggcccgaagggcgagcgaagcgagtcatcctgcacgacccaccaatgtaaaaaagcgccctaaaggcgcttttttgctatctgcgatttgcgaaattgcctgatgcgcttcacttagcagacgactatttccggcaattcctgtctcctcacctactgtgtcaatgcagccaacagcttaaccatcgcgggcgtcacctgctgtgtttcataaacaatatataaatctgcagggatgcgctgtttgagcggacggaaaatgacacctggccagttcatttgtgcgtagctgtccgctatcaatgtgataccaatacccatactgaccatggcgagtaccgtttgcggttcattaacttcgcgaataacaaccggtgaaaatcccacctgctggcaaactcgctgcaaaaaatcccagtcagtgtacacgggcggcattgtaacaaaatactcgtcacgtagcgcttccagcggaacggtggaaaatgatgagagatgatgctcttcaggcatcgccaccagaaacgccgattcatgcaaccgtaagctggtaaaacctgtcggtggttctgtcgccattcgccagatcccggcatcgagttcacgtcgttccagcagggccatttgcatcgcgggcatcttttcgcgaaaaagaacttcaacgttaggattttccctgaggaatcgccgcataaccgggcgcatccgtccccacatagccgttcccactacgccgagttcaatccgccctgcttctccccgacctatttgttcaacccgagccaatacattattagcattcaccagcaatcgacgcgattcttccatcaagattttgcccgcgtgtgtcagtacgacgctgcgcgaatggcgaatataaagctgcgtgccgagttgattttccagctctttaatatgaatactgagcggaggctgagacatatttaaacgcgctgctgcgcggccaaaatgcaactcttccgctacggcaagaaaataacggagcaacttaagatctgttctgtatacgcgttccataattaagtgctccatataataaatacatcgtattaaattatcatggcataaagtatttcaccaccagatatccgacatacataaacacaatggataatatacctggtaatacatttggtacaggaataggcaagcgcacgattgtaaacaaagcaccaatgccaaaaccaacgccggaagaaaataaaatatctttcactaattaacctttatcataaaagcagctctgaagagcagagctgcgaatccttttaatgagccaccgctcgatgctttatcttttcagggtcatgattatatttaaacccaaagaaaaatatcactgcgagaaaaagagcatatcctgcaaacaccagccagatagtttgccagtcttttacgccatccaccgaaaagtaatctactgccatgccactcagaatcgagccaacccatgcgccgacaccatttaccatggtcataaagagcccctgcgcgctggcacgaatgctggaatcaacttcctgttcgacaaataccgaaccagaaatattgaagaaatcgaatgcacagccataaacaatcatcgacagcagcagcaaaataaatccggttgttgacggatcgccataggcgaagaagccaaagcgcagcgtccaggccaccatactcatcagcatgacggttttaatgccaaatcgctttaaaaaaaatgggatagtcagtataaagcccacttctgccatctgtgaaactgacagtaaaatggagggatatttcaccacaaaactgtcagcaaactccgggttacgggcgaaatcatgtaggaacggattaccaaaaacgttggtaatttgcagtaccgcacccagcatcatggcaaagaggaaaaagatggccatgcgtggatttttaaacagcacgaaggcatccagacccagcttgctggcaagcgatgtggtcgcttttttctccgcaaccggaatcttcggcaaagtcagcgcataagccgacagcagcaatgacgcaccggacgcgatatacagctgcagactactcaattccagatgcagcaggcttactgcccacatcgcgacaatgaaccccaccgtaccaaaaacgcgaatgggcgggaaagcggtcaccgggtcaagccctgcctgggcaagacaggaataagagacgctgttcgataacgcaatagtcggcataaacgccatcgcattgactaacatcacccaaaacatcatatccggatcagttacggatgccgcataaaaaagtacgcccgcacacaccaggtgacacagcatgtatgcacgttctgcgcgcagccatttgtctgcgatgatccccattataccaggcataataatcgcggcgatccctttggaactgtaaaccatgccaacattagcgccggtgaaatgaagggtattaatcatgtaagagccgagggtaaccagccagctcccccagataaaatattgcaaaaaggacattacctttaagcgcatcgcgatgctcataatcgtttccttgtcgcatcatttggcctcacccgcgaggccgtttcttattgtttttctcaggcaattttgcgcagaaagccacaaataaggttgatgaagttctgcttagagagctccgcagccgccagcgtttgcgcatgtgacaatttcacatcgcttaaaccttccgccatattggtaatcgcagagaccgcaacgactttaaggtcgcaatggcgagctgaaataacctcaggcaccacagacataccaacaacatccccaccaataatttgcatcatgcgaatttccgccgcagtctcgaaattcggccccggatacgagacgaacacgccctccgtcagagggaaaccctcttctttcgccactttttgtaacagtgcgcggtattccgcatcgtaggcatttgccagtgagaagaagcgctctccaaaacgatcatcgttaagacccaccatcggcgtaccgggcatggtgttgatatgatctttcaatgcgaccaggctgcctgcccccacttccggacgcagcgagcctgccgcattggtgcagaacagtagctcgcagcccagcagcttaaaggtacgaattgcgtcagtcataatggtcattccacgaccttcgtagaaatgtccgcgacctttcatacataccaccggtacgccctggagatggcccagcactaactcccccgcatgaccatgtaccgtacttaccgggaagcccggcagcttttcgtaggaaattgcgacagcgttctcaatctgatcggccagcgcgccgagcccggaacctaaaataaaggccactcgtggcgtgaaatcaggtttataagtcttgataatatctatgcaaaacagcgggttatgagaaaattgaacctgagacatacatatcctttttctgtagggtggaatctaacgcctttttatagcgaggttgtcccggctcttaccaatacacttttctcacgcattcaatagcgattcgatatcgatggatttatatcttttctctattaatccacggtaaaaactgtattggcgatattaattcctttgcattaacaatatgtcgtttttagcaaaccactttattaagcaatctactaataacgatcggcatagggaattatgctatgaaaaaacatcttttaactctgacactttcctctatattagcgatacctgttgtatctcatgcagaatttaaaggcggttttgcagatatcggcgtgcattatctggactggaccagccggactaccgaaaaatcgtcgaccaaatcacacaaagatgattttggttatcttgaatttgaaggtggcgctaactttagttggggagaaatgtacgggttcttcgactgggaaaacttctataacggtcgccataataaaccaggtagcgagcagcgttatacctttaaaaataccaaccgtatttacctgggtgacaccggatttaatctctacttgcatgcgtatggcacctacggttctgcgaatcgcgtgaatttccacgacgatatgttcctgtacggtatcggctacaatttcaccggcagcggttggtggttcaaaccgttctttgctaagcgttatacagatcaaacctattacactggcgacaacggctatgtcgccggctgggttgcaggttacaactttatgctgggcagcgagaaattcactcttaccaactggaacgagtacgagtttgaccgtgacgctacctatgcagcgggtaatggcggtaaagaagggctgaatggcgcagttgcactgtggtggaatgcaacatcacacattactacggggattcagtatcgatatgcggatgacaaactgggcgaagatttttaccaggatgcgataatctactccatcaaatttaacttctgattgattactgccggggctcccggcagtatgaattcactctatatctgatacaacggatccccttcccgaccagccattagcgcattgccctggtctcgtaccacgtcccataacgcttcagcggcggtggaaagtgaacggttcttcctgcgcaccagcatcaactggcgttcaacaaccggcgtaatgcgctttaccaccagtgggctaccttcaggcaatggtagcgccagtgcgggaagaatactgatgccgatgcctgcggctaccatcgggaacagcgtcgccggatgtccaatctcctgcacaatattcgcctgaataccattgcgcgccagcgctgcgtcaatcagcggtcggctgcctgacgcgtaatcctgcaacaccaatttcgctccctgtaatgcctgccagggtacataatcttcgacggccaaagcgctatcgcgatggcaaagcagaaagaaaggctcggaaagaatcgcttcacattgcagatcgcccactgggcctggatcgatgacgatgccaaagtcgacatctccctggcgaatactttccatcacccactgctgcggacgatcgtgcaggacaaactgaatatctggatagcggcgatggctttcagcaatgcattgcggaataagatgcgcggaaatggtctggctggcagcgacccgaacttttccgctcagttgttgccccatacgcccggtatcgcgcaacgtgctgttcagttcatccagcagtcgctcaagacgcaaagccagctgctgccctgcatctgtaagcaccacttcacgcgtggttctgtccagcaggcgaacaccagtatgattttccagttccttcacactgtgactcactgccgactggctcaggccgatacgctctcctgcacgactaaaacttttctcctgcgctactgtgacgaaaacctttaattgttttaaagaataattcatctgttttcttcatgaatggatgcaataaatcaattttatttctcaaactggaagaagcacaatagaaccatcgatcatctggagtctttatgaaactttttcgtatcctcgatcctttcaccttaaccctgatcacggtggtgttgctggcctctttctttccggccagaggcgatttcgtccccttctttgaaaatctgaccaccgcagcgattgccctgctgttctttatgcacggcgcgaagttgtcgcgtgaggcgattattgctggcggtggtcactggcgactgcatttgtgggtaatttgcagcaccttcgtgctgtttccgattctgggtgtactgtttgcctggtggaaaccggtaaatgtcgacccgatgctctactccggttttctctacttgtgcattctcccggctaccgtgcagtctgcaatcgccttcacgtcaatggcgggcggtaacgtcgcggcggcggtttgttctgcgtcagcatccagcctgctggggattttcctttcaccattgctggttggtctggtgatgaatgttcacggtgcagggggcagccttgagcaggtcggtaaaattatgctgcaactgctgctgccgtttgtgttggggcatctttcccggccgtggattggtgactgggtgtcgcgcaataaaaaatggattgcgaaaactgaccagacgtccattctgttggtggtttatacagcgttcagcgaagccgtcgttaatggtatctggcataaagttggctggggatcattgctgtttatcgtggtggtcagctgcgttcttctggctatcgtgattgtagttaacgtctttatggcacgccgactgggcttcaataaggcagatgaaattactatcgtcttttgtggttcgaaaaagagtctggcaaatggcatcccgatggcaaacattctgttccccacatcggtgatcggtatgatggtgctgcccctaatgattttccatcagatccaattgatggtctgtgcggtgctggcgcgtcgatacaaacgccagaccgaacagttacaggcacagcaggaaagcagcgccgataaagcttaaagcggacgcttcaggggctggaccagttgcgtcagcccctcggttttaatcagcagcgtgatttgcattagctcaccgagcttccctgccgggaattcatctttgcgggcaaaccacagcagatactcctccggcaggtcgattaagcgacgccctttatatttgccaaacggcattatcgtattggctatttcaatcagctgctctttttccatctcagctacccagcaaacgcagcatttccgcttcgtcgatgacttcaatgcccagttcctgcgctttcgccagtttagaacctgccgcttctccggcaatcaccagatcggttttcttcgacacgctgcccgcgactttcgcgcccagttcaaccagtcgagctttagcgtcatcacgcgacatctggcttaagctgcccgtaagcaccacggttttaccagcaaacgggctgtcaatctcttccgcgttgataacgatcggcgcaggccagtgaacaccttccgccaacagctcgctgatgacattgcggttgctttcttcggcaaagaagttgtgaacgtgggatgcaacgacaatgccaacatcaggcaccttttgcagctcttcaatcgaagcggcttccagcgcttccagcgtgccgaaatatgccgccagacctgctgcggtggcctcgccgacttcacggatgccaagtgcatagaggaagcgagcaaaggtggtttctttcgctttttctagcgcgttaaccacgttttgtgccgattttggccccatacgctccagtccggtcagtttgcctgcggtgagtttgaacagatctgccggagtatggacatattctttttcaaccagctgatcgatgattttgtcgcccattccgtcaacatccatcgcacggcgggaaacaaagtgtttcagcgactctttacgctgcgctccgcaaatcaggccaccggtacagcgggcaaccgcttcaccttccacacgctcaacgtcagaaccacataccggacaatgcgtcgggaatacaacctcacgggtatcttccgggcgttcagaaagcacgacgttaaccacctgcgggatcacgtcgccagcgcggcgaatcaccactttatcgccaatgcgtaaaccaagacgttcgatttcatccgcattgtgtaaggttgcgttactcaccagcacgccagcaacatggacaggttccagacgcgcaacaggcgtaatcgcgccagtacgcccaacctgaaactcgacgtcacgcacaaaggtcatctgctcctgcgccgggaatttaaacgctaccgcccagcgcggggcacgcgcgacaaagccaagctgctcctgctgttccagtgagttgaccttaatcaccacgccgtcgatatcaaagcccagcgtcgggcggtcttcttccactttgtgatagaacgccagcacttcttccgccgattcacaaagcgttacccgatcgctgaccggcaacccccactttttaaattgcagtaaacggccaagatgagtatccggcagctcgccaccttccagaacaccaacgccatagcagaaaaaagtgagcggtcgcttcgctgtaatacgcggatcaagctgacgcagtgaaccagctgccgcattacgtgggttagcaaaaactttcccgcccgtgcgtcgcgcatcttcgttaatcttttcgaaccccgcctgcggcaggaacacttcaccacgcacttccagacgcgccgggatattctctccgtgcagcttcagcggaatagcgcgaatagtacgcacattagacgtgatatcttccccggtggtgccatcgccacgggtcgcggcactgactaaaacgccattttcatacagaatactgacggcaaggccatccagcttcagctcacagcaccaggtgactttctcgttgtttttcagacggtcctgcacacgtttgttgaaagcaagaaagctttcttcatcaaaaacgttatccagtgacagcattggtacttcatggcgtatctggctgaaagccgccagcggcgcagcgcctacacgttgggtaggcgaatcaggcgtaatcagttctggatgtttggtttccagctcgcgcagttcgcgcatcagcctgtcgtattcagcgtcgggaatttccggcgcatccatcacatgataaagatattcatgatggcgaagcgtcgttcgcagttctgtcagttgttgttcgattgattccatatcgcaccatcaatgctaaaaacccccgacaagcgggggttcgaagaggagttaatttgccttaagtgtatcaggcgttggcgtctttgacttcgcggatgatgtcctggtactcgcgcaatttctgcggagtcatcatacggcgctgatcgtcaagcacgacaccgcccacttcatcggcaatatgctgcgcagattgcagcatcagcttgaagttctgcagctcgtcaccgtaagacggtacctgcataaagatggtgacacccggagtagtgaaatccttcatttcaggatcaaaggttcccggtttcaccatattcgccaggctgaataacgccgggccgctgccatccgggctaagatgacgatggtaaatattcatatcgccaaaaatgaagcccgcttgttgaatgctgttaagaagcagttcaccgtttagctcgctaccgtgatgcgccgcgacgttcatgataatcaccgcttctttgcgcttcggtttatccataactggagccggttccgctacaggctcaggctgtggtgccgctacgggttctgcaggctggaaagcctgttgtgccggttgcggtgctgaatgcacaggctgcggcgctggcgcgacctgtggcgaaactggctgctgcaacggctgttcaggctgcggctgataggcaggctgctgcaccggctgcgctggacgcggagcatgttgcggcggtacctgcgcttcaggcggctgctggaccggttgacgcggctgcgcagacgcataaggcggttggtactggtgttgcggcgacggacgagcagcctcatgctcctgagcgttagccggggcatgattcacgcggtgaacacgaacctcaccaacgccctcatcatcttcgacatcctcgtcataagaatcgtcgtcacgttttgacttcattcgttttaatggccgatcgcggaacatagaagatcgttctttacggctggtccagaaaccatgtaccagtaaagcgattatggcgatcgcgccaacaatgattaatatcagacgcaaatcctgcatcattatattctctgttgttctaacaccttgccaccacggcaaacatttactcactaagagtatttgccgattacctcaagtgcaagtgcactattaactttcacagcacaaagatagatgaaatcgtgctttttgctgttttttcgaacatatcctaactgtccattgcgcaattacccggtaaaatacgcagaattttcctgggattggtcaaaaggagctcatcctgattatggtttcatcattcacatctgccccacgcagcggtttttactattttgcgcaaggctggaagctcgtctcgcaacctgggattcggcgtttcgttattttaccgctgctggtcaatattttgttgatggggggcgcattctggtggctctttacacagctcgatgtctggatcccgactctcatgagttacgttccggactggctacaatggctgagttatctgttgtggcctctggctgtcatctctgtgctgttagtgtttggctatttcttctccacgattgctaactggattgccgctccgtttaacggtttattggctgaacaactggaagcacgattgactggcgctacaccgccagataccgggattttcggtatcatgaaagatgtgccgcgaatcatgaaacgcgaatggcaaaaatttgcctggtatctgccgcgcgcaattgtattgctaattctttacttaatccctggtattgggcaaaccgtcgcgccggtactgtggttcctgtttagcgcctggatgttagccatccagtattgcgattaccccttcgataaccacaaagtgccgtttaaagagatgcgcaccgccctgcgcacacgcaaaatcaccaatatgcagtttggtgctttaaccagcctgtttacgatgatcccgctgcttaatctgttcatcatgcccgttgccgtttgtggcgcgacggcgatgtgggtcgattgctatcgcgataaacacgcgatgtggcggtaacaatctaccggttattttgtaaaccgtttgtgtgaaacaggggtggcttatgccgccccttattccatcttgcatgtcattatttcccttctgtatatagatatgctaaatccttacttccgcatattctctgagcgggtatgctacctgttgtatcccaatttcatacagttaaggacaggccatgagtaagatttttgaagataactcgctgactatcggtcacacgccgctggttcgcctgaatcgcatcggtaacggacgcattctggcgaaggtggaatctcgtaaccccagcttcagcgttaagtgccgtatcggtgccaacatgatttgggatgccgaaaagcgcggcgtgctgaaaccaggcgttgaactggttgaaccaaccagcggtaataccgggattgcactggcctatgtagctgccgctcgcggttacaaactcaccctgaccatgccagaaaccatgagtattgaacgccgcaagctgctgaaagcgttaggtgcaaacctggtgctgacggaaggtgctaaaggtatgaaaggcgcaatccaaaaagcagaagaaattgtcgccagcaatccagagaaatacctgctgctgcaacaattcagcaatccggcaaaccctgaaattcacgaaaaaaccaccggtccggagatctgggaagataccgacggtcaggttgatgtatttattgctggcgttgggactggcggtacgctgactggcgtcagccgctacattaaaggcaccaaaggcaagaccgatcttatctctgtcgccgttgagccaaccgattctccagttatcgcccaggcactggctggtgaagagattaaacctggcccgcataaaattcagggtattggcgctggttttatcccagctaacctcgatctcaagctggtcgataaagtcattggcatcaccaatgaagaagcgatttctaccgcgcgtcgtctgatggaagaagaaggtattcttgcaggtatctcttctggagcagctgttgctgcggcgttgaaactacaagaagatgaaagctttaccaacaagaatattgtggttattctaccgtcatcgggtgagcgttatttaagcaccgcattgtttgccgatctcttcactgagaaagaactgcaacagtaatgccagcttgttaaaaatgcgtaaaaaagcacctttttaggtgcttttttgtggcctgcttcaaactttcgcccctcctggcattgattcagcctgtcggaactggtatttaaccagactaattattttgatgcgcgaaattaatcgttacaggaaaagccaaagctgaatcgattttatgatttggttcaattcttcctttagcggcataatgtttaatgacgtacgaaacgtcagcggtcaacacccgccagcaatggactgtattgcgctcttcgtgcgtcgcgtctgttaaaaactggcgctaacaatacaggctaaagtcgaaccgccaggctagactttagttccacaacactaaacctataagttggggaaatacaatgttccagcaagaagttaccattaccgctccgaacggtctgcacacccgccctgctgcccagtttgtaaaagaagctaagggcttcacttctgaaattactgtgacttccaacggcaaaagcgccagcgcgaaaagcctgtttaaactgcagactctgggcctgactcaaggtaccgttgtgactatctccgcagaaggcgaagacgagcagaaagcggttgaacatctggttaaactgatggcggaactcgagtaatttcccgggttcttttaaaaatcagtcacaagtaaggtagggttatgatttcaggcattttagcatccccgggtatcgctttcggtaaagctctgcttctgaaagaagacgaaattgtcattgaccggaaaaaatttctgccgaccaggttgatcaggaagttgaacgttttctgagcggtcgtgccaaggcatcagcccagctggaaacgatcaaaacgaaagctggtgaaacgttcggtgaagaaaaagaagccatctttgaagggcatattatgctgctcgaagatgaggagctggagcaggaaatcatagccctgattaaagataagcacatgacagctgacgcagctgctcatgaagttatcgaaggtcaggcttctgccctggaagagctggatgatgaatacctgaaagaacgtgcggctgacgtacgtgatatcggtaagcgcctgctgcgcaacatcctgggcctgaagattatcgacctgagcgccattcaggatgaagtcattctggttgccgctgacctgacgccgtccgaaaccgcacagctgaacctgaagaaggtgctgggtttcatcaccgacgcgggtggccgtacttcccacacctctatcatggcgcgttctctggaactacctgctatcgtgggtaccggtagcgtcacctctcaggtgaaaaatgacgactatctgattctggatgccgtaaataatcaggtttacgtcaatccaaccaacgaagttattgataaaatgcgcgctgttcaggagcaagtggcttctgaaaaagcagagcttgctaaactgaaagatctgccagctattacgctggacggtcaccaggtagaagtatgcgctaacattggtacggttcgtgacgttgaaggtgcagagcgtaacggcgctgaaggcgttggtctgtatcgtactgagttcctgttcatggaccgcgacgcactgcccactgaagaagaacagtttgctgcttacaaagcagtggctgaagcgtgtggctcgcaagcggttatcgttcgtaccatggacatcggcggcgacaaagagctgccatacatgaacttcccgaaagaagagaacccgttcctcggctggcgcgctatccgtatcgcgatggatcgtaaagagatcctgcgcgatcagctccgcgctatcctgcgtgcctcggctttcggtaaattgcgcattatgttcccgatgatcatctctgttgaagaagtgcgtgcactgcgcaaagagatcgaaatctacaaacaggaactgcgcgacgaagataaagcgtttgacgagtcaattgaaatcggcgtaatggtggaaacaccggctgccgcaacaattgcacgtcatttagccaaagaagttgatttctttagtatcggcaccaatgatttaacgcagtacactctggcagttgaccgtggtaatgatatgatttcacacctttaccagccaatgtcaccgtccgtgctgaacttgatcaagcaagttattgatgcttctcatgctgaaggcaaatggactggcatgtgtggtgagcttgctggcgatgaacgtgctacacttctgttgctggggatgggtctggacgaattctctatgagcgccatttctatcccgcgcattaagaagattatccgtaacacgaacttcgaagatgcgaaggtgttagcagagcaggctcttgctcaaccgacaacggacgagttaatgacgctggttaacaagttcattgaagaaaaaacaatctgctaatccacgagatgcggcccaatttactgcttaggagaagatcatgggtttgttcgataaactgaaatctctggtttccgacgacaagaaggataccggaactattgagatcattgctccgctctctggcgagatcgtcaatatcgaagacgtgccggatgtcgtttttgcggaaaaaatcgttggtgatggtattgctatcaaaccaacgggtaacaaaatggtcgcgccagtagacggcaccattggtaaaatctttgaaaccaaccacgcattctctatcgaatctgatagcggcgttgaactgttcgtccacttcggtatcgacaccgttgaactgaaaggcgaaggcttcaagcgtattgctgaagaaggtcagcgcgtgaaagttggcgatactgtcattgaatttgatctgccgctactggaagagaaagccaagtctaccctgactccggttgttatctccaacatggacgaaatcaaagaactgatcaaactgtccggtagcgtaaccgtgggtgaaaccccggttatccgcatcaagaagtaattcttgccgcagtgaaaaatggcgcccatcggcgccattttttatgcttccgccagcggcggcaaaatcaattcatcgctctcatgctgctgggtgtagcgcatcacttccagtacgcgcaaccccgaacggtgcaccgcatcgtttaacgccttccctttcagcaaaccactgataagctgagcacaaaacaggtcgccagtccctttcaggtcggtttttacccgtgaatgggaaatgacattcacgctgtcggcactgaccaccaccacctgcatctcctgattttcttcattaccggaggcgctggtaatcaccacccattttaatgtgtctgaaagcagactttttgcggcagcaatggcactgtcgagatcgcggcaatttttaccggtcaggatttccagctcaaagatattgggggtaattccctgcgccagcggcagtaaatattgtcgatacgcctcgggaaggtcaggtttgacataaattccgctatcaatatcgccaatcaccggatcgaccatgatcaataggtcaggatggtctttgcgtagcgcagtcagccactcggcaaggattttgatttgcgatgccgttcccatatagcccgtggttacagcgcgcagctggcgcagcgcatcacgctcatgaagcgcacgcaaataaccgctaaaccattcatccggaatcgcaccaccgtagaaagtgtcataatgcggcgtattgctcagcaataccgtcggcacggcaaaaacattcagaccgttctgtttgatagcaggcacggcaatgctgttgcccacgctgccgtaaaccacctgcgactgcacggcgacgatatccgcctgcagcgccctgctcttatcgttaaacaacaacaaactactcatttaattttttctccttgccgatgatcctcatcgtattccaaccgaaactttacctgattctggcagtcaaatcggctatcacaaaacaaggataaggtaattcaatgaagaaaatcatttgtctggtcattacactactaatgacactccccgcttacgcgaagttaactgcccatgaagaagcccgcatcaacgccatgctggagggattagcacagaaaaaggatttgatatttgtgcgcaacggtgatgaacatacctgcgatgaagcggtttctcatctgcgtctgaagctgggcaatacccgtaaccgcattgacactgccgagcagtttattgataaggttgcttcgtcgtcatcgattaccgggaagccgtatattgtgaagatccccggtaagagcgatgagaacgcacagccttttttacatgcgctaattgcgcagacggataaaacggtgcctgcgcaataatcttaaatccccgccccctggctaaaatgctcttccccaaacaccccggtggaaaggtagcgatcgccacgatcgcagatgatcgctaccaccaccgcaccagggttagcttttgccacccgcagtgctccggcaaccgcgccgccggagctgacgccacagaatattccttcccgcactgccagttcgcgcatggtgttttctgcatcgcgctgatgaatatccagcacctcatccaccagagaagcgttgaaaatccccggcagatattccgcaggccagcggcgaatgccgggaatactgctgccttcttccggctgcaggccaacaatcgttactggtttggattgttcgcgcataaagcgtgaaacgccggtgatagtgccggttgttcccatgctggagacaaaatgggtaatgcgcccgccggtttgctgccagatttccggcccggtagtggtgtaatgggcgtaagggttatcgggattattaaactgatcgagcagctttccttcgccacgattcgccatctccagcgccagatcgcgcgcaccttccatgccctgctctttggtgacaagaatcagttccgcaccataagcacgcatcgccgcacggcgttcctggctcatgttgtcgggcatcagcaatttcatgcgatagcctttcagcgcggcaatcattgccagcgcaatgccggtgttaccactggtggcttcgattaagacatcacccggtttaatttccccgcgcttttccgcctcgacgatcatcgaaagtgccgcacgatctttcaccgaacctgccgggttattgccttccagttttaaccacacttcactgccgttatccggccccattcgctgcaacttcaccagaggcgtattgcctattgtttgttctaatgtactcacgatctctatccatacgtggtgttgcctgatgcgacgcttgcgcgtcttatcaggtctacaggttacaaaccttgccattaaaaagcccggatcgcgggaagcgcctccgggcgtttaacattcactcaacctatcaggcgctttgtgcgagagcaagttcctcatcgcgggtttcgatacgctcgtcgccgttatacagccgcgcatgttgcagaccaacgaataaacgctcgccacgctgcggggcatcgtcgccatgcatcacgaccgtcagcggttcgttgtaccaccccagcggcctgcaccactaattgggtgtagtgacctttcgggctggcttccagtacctgtaccggcagcggcgaatcgagactggtacggcggctgatatccacttcccacgggcgcaggaagagatccaccggcccctgataagcaggtgtgtagcccagcggccagcgatgtgcgccaacatggaactgcccgccgcgaatggttccctgcaggcggttcacttcgcccataaattcgagtacaaaacgggtcgctggttcgcgccatacctgattcggcgcatcagcctgttcaatattcccctgactcatcaccactacacgatcggctacttcggtcgcctcttcctggtcgtgggtcacaaacacgctggtgaatttcagctcttcatgcagttgacgcagccagcgacgcagctctttacgcacctgcgcatccagcgcgccaaacggttcatcaagcagcagaatttgcggttctacagccagcgcgcgcgccagcgccacacgctgtttctggccgccggaaagctgcgccggataacgatccgccagatgcgcaagctggaccatttccagcaattttgtcactttcgctttgatggctgcggcattcgggcgctcgcgacgcggcagcaccgtcaggccaaaagcgatattgtcgaataccgtcatatggcggaacagcgcgtaatgctggaacacgaaaccgaccttgcgatcgcgcgcgtgcaggcggctgacgtcggtgccgtggaagcgaatatgcccgctggtttgatgctccagcccggcgataatgcgcagcagcgtggttttcccggaaccggacggccccagcaacgcgaccatctgacctgaaggaatatccagtgagatatcgttcagcacctgggtgcgaccaaacgacttcttaatattggcaatctcaatgctcatgatgttcctcctgctgtgcgcgtttatcctgattctccaggcgccactgcaacatactttttaaaaacagggtgataatcgccatcagcgttaacagtgccgcagcggtaaaggagccgacggtgttgtagtcctgctccagcaattcaatctgtaacggcagcgacagggtttcgccgcgaatcgagccggaaaccaccgacaccgcgccaaactcgccaattgcgcgggcgttggtcaacaccacgccataaagcagcgcccagcgaatgttcggcaatgtgacgcggcgaaacatctgccagccagacgcgccaagcaaaatcgccgcttcgtcttcctggctgccctggcttaacatcaccggcaccagctcgcgcaccacaaacggacacgtcacaaagatggtgaccagcaccattccgggccaggagaacataatttgcagattatgttcatccagccagccgcccagcgggccgttagagccgtagaacagcagatacaccagaccggcaaccaccggcgatacggcaaacggaatgtccagtagcgtcagcagtaactggcgtccagggaagttaaagcgcgtcaccagccaggccagcagaatgccgaacaccaggtttaccggtacggcaatcagcgcgatcatcaccgtcagccagatggcgtgcagcatgtccggatcggccagattctgtaaaaccggcatcagccccttgctgaatgcctgcacgaagatgtaaatcatcggcaccagcaggatgaacgctgaaaccagcatcccgatgccaattagaaaccatttgccccagttaatcgggcgcgcgtcataacgcttcaattgggtaacttccgccattaatgacctaccacacgccgaccaaagcgactttgcagagtgttaattgagaacagcagcagcagggatgccgcgaggatcaccgaagcaatcgcgctcgccgccgggtaatcaaactcctgcaagcgcacaaaaatcatcagcgacgtcacttccgtcttccaggcgatgttcccggcgataaaaatcaccgcgccaaattcaccaagactacgggtaaacgacagcgccacgcccgccaccagcgccggagaaagctccggcagcaccactttgcagaaactctgccagcgcgttgcaccaagcgtttccgccgcttcttcatattccgggcctaactcttccagcaccggctgcacggtacgcaccacaaacggaatgctggtaaaggccatcgccaccgcaatccccagccatgtataggtgactttgatatcaaacttcgccagccattcaccgtaaaaaccgtttacggaaaagagcgaggccagcgttaaaccggcgactgccgttggcagcgcaaagggtaaatccatcagcgcatcaagcagcgtgcggcccggaaagcgataacgtgttaaaatccacgccatcagcagaccgaaaacgccgttaaaaatcgatgccacaaacgccgacagcagcgtcactttgtaggccgcgaccacttgtgggttggtgatcacctcccagtactgcgcccagctcatctgagccagctgcatcaccagcgcggagagcggcagcagcaaaatcaggcacacaaacagcagactggtgccgaggcttaaggtaaagcccggcagcacgcgtcttgatgaaactgcaaacatcagttacgccccgccgctaacagcttgtctaactcgccgccgctggtgaagtgggttttcatcacttccggccaggagccaaatttgtcttccacgcggaacagctcggtctgcgggaatttatctttcagtttgtccatgacttccgggttatttacgcggtagtaatagtcggtgatgatggtctgcgcctgcgggctgtagagccagttcaggtaggcttttgctgctttttccgtaccgttggcctgcacgtttttatcgacccacgccaccgggaattccgccagaatattggttttcgggatcaccacttcaaagccctgtgcttcatactgtttacggatgttgttcacttccgattcaaagctaatcagcacatcgcccaggccacgctcggcaaaagtggtggttgcgccacgaccgccggtatcgaacacttcaacatttttcaggaactgggtcataaactgttcggttttggctttatcgccaccgtcagctttatccgctgcgccccatgccgccagataggtataacgcgcgttacccgacgttttcgggttcgggaaaatcagcttcacgtcggagcgcaccaggtcgttccagtcgtggatattcttcgggttgcccttacgcaccaggaagcccatggtggagtagaacggcgagctattattcggcaggcgcgactgccagtccgccgggatcagcttgcctttgtcatgcaggatttgtacgtcagtcacctggttataagtgacaacgtcggcttttaagccctgtaaaatcgccagcgcctgttttgatgacccggcatgagattgtttaatcgtcagtttgtcgccgccgttatctttggcccattgctgttcaaacggcgggttcagggcggcaaacagctcgcgggagacgtcataagaactgttcagcagttccgttgcctgtacatggcctgccagcagcagagaagcgaccagcgcgagtgagttctttttcagtaagttaacggccattgcgcacccttatatatttaatgactttctaatagccatcatatttataacggacgtgaaaggagtaacggttttatataccgtttggtgatttggaagttgaaaagggaataagaaccgggtttaaaacgaaatcctccccacacatgcagggaggaaacagaggtgaatcagataccgacgctaaccgtctccggcagtgtgctgccgccatcaatcacattctgtgtaccggttaaatagctggattcatccgatgcgaggaaggccgccagttcgccgacttccagcggatcggcgaggcgacgcatcgggattgctttcgccatttcagtcagcaccgactctggatcttccgggttcgactggcgggcaatgctttccgccattggtgtgcgcacgtatcccgggcaaatggcgttaacgcgaataccagactgcgcgtactccaccgccagcgattttgtcaggccaacaatcgccgctttcgttaaggcgtacgccgtttcgccaggatcggccaccatatcgccagtgaccgaagacatcatcacaatgcgaccatctttgcgggcaatcatctccggcagcaccgccttcgtgacgttccatacgcctttaatattgatgtcaatatggaaatcgcgatcgtcatcgctcatatcgaggaaactgcccagacgacaaacgcctgcgttattcaccaggatatcaatgcgcccttctttttccttcgcgcgtttgatagctgcggctaccgacgccgggtcacgcacatcggcgacaaccgccgtacagcgatgaccacgaccacacagttcgtccgccagcttttcgatctcaggggagatatccagcaagattaggtttgcgccatgacgcgcaaaagttctggcaattccttcgccaattccctgcaatgcgcccgtaatcagtgctgtcttgcccgtgagtttacccattttaatgctctccttgttaatacagagcgttacactccattccctctgaaaatacaggataaacaaaatattgctgcggatcagctcactaattcaggaaaatctcaatccagtcgctgctttatgcatcatttcaggcgttgtgttagctcactgctgcgctgaatcattttcaatgactccacatcattgagttgcacaagaccaacaaacagtaaatcggtaacagaattttgcgccgtgcgggtagacatcgacgagctacgccattcggtttcaccggaaacggtatcgagcgtgaaatgcgccagccgccgcagcggagaatcagccagagaagtaatggcaatcaccgttgccccctgctttcgtgccgcttctgcgcataagacaatctcttttttactgccgctgtaagagatagcgatttgtacatcgccttttttcaacgcctgggaaacggtggcttgtacgtgcgtgtcggcttcgcaggccacgcgatagccaattttcatcagtttgaacgacagatcgcgccccaccagcgccgatccgcccaggcccgttatctggataaacggtgctttactgatgacctcaatgattttttgcagccgcgcgtagtcgaacaacgaacaggtttgctccagcgccagctctttttcgcgattcaatttgcgggcaatcacttccagcgaatcatcactggtaatcgaactgtgcaggtgcagcgccgtggcattcgttttctcccggctggcactgtattcgcctattaacgccatacgcaattcagtaaatccttgcgcgccgagtttttgggcaaatttcactatgctcgactggctaatgccgagctgtttcgccatctgccgtgaagaaacggattgcagctcactcacgttggcctgcagaaagtcagcgattttttgctcgttttcggtgaattcactccccgcattgcttattttcgtcaggtacaacatcttccactctcctgggctggcagcataaattccgcttaagttcttatgacgctcttcacactctgcgagtgtagactcaatgattcctttaagtctgtcaattcgggatatatgattccatacatctgcaattatttgatcgtaaatagtaaggtcaccaccgatgcaactagaaaagatgattactgaaggctcgaacaccgcctcggctgaaattgaccgcgtatcgacgctggaaatgtgccggattatcaacgatgaagataaaaccgtaccgcttgccgttgagcgcgtcctgccggatatcgccgcggcgatcgatgttatccacgcccaggtcagcggcggcggtcgtctgatttatctcggtgcgggaacatccggtcgtctggggattctggatgccagcgaatgtccgcccacctacggcgtgaaaccgggtctggtggttggtttgattgctggaggcgaatatgccattcagcacgcggtggaaggcgctgaagatagccgggaaggtggtgttaacgatctgaaaaatattaatttaacggcacaggatgtggtggttggcattgctgccagcggtcgcacgccgtatgtgattgccggactggaatacgcacgccagctcggctgccgcacagtgggaatttcctgtaatccggggagtgccgtttccaccaccgccgagtttgccattacaccgattgtaggtgccgaagtggtcactggttcttcgcgaatgaaagcaggcacagcgcagaaactggtgctcaatatgctttccaccgggctgatgattaaatctggcaaagtgttcggcaacctgatggtcgatgtggtcgccaccaacgaaaaactgcatgtgcgccaggtcaatatcgttaaaaacgccaccggatgtaatgccgaacaagcggaagcggcgttaattgcctgcgagcgcaactgtaaaacggccattgtgatggtgctgaaaaatctcgatgccgcagaagctaaaaaacgcctggatcaacacggcggctttattcgtcaggttttagacaaggaataacccatggccaaagagatcagcagtgaacttctgaacaccatccttacccgtgtcggcggaccgggaaatatcgccagttgtggtaactgtatgacgcgcctgcgtctgggtgtacatgacagttcactggttgatcccaatatcaaaacgctggaaggcgtgaagggcgtcattttgaccagcgaccaggtgcaggtcgtttttgggcctggtaaagcgcatcgtgccgcaaaagcgatgagcgagctgctgggcgaggcaccggtacaggatgccgcagaaatcgccgcccagaacaaacgtcagttaaaagccaaacaaacctccggcgtgcaacaatttctcgccaaattcgccaccatcttcacgccgctgatccccggttttattgccgccggtctgctgctggggatagcgacgttaattgccacggtgatgcacgttccggcagatgctcagggcacgctacccgacgcgctgaattttatgaaggtgttcagcaaaagtttgttcactttcctggtgattctggtgggctataacgccgcccaggcatttggcggcacgggcgtcaatggcgcaattattgccgcactctttttgctcggttataaccccgctgcaaccaccggttactacgccggttttcacgatttctttggtctgcccatcgatccgcgcggcaatattatcggcgtgctgattgccgcgtgggcctgcgcccgcattgaaggcatggtgcgccgctttatgccggacgatctcgacatgctgctgacctcgttaatcaccctgctgatcaccgctacgcttgcgtacctgatcattatgccgctgggtggctggttattcgaaggtatgtcatggctgtttatgcacctgaacagtaatccgttcggttgtgcggttttagccgggctgttcctgatcgccgtggtatttggcgtgcatcagggctttattcctgtttacctcgcgttaatggacagccagggattcaacagcttatttcccatcctttcaatggcaggcgcgggccaggtgggcgcggcgctggcactctactggcgggcgcaaccgcacagtgcattacgcagtcaggtacgcggggcgattattcccggtctgctgggcgttggtgaaccgttgatttacggcgtcaccctgccccgcatgaaaccgtttattaccgcctgtttaggcggcgcagcgggcggtttgtttatcggcctgatagcctggtggggtctgccgatgggcttaaacagcgcctttgggccgtctggtctggtggcgctgccgctgatgacttccgcacaaggcatccttccggcaatgtcggtttatgctggcgggattctggtggcatgggtttgcgggtttattttcaccacgctctttggctgccgtaacgtcaatctggactgatatcatgaaacggacaatgctctatctttctctgctggctgttagttgtagcgtcagcgccgcaaaataccctgttctgacagaaagttcgccagagaaagcagggttcaacgtcgaacggcttaaccagatggatcgctggattagccagcaagtggacgccggttatcccggcgtaaacctgctgatcattaaagataatcagattgtgtatcgcaaagcctggggagcggcgaaaaagtacgatggcagcgtgttgatggaacagcctgtcaaagccaccaccgggacgctgtatgacctggcctcaaacaccaaaatgtacgccacgaacttcgccctgcaaaagctgatgagcgaaggcaaactgcatcctgacgatcggattgcgaaatatattccggggtttgccgatagtccaaatgacaccattaaaggcaaaaacaccctgcggatttctgacctgctgcatcacagcggcggtttcccggcagatccgcaatacccgaataaagcggtcgcgggcgcgttatattcccaggataaaggccagacgctggagatgatcaagcgcacgccgctagagtatcagcccggcagcaagcatatttacagtgatgtcgattatatgctgcttggatttatcgtcgagtcggtcaccggtcagccgcttgaccgctatgttgaagagtcgatttatcgcccgctcggcctgacacatacggtatttaacccgctgctgaaaggctttaaaccgcaacaaattgccgccacggaattgaacggcaatacccgcgatggcgtgatccatttcccgaatatccgcacctccactctctggggtcaggtgcacgatgaaaaagccttttattcgatgggcggcgtttccgggcacgcaggtttgttttccaataccggcgatattgcggtgttaatgcaaacgatgctgaacggcgggggctatggcgatgtgcagctgttcagtgcggaaacggtaaagatgtttaccaccagctctaaggaagatgccaattttggcctcggctggcgcgtgaatggtaatgccaccatgacgccgacgtttggcacgctggcaagcccgcaaacctacggtcacactggctggaccgggacagtaaccgttatcgatccggtcaatcatatggcgattgtgatgttaagcaacaagccccattcgccagttgccgatccacaaaaaaatcccaatatgttcgaaagcggtcagttaccgattgcaacttatggttgggtagttgatcaggtgtatgcggcgttgaagcaaaagtaataaaaaggccagtcagtttttactgcctggcctttaatcatagaatcagaaacgcttacagcgccatcagcttgtccagcgacggcgcgaagtaatagccgccggttaccggtttggtgaaacgcaacatcgcatcacgcttaccatcggtatcgccaaacatgctcagcagttgctgctcaatgttatgcagacgcgcgcagtaggcgcagaagtacagaccgtgagtgccactggcggtgccgtacggcaggctctggcgaacaatcttcagccctttgccatcttctttcagatcaacgcgggtgaggtgagaggtttccggacgttcgtcgccgtcaatctcttcgttggcctctttggtgcgcccgatcatcatctcctgatcgtgaacgctcatccggttgagctgcttcaggttgtgctcccaacgctgcacaaacacatagctgccgccggcatccacgccgtctttgataaccgccacttcgcgacgcgtctcttcacccgccgggttttctgtaccgtcaacaaagccgctcaggtcacgctcttccacccaacggaagccgtggatctcttctttcacttcaatgcagtcaccaaaggcttccatcgccgcctgagcgacagagaagtttacgtcgtgacgcagagaaagaatgtggatcaacacatcgaactgggtggtcggcgcaaggcctttaccgtagcccggaaaatctttcagctcttctgccccaacgccgccgctcagagcgcgccaggtgttgttaccaaaggcaaccaccgcaccaagatgcgcgtccgggaatttcgcttcaaaagttgccagtttgtcggcaaatgttttactggccgcacgcagggcgtcaacttcccctttcacgttggcttcgatccaaatcgccgcgcggcaatgttctggcaaaatgccactctgaacctgagacattgttcctcctgaaaataagaatgccacgcaatccgtggcattgttgagcgctattttacgtgttttttcgcggcggcggtttgttcagacgcaaattaacgccgccagataattttactgactttccagtttttcagggtatcgtccgaaggcattaacccttcaggaccactccattccccgctgaactggtagctaatatgttgactgccttcggctttacattcgacggcacgattatcatcaccatcagctttttggcaattgccaaatgctttgctgtaaaggtcgctaaacggtgtaccgattttaacaccggtgtcagcaggaatatcgctatccagcacgtcaatgcgactgatcgtgccttgatcgccgttaatcaccatcgccacgttgtcgcccttcatcacttcaaaaaagcgcaccacgttgccgttcgcggttttcattccgctgcgcaggcgataatcgccatcaagcgcatcggcaatggcttgttcttgcagtggtgtggacgccgttaattcacccacgccctgctcgctcactttggtggacgatccaaaccagttccacgggttagcggccgaccagttaactgacgacatcgtggaacagccggtcagcatcaacggcatagcgcataacattaaacgcagcgatttcatgtcacttcctttggttattcaataacgttgcttggagtgcaaattcaccaaaaagtgccgttattctttttcttcattaaaacaagcgcgtaaacgtcgattggtcagcagccagattaacgccacaatatccgccactaccagcgccagaccgataccgctaacggattcaccgttcagccacagccacggttgccagcaaagtaaaaccacctgcgccaacagcaacagaaaatagagtacacgccaggtgcgaggaaatgtagcccgccgaccgctcaacaaaaacgccagcaccgccggaatgccaggaatcagccccagccagaaattatcgtgatcgggataaaacagatttagcagcgcagtaccctgctcacgcgacgcaccggcaatgacaaacagcacccaggttcgcgcctgaagcaatagcacaagccagaagagcaagggtaaacgcaggcgtccgtgcgcatcataatggacaggatggaactcagtactcttcatcttcaatcaaacgcttacccagactcagcacgtcggcgtgttcatatcccaggcgttcatacattccgagcaccatgtcgttatcttccggcacattgatctgaattttcgggcagccacgagcaatcagctttttctccagccgattaagcaacgcattggcaatcccacgcccacgaaactctggatgcacgccaagataataagcagacccgcgatgcccgtcataaccgcccatcaccgttccgaccacttcaccgtttacctcagcgaccaaaaacaaactgacgtcatggttcatcttacgctcgatgtccatttccggatcgttccacggacgcagcaagtcgcaacgctcccaaagggtgatgacctcttcgaaatcttcctggcgaaatacgcgtatctccatggtattcgttacctttttgcgggttaaaaggctgattatggcgtgaacggtcgaattagccaatatctgacgaaaatcggttgaaaaagtggcataatggggagttgtcaactattgaaatgaaaagtaaaacaattctcaacatcaaaccgtcgtaacggattacgcgatacgatataacatctggaactttattattacaactcaggccgtatgagcacttttaaaccactaaaaacactcacttcgcgccgccaggtgctgaaagccggtttggctgccctgacgttgtcaggaatgtcgcaagccatcgccaaagacgaacctttaaaaaccagcaacggacacagcaagccgaaagccaaaaaatctggcggcaaacgtgtcgttgttctcgatccaggccacggcggaattgataccggagcgatcggacgcaacggttcgaaagaaaaacatgtggtgctggcgattgctaaaaacgtccgttccattttgcgtaatcatgggattgatgcgcgtttaacgcgttctggcgatacgtttatcccactttacgatcgcgttgaaatcgcccataaacatggcgcagatctgtttatgtcaattcatgccgatggctttaccaacccgaaagctgccggtgcttcggtatttgccctctctaaccgtggggcaagtagcgcaatggcgaaatacctgtctgaacgcgaaaaccgcgccgatgaagttgccggtaaaaaggcgactgacaaggatcacctattgcagcaagtgctgtttgatctggtgcaaaccgatactattaaaaacagcctgacgctcggctcgcatattctgaaaaagattaagccggtgcataaactgcacagccgcaacaccgaacaagccgcgtttgtggtgttgaaatcgccgtcggttccttcggtgctggtggaaacctcgtttatcaccaacccggaagaagagcggctgttaggcacggcggcgtttcgtcagaaaatcgccacagcgattgctgaaggcgtgatcagttatttccactggttcgacaaccagaaagcacattcgaaaaagcgataagttatgaaacccgacgcacaccaggttaaacagtttctgctcaaccttcaggatacgatttgtcagcagctgaccgccgtcgatggcgcagaatttgtcgaagatagttggcagcgcgaagctggcggcggcgggcgtagtcgggtgttgcgtaatggtggtgttttcgaacaggcaggcgtcaacttttctcacgtccacggcgaggcgatgccagcttccgccaccgctcatcgcccggaacttgccgggcgcagtttcgaggcgatgggcgtttcactggtagtgcatccgcataacccgtatgttcccaccagccacgcgaatgtgcgtttttttattgccgaaaaaccgggtgcagagcccgtctggtggtttggcggcggcttcgatttaacccctttctatggttttgaagaagacgccattcactggcaccgcaccgcccgtgacctgtgcctgccatttggtgaagacgtttatccccgttacaaaaagtggtgcgacgattacttctacctcaaacatcgcaacgaacagcgcggtattggcgggctgttctttgatgatctgaacacgccagatttcgaccactgttttgcctttatgcaggcggtaggcaaaggctacaccgacgcttatttaccaattgtagagcgacgtaaagcgatggcctacggcgagcgcgagcgcaattttcagctctaccgtcgcggtcgttatgtcgagttcaatctggtctgggatcgcggcactctgtttggcctgcaaactggcgggcgcaccgagtcgatcctgatgtcaatgccgccactggtacgctgggagtatgattatcagccaaaagatggcagcccagaagcggcgttaagtgagtttattaaggtcagggattgggtgtaaccccctcacccccattcccgcatccgctgatgcaacgtcaacgacggcttctcggcaaacagctgctggtaatccgtggcaaattgccccagatgccagaatccccactgcatggcggcgtcttttaccgttgtgctttgcgaccacgggcttatcagttcgcggcgtacggcgttcaggcgaatgcgtttcagccacgcgtttgggccaatgcctaaaatagcgtgaaacgcgttttgtagcgtgcggcgactgacatgcagttgattacacaagtccagcaccgtcaccggctcagacatattttccagcacatattcacgggcgcgggaaagtaatctacggtaactctgatgactgatgctttccgccgtcaccattggttgcgcgtcttccagcatcgcccccatcgccattagcaaattatcccccagcacttttcgcactgcaggctgatggagattttccgggttctcgcaaaacgtcgccagcgcctgttggacaaagccccacagcgcggctttatgctgctctttcacttccagcgccgactggctacgcagcatatgtaatacccgatccgggttatgcaaaaagttagcctgccgggtgatgacatcttcagaaagcaccacgcccaggatcgtgtaatcatccggcgtgctcagttcaaattcagtgccaccagggcgggtggcgatttccgcgcttcccagacattgcgaaccgataaatccctgcacaccgcgcgtcgccggaatgccaaaccagaacgagttcggccagaccaggcacgactgacgcagcgccagaccggtgtattcacgaaaaacctgaatatcatcgagtagaatttccgtaaattcaccatgaaacttgcccggatgcagctgatcgtaaatctgctgccaggcggtaatcgttaaagcatgttcatagacatccgttgtctgtcgttgatgaacattatccacttcgaccttcggcgtgagcttcaggttttcgggtaagggttcatgataaagatggtgcaaattggctgtacgggtctttttcatgatgttaatgccgggtgttgtaggacacccggcacctccgacaggttaatggggcttgagacgataacgactactgcgtttacgtaacgtcccggcagaaaagagctgttcgagcgcatttctggctttttccagcggccagccaaagtgggcagccacttctcctgccgtcattccctgacgtactgatgttaacagcgccaacaactcgtcagcagattccgcgacgataactggcgcgtcgggttcccttacgggttgcttcggctggcggttaaagccagtaaccagccactgggtgtcatcgtctggccgaccgatctccttgcggctgatgacacgcccggtacgcatcgcggcagcacaacctgcgtccagcgccgcacgacacgccgccagatcgccttccaccaccagcgttaagcgaccagggtcaagcacttcgtgactgagcagacgaacgttagctgctttgagcatggcatccgctgcatctatcgcggcgaccatgccgtccacttccagcaatcccagtgcattgatcatcggcaacctccgttacgcacgctggattggattacgcgcgatttccagcactgcatcggtaaaggcgttacaggctgctttacacgcggcctggctaccggttaaaaatgctgccgagtagttggtttcagacggtggcgggacataggtcaccagctgtacgtcggcagatttcaacgctgcatcaatgccataggtcgcttccagcggcggtgccaccagatacgccatcggatcgccaagcgtgatcccggcggttgatgagagataagaaccggtacgcgaaaccacatgcgccaggaaggcggtgttttctgcgtcattggcccactggaatgctgcaccattttcaatatgtgcaaccatcgcatccagaccggcacgcacttccgccgggtttggcccaccaagcataatcagcacttcaccggcagtcggtgacgggccgtgtgcagcgcccgcatacagcgagcgaccatataccacttccaccatcgcctgcttggtcgcttcatcagcggcaatgtaggtgacgtcatcggaatcagcagaaatcagcccgaggctacgaatatgcggcggcaattttagttcacgcgcaaattcagcgttaacggaggcaatcacccgcatggcggttaccgacggtcgaatcaaatctaaagctggcatgatgcctccttatcgggtcatgttgatgccggatgctttctgctccagcatacgtttcgccaaatccacaatgacggctgcggcttcaaccggcggcgtgccgccctggtgaatgttagagatgcaggtgcgatcggcctcaacggtggtcgccatacgcggcgagtaaacggcgtaacaggagaggctttctgactgacccaaccccggacgttcccccaccagcaggatcaccactttcgcgccgaggatctcaccgatctgatcttcaatcttcacgcgaccataacgaacaaagaatggcgtgccgactttcagcccggcctgtttcaggcccgccatcagcggcggcaggatctcttcgtagttgacggtgatggcatcagttgacaggccatcagaaataacgacctgtacgtccggattagcaacacactgtgctttcagcgcttcaacagcttctgcacacaggcggcggcccatatccgggcgagtcaggtagagatttttgtcgctaatttcagagcgtacttccagcaagccctgcgctttcacccactcttccggcacttctttcagtacggtatctttcgaacgagagtgatcggccaggaaacgcagcagcgcctgcgtacgcggacgcggaccggcacgaccggtacaaacgcgggccacggtgctgcggcgcagttctgttaatacgtctgcgcgatgcgggttttcaacaccaatccacgcttttgcttcagcggaacctaaatccagcgcacagctttccgaggtcaccggtgccgcacagttggtggtggcgcactttgcttctgacggcgcgggggccgtttgtcccattgacgccatcacgctgcgtacaatttcttcaatctgtttttgatccatgatgtgttatctccgcgtcatcagaagaacagtgacggatcgcccgcccgtttggtcaggcgaccgtttgccataatgcccatgctttccagccagcgttcaaactccggtgacggacgcaggttgagtaactgacgcacagtggcggtatcgtggaatgcggtggtctggtagttgagcatgatgtcatcacccagcggcatccccatgatgtagttgcagcctgcggtggcgagcaggatcatcaggttttcgttgaggttctggtcagcgtcagcgtggttggtgtaacagcagtcacagcccatagagatgccgctcagcttgcccataaagtgatcttctaagccagcacggataatctggcggtcgttgtagagatactccggcccaataaagccgaccacggtgttgacgataaacggatcgtaatgacgcgccagcccatagttacgtgcttccatcgtcacctggtcagcgccgaagttagcgccagcggatagcgcagagccttgtccggtttcgaagtagaggcagttttccccggcgatacggttgaactctgcacccactgcgcgcgcttcgtcgagcatcgccagttccacgccaaactctttcagccctttttcgctgccacagatactctggaaaatcagtccgccaggcgcgccgcgacgaatcgcttcgatctgggtggtgacgtgcgccagtacgcagccctgagttgggatgttgaatttgtcgatcacgccgtaaatggtgtccaacacgcggcttaagttttccacgtcgtcagtcaccgggttaacgccgatcaccgcatcgcccaccccgaaggaaagcccttcgtagatttgcgcggcgatactttgcacgtcgtcacgggtgtcatttggctgcaaacgggcgctgaaggtgcccggaataccaatggtggtattggcctttttgattaccggcattttcttcgcgccgtagatcaggtccgcgttggagcaaatcttcgctaccgccgcgaccacttccgaggtcagccctttgcgggtaaaggcaatgtcgtccacgctggtttcatcgctcagcacatactcacgcagttcgctgatgctccagtttttaatctggttgtaggccgtttcgttaacatcgtcctgaatcagccgcgtcacgcagtcatcttcataggcaatcaccggattattgcggatgtccgctacggtcatttccgacaacacctgctttgccgccacgcgctcctgtgaacttgccgctgcaacgcctgccagcacatcccccgaacacagttcgttggctttagccagcacctcttttacatccttaaactgatatacattgccgaacaatgtggtctttagtttcataagtcgttccctcaggaaggaaatgcgagtgatttcaccgtcaccggcacaaccgatccgccaaaaagaggcgtaccaatgtcgatatagtcccccgcgcggacaatcacttcgtcaatgactgccaacgggagttgttgtagctgtgggcgcaacaacatgcccagagctttaccaaagtcctgcccggccaccaccagcaggggatgcggattcggaaaacgcgcgacgaaatcgaccagcgcgttgatgaccgtcagtaccgcggcgtaacgcacaggcagcgaggcgggaagcgccagcacgtacgcgtcagttttgggatcaagatccagctgaagcagcgcctgttgccaggcactcaccagatccgtttcatcaatcgggatcgccaccggcaaattgcgcagcggcagttgtacgccctccagccagattgtgctgccagagagcgaaagggtatgtgcacccgcgccaatcaccgtggcgcgtacggtttgcgccggaaactgcacattcatctcacgcaggcgcggatggtcatgcagcgccgttgccagaagtgggccaatatcggcaaaacagaacgggtcggcgggctggtggcgataacattcgcccacgcctccagaaagcgtaatgatttcgggcgtaacacctgcgggcagcaaaccggtttgcatcaatgcctgcgcgagcggcgaaagcgttccgtcaatcacttcgacaatcagcgccgccatccgccgggtaacctgcaccagctgcgcgccggtcagcgaacgggcgtcagtgcctgcaccgaagcactcatccacaatcatctgccccggtttatgagcgtaaaccacgcgcccctggctgtcggtttccagcaggcgaccaccgacgttgagacaggcagtgccgctgatttttccggcatcgaacagggcgtagttcgcggtgccaccgccgatgtcgatattcagtacccgacacagccgttgttcagaaagggtttgcgccccagctccgtgaccggcgatcacggattcgaggtgcggcccggcgctggcaacgacaaaatcccccagcgattgagagagcgccatcaccgccgggcgagcattgcgggttttcgcgctttcaccggtgatgatgatggcaccagaatcaacgctttccggcgcaatacccgcagcctgatattgctcgagtattaaggttttcagttccgcttcttttaaaccgccctgtttatcgacaggggtaaagaacaccggactttgccagctaatttcgcgtttaatgaattcgtagcgcggcacctgcgacaccgccgcacggttaaccagctccaggtgggagaaaatcacctgggtggtggtggtgccgatatcgataccgacgctcaatagctggcgagtgttcacgattgtgcctccgcttcggttttagtcgcggtcgcgtcttcttttggcaccagcatcatcgccacgccaatcgccgttacgccgccgatcaacttgccgacaatcatcgggaagatcatggcgttcatgttggcagcggcgaagcctaagtggtcgcccagggcgaaagcagcggaaacggcgaaggcgcagttgatgactttgccgcgggtatccatctgcttcatcatgccgaacatcgggatgttgttggcaagcgttgccaccatgccggctgccgcgatgttgttcatattcagtactttaccgacgctcatcagcggtttttcaaaccagcgagtcagcagcagcaccattggatacgcccctaacagcacgcaggagatagaaccgataacttcaatggcgcgcatcacttcaccgggtttatcgccaggggccataaagataggatccagaccggggatcagttcccagccaagcaggaatttcactaccgcagcggcaagaccgagggtgatcaatgcaacgaggaatttggcgaagatctggaagccgttgatcatttttccgggatgaatttcagccccagcgccaccagaatcgcgacaatgatcaccgggatcatgttcatcaggatcagggcgaaagtgaattccaccggctgaccgttgatctgcacaccggagtacatagcaaccagaccaccagcaatacagccaatcggaatggtcacaatgcccgccagcacgccgagcgccagataacgacggtcagaaggttcgataatgccgagcgccaccggaatggaaaacacaatcgttggccccatcatcgacccaagaattaacccagagtatagccacgctgctacgtcgccgcccgccagctctttggcgaggaagaaaccgcccatatcgcacgccagcagcgttccggcgaacattgacgggtttgcgccgagcatttcgtaaaccgggataattaccggcccgagtacgtgagccagtaccggtgccagcgcggtcataccgaccatcgccagacccagagcgcccattgccataaagccttcttcgaactgaccgcctgatccttcgatacttttaccgaacttaccgaggaaacgagcagaaccgccgaactgcgacaggatcctgtctacggcagctatcagcataaagaacatcatgatgtacatgatgatttcgttaattcccatcgcctttactccctgttagttgttatttattggcggatgcggcgtaaacgccttatccgccctacatgtgcaatcccgaaggccggatcagacgcggcaagcgtcgcatccggcaattgcaccgcgccactggcggatgcggcgtgaacgccttatccgccctacatgtgcaatcccgtaggccggataagacgcggcaagcatcgcatccggcaattgcaccgcgccactggcggatgcggcgtaaacgccttatccgccctacatgtgcaatcccgtaggccggataagacgcggcaagcgtcgcatccggcatttattgcgccgccgcgtacagtccgacaatctgttccaggctggcggtacgcgggttgctgcgcagacaaatatcttcctgcgcggcctgcgcccatgcaccgtaatgcgcagatgtcgcgccaacatcgcccagtcgtttaccaatcccaacttccgcaatcagctcacttaccgcgttaatagcgtcacgatcgtcggattttttagttcgcagtgcccgaccaatctgactaaaccgttcgcgacaaaccatccggttaaattccatcaccgttggcagcaacatggcgttcgccagaccgtgtggaatatgcagcgccgcgcccggctgatgcgccatcgcgtggcacaacccaagacccgcactggaaaacgccattcccgccatacatgaagccagcaacatgctctcgcgcgcggcaaggtcgtgaccgtagcccaccgctttcggcagcgatttgccaatcatcgcaatggcaccaatcgccagactgtcggtaaacggtgtagcgttcagggcgctgtatgcttcaatggcatgggttaacgcatcaatgccggtcatcgccgtgacatgcgacggcacaccttcggtcaacgcggcgtcgagaatcgccacatccggcatcagcgaagcatgggctaacacctgcttgcgcccgctcaccgcatcgataatcaccgttacgttggtggtttcagagccggttccggcggtcgttggaatggcaatcaacggcaggcgcggttgcagaacgctggtttctgacatttccgccagcgtgctatccgggttcgtcaccagcaacgccacggctttcgccgcatccagcaccgagccgccgccaaatgcgatcaccccatcacagcctgactcacgcaactgcgccacggctgcacacacgtcggtgatgcacggttcgcccaccggacatggccagagcgtcatggcgatgcctttaacagccaggctgcgcgtcagcccggcggtcatccctgcctgatgcaaaaagctgtctgccatcacgaacagatgtttcagcccacgcgtttgcgcttgctgtccgcaactgctcaccgagcccggaccgcaaagcgtcaccggtggaacgctaaatgtttttacccgttgcagattcagggtatcgaacgcctgaaagagcgcggtctgcaattcattttgcatatagcccctccgctttctctcgcccactactggcgatcgccagcggggtcataaacaaactgtgctgcggtaaatgcacctgtaacgccgggaattgtttgcgaaacagttccgccacgcccggttgcatacaagagccgcccgccagccataaatcagtaatgccctgcccttcaatatgccgggcgacaatgtccgccattttttcgtacaccggtttcaccgcgggccaaatctcgtcaccatgaccgcgcttgtactgctctgcctcttccagcgaaatacgacgatttccggcgagagtcagagagatgtgatgtccgccggtggcttcatccgccgagtacgtcaccttgccctttttcacgatggcaatgccggtagtgccgccgccgatatccactacaccggcgttgtccagttgcagcagatccgcgactgcggttggctcatccagcacatggctcacttccagcccggcagattccagcacgttgatggaaatacgcgggtccgtacctggaggaaatgaagtcgccgcatggctaaaacggcgaccgaattgctgctcgagcgtgtcgagatggcgacgaacaatggtgacagcgccgaagaaatcccagacgatgccgtcgcggaccacatcggcccagtcgaggcataccgccaccggctgaccgtcgcggtcgacaaccatcgacaccacatcgcaggtgcccagatccacccccagccacagcggagattccgtcgcggcgggcgtctggttacacagcgttgccgccgtttgcagacgtggggtgagccattgttcgtcgtgcgccatctgttactccttaaacaatgcgaaacgcatcgactaatacacagcgacgcagacggacaaacgtacgcgcgctggttaccccttcaccggttggcgtggtgatggtcatggtggtccagccttccccgcccagccccagcccggcaatgcacggtccgttcttaacgaaaatgctggtatcaatagcattcgccatctggttcatgttttcgatgttgcgcgagtgcattgccgccgtgtggtggcaaccgccttccagtttcaccgccagcgcaatggcatccgccacgttggcgacgcgcacgacgggcagcaccggcatcatcagttcggtcacggcaaacggatgttctgcagtggtttccacaaacagcaaacgcgtttcttgcggcacgttcaggccgattgccgccgcgattttcgccgcatcgcgaccaacccagtcacggctgacggtgccttttccgcgctcgtcgatatttttcagcaacaccggttgcagctgctgcgcctgttctgcggtcagtttcaccgcgtgctggccttccatcagacgcatcagttcatcggctacgctatcaacaacaatcagtaccttttcgtcggcacaaatgatgttgttatcgaaagaagcgcctttgacgatggactgagcggcacgggcgaggtcggcggtttcatccaccactaccggcgggttgccagcgcctgcggcaatcagacgtttattggtgtgtttacgcgccgcttctactaccgcttcgccgccggtcaccaccagaaggccgatgcccggaaacttgaacaaacgctgcgcggtttcgatatccggatttgccacagtaaccagtaagttttccggcccgcctgcggcaacaatcgcctggttgagcagcgtgatcgcccgctgggagacttttttcgccgccggatgcggggcaaaaatgacgctgttgcccgcggcaatcaggctgatggcgttgttaattacggttgccgccgggttagtggaaggcgtcaccgaagccaccacgccccagggtgcgttttcaattagggtcaggccgttgtcgccagtcagcacttgcggagagaggcactcaacgcctggtgtgccgcgcgcctgagcgacgttttttgcaaatttatcttcaacgcgccccatgccggtttcactgacggcaagttccgctaaatctctggcgtgtttttcgcctgcttcacgaatggcagcaatggctaactggcgcattgccacgctttttaacccttgctgggcgactttggctgccgcaacggcgtcatccagggacgcgaaaacgcccatctcatgaacggcggcggacggcgtgtcactgctttgcattttcagcagtaccgctttcaccacctgttcaatatcctgttgattcatgatgttctgccttatttgtggaaaattacctgaccgccagacaccacctcatcgacaatgccaatcacgcacagatcgaccggtgacgtttcgcttttatgcgcctggcgggcggaactgccactcaccagtaacacccactccccggttcccgcgccaatattgtcgatggcgacggcgcattgcccgtcaggattaccttgtggatcaatcatttccaccatcagcaatttgtcatgcgccagtccgtgatggcgtacggtacaaacaatttgtccagtgacgactgccagtttcatacccgcctccgtggcgtatttcaggtaaaagctccccctaccctccgcagaaggtaaaatgaaaaaggagagagcgtgacgcccgaatcgacgtcacacagggtgattacaggttgctgctatcgcctttcaggccgatcgggaagacttcttccaggtcgccgtgcggacgcgggataacgtgtacagataccagctcgccgatacgctgtgccgctgcggcacctgcatcggtcgcggctttacaggctgcaacatcaccacgaaccatggcagtacacaggccgccgccaatctgcttaacaccaaccagcttgacgcgcgcagctttcaccatcgcgtcagaagcctcaatcagtgcaaccaggccccgggtttcgatcattcctaatgcttccattgtgctttcctctttatcagggtccagaacgggaccgttcattcaaccagtgtttgtaaactgctttcgcggttcacttctgtctgacgcggcacagctgccaccagcgccagctcgataatttcctgcacgctacaaccacgagagagatcgtgcatcggcgcggcaagtccttgtatcagtggcccgacggcacgatatccgccgagtcgttgtgcgattttgtaaccaatatttccggcttccagcgacggaaaaaccatcacattggccttgccctgtagcgggctggcaggcgctttttgcgccgccacttccggcacgaaggcggcgtcaaactgtaactcgccatccaccaccagctttggtgcgcgctcacggacgatttctgtcgcctgctggacgttagcaacacaggggggacgggcgctaccattgctggaaaacgacagcatcgccacgcgcggctcttctccggtgatggcgcgccaggtttcggcactggcaagcgcgatatccgccagctgcgccgccgtcggctgtggcaccacgctgcaatcggcaaagcccaacgccgggccgctgtactgtggcaacatcaggaaaatggaagagagcgttttacagcctggctgcaagccgataatgcgtaatccggcacgcagcacatttgccgtggaagagaggttgcccgcgatacagacatccgctttaccggcgctgaccattgctgcggcgaacatcagagggtcggtaagtttttccagcgcatccggcggcgttttttcgcccgcgcgggccagccagcgatgagcaaattcttcccgcattgcgaggttgccatgcggatcaatcacctgtagcccgtccatcgccacgccgtgactgagcgcaaactgacgaagttcaaacggattggcgaccagaatgggcgttgccagaccttgttgatgtaaatattgcgcggctttcagcacacgttggtctaacgcatccggaaaaaccactctggcgggcgctcgcaacgccagttcacgacaacgttcaataatcattgcgtttcccccagtcgttgttggatctgcttcaccgttagcggctgcttcgttacgctcaggatcatcatcacgtagaccgtgctggaaaggcggttcagcgcctgcaaaatgtccgggcgtaatacttcaaagctgcgggtgataaacacctgcgccgctacggtttcggtttcccgcactttggtacgtagcagattgagcaacgccgcatcgcgcccgtggctggcttccggcaccagatgatcgtggtcgagatagcgcagcggctggtgagaaagtcgatgcagatcttcgtcagaaagcccgacaatcgcctggcagcccagcggttcacccagcgcatcggcgcgcataatgttgccaagacgcgaacggatatccgccagccacggctgccacggttccgccagttcaatttgcagccacactgccagcgcaatggtgctgtcgagaaccgcgcgaaaacccagacgcggatcgcttttggcgaccattttttccgccgacaggtgagtcagcgtatccggcttttttgccaccggctggcggcacagttcgcagcacgcctgcggatgttcatcgctactggtcagcccatgaacgggctgcggctgctgctgttcatcgtcaacaaacaggcggccctgctcgtcaataaacttgatgcgcagatggcggctttccagcaactcccgggcagagggcgtcaggcgactgtccgcagggagatggatctctgcgccttcgctgagcgtatggttcgctcttagccatgcttcggtgatgaaatctttcatagggattgccagttagccggccaggcgacatacaggaatttcacgctggatgtcgtaccaaattcgatgctggagcctttcgggataaacatcacgtcgcctgctttggcgatcatggtttcgccttcgtggcgaacatgtagctccccttccagcaccatgtcgatttcgtcgtagttcagggtccacgggaagaatgcgttctcccactgcataaaaccggcggccatgctgctgccgtcgtctccggtcacaagatcagtcaagcccacgcaatgcggctctgcgccgtcgaaacgaccaaacttgacgctgctgccatcaatcactttgatgccgcctttgccggtcaccgatttgaagctcggctgcattgcgccctgctccagcgactgtttttccttcatcactttttccatcagctgtgcgaccaggctttcggtaaactggccttccggcagctgggcaatgatggtttcgcggatgcgctggctttcggttttgtcggctggcacgctggcgggcacggacgccgttaccgggatcgattcatcacattcggtgatggtaaaacccagtagatccgccacttcacgggcttccggggtaataatgctggcgcgcagaaccacggacattgcctgttcgccgcgcgcgtgtgcttcacgaatatcattcgctgtgatgagttttttcacctgcttcctcctgtttggtgagagatgccagataatccaccagttgctgcacgctttgcgggtcgtggctgtttagctcgaaaatcggctcttcgaaacccgtctcaagcaataactttcgcgttgcggcgacgtcagcatctggcatgtccgttttactgatgacggcgatttgccgtttgctgacgccaatatccagcaacccggcaggcaaccgactttccgggtcatttgcgccatggacatagatcagcatgtctacatcctgtagcgtggtaattaaggcgtgataccagcggggatggctaaaatattcacccggcgtatcaatatcgcccttatcattaaattccacggcctgtgtttttctggcgagggtataattcccctgcaacgcattaaataacgttgtttttcctgccccgacgctacccacaaacgcaattcgtttcatgaatgcctcgtattaacttttggtcatttcacaaagcgtataatttaataagcgacctaaaccgctgacggtttgtgataacgcttcttctactgcgcccaccgagccataaatcaccaatgcaccgctgaagcggtcgagaaaaccgatatgcacatcagcggctttcagcgctaaatcaccggcgatcatcgccgtttcgccgggagttagcgtcataatgccaattgcgcccgcatccggaacgccgattttcttcgccagttcctcaccgggatgcgcgatgagatgcgccagtgtgacctgtttgccgggcacaaattcctgaatgatgcgttctttatccatgagtcgccgcctgtgaaaaactttcgtgtatcgtgacaatttttcgtcagagtaaataacaaaattcggcaagcgcgtttaaaaggtgaggtagatcactaagaatggagagatattcgctgtggtgcataaactttcatatgcaacgcatgaatataaataaaataatatcgagatattatatagactgctttttttattattcgcaaactcagtaataagctttactaatatattgcagccaaaccgcttaccctgaatattcagggtaagcgtgagagttaaaaaagaattacagcggttgggtttgcgcttcaaccacggccagcgccaccatgttgacgatacgacgcaccgatgcgatcggcgttaacacgtgaaccggtttcgccacgcccatcagcaccggaccgacagtcacaccttccgagctggaaacgcgcagtaagttgtaactaatgcgggcagcttccatgttcggcatcaccagaatattggcagaacctttcaaagggctgtccggcatacggtcgttgcgaatcgcttccaccagcgctgcatcgccgtgcatttcaccatcaatcatcagatctggcgcacgatccctgaccagttccagcgcctgacgcattttgctcgacgacgggcagtcagaagaaccaaagttggagtgcgacaacagagcaacgcgcggctcaataccaaaacgacggacagtttctgccgccatcaaggtgatctccgccagctcttctgcgtctggttcgtcattgacgtaggtatcggcaataaaggtgttaccactcggcagcagcagcgcgttcattgcacctgcggtgtgaacgccatcgcgataaccaaagacatttttcaccacgctaaaatgttcatgataatcgcccaccgtaccgcagatcattgcatcggcttccccacgctgaaccatgatcgcgccgatcactgtcgggttactgatcagcgcccgctgcgcctgttcctgagtgacaccgcgacgcttcatgatctggaagtattcggtccagtactctttaaagcgcggatcggattcgttattgacgatctcaaaatcaacgcccgctttgatctgcaagcccagtttctgaatgcgcatttcgatcacgttcggacgaccgataaggatcggtttcgccagtcccagcgttaccagttcctgagtggcatgcagaacgcgcgcctcttccccttctggcagaacaacgcgcttcggcgctttgcgagcctgggagaaaatcggcttcataaacaggttggttttgtaaacgaactcagtcagcttgtcgatgtagacgtcgaaatcagcaatcggacgcgtcgccacgcccgactccatcgcggctttagcgaccgcaggagcgatcttaacgatcaagcgcggatcaaacggttttggaatgatgtattccggaccaaagctcagatcctgatcgccatacgctgaagccaccacttcgctctgttcggcgtgggccagttccgcaatcgcgcgtaccgccgccagtttcatctcttcattgatagccgttgcgccaacatccagcgcgccacggaagataaacgggaagcaaaggacgttgttgacctggtttggatagtcagaacgaccggtgcaaatgatggcatccggacgcacttctttcgccagcggcggcagaatttccggttccgggttcgccagcgccaggatcattggcgcacgagccattttcttcaccatttcctgggtcagcactttcgggccggaacatccaaggaaaatatccgcgccttcaatcacatcatcgagggtacgtttgccgtcatccaccaccgcatatgcggctttggtttccgccatgtttggctcacggccctgatagataacgccttttgaatcgcaaaccacgatgttatgtttttgcagacccagcgctaccagcaggttcatacaggcgattgctgcggcacccgcgccggaaaccaccatccgcacgtcggagatgtttttctccaccacgcgcaagccgttgaggatggcggcagtgctgatgattgccgtgccgtgctgatcgtcgtggaataccggaatattcatccgctcgcgcagtttctgttcaatatagaaacattctggcgctttaatgtcttcgaggttgattccgccgaaggtcggttcgagcgcagcgacaacttcaataaatttgtccgggtcgagttcatcaacttcaatgtcaaatacatcaatcccggcgaatttcttaaacagaacgcccttgccttccatcaccggtttgccagccagcgcgccaatgttgcctaaccccagcaccgccgtaccgttagagatcaccgccaccaggttaccgcgcgcggtatatttgtaggcttttaacgggtctttttcgatttcaagacaaggtgcggcaacgcctggtgagtaggccagcgccagatcgcgctgcgttgccagaggcttggttggagaaacctggattttccctggaactggaaattcatggaaatcaagtgcactttgttttaactggtcatccatttggttgttcctttcacgtaacgttcacaaataaagtgtgtgggcaacagcccctgcccacaacgtggcgcacattattaccctgccggagtcttcagactttgagcaagtccaaactctcaccattaatataatgttttggtaataatcctataacactgatgttacctgcttaatccagcaataccatgcctgtctgctatgcttttttgatgcgtttagcgaaatttctcagaagtgtgaattaacgcactcatctaacactttacttttcaaggagtatttcctatgaacgagttagacggcatcaaacagttcaccactgtcgtggcagacagcggcgatattgagtccattcgccattatcatccccaggatgccaccaccaatccttcgctgttactcaaggctgccggattatcacaatatgagcatttaatagacgatgctatcgcctggggtaaaaaaatggcaagacccaggaacaacaggtggtcgcagcgtgtgacaaactggcggtcaatttcggtgctgaaatcctcaaaatcgtacccggtcgcgtgtcaacagaagttgatgcacgcctctcttttgataaagaaaagagtattgagaaggcgcgccatctggtggacttgtatcagcaacaaggcgttgagaaatcacgcattttgatcaaactggcttcgacctgggaaggcattcgcgcggccgaagagctggaaaaagaaggtattaactgcaacctgacgctgctgttttcttttgcccaggcgcgggcctgtgcagaagcgggcgtttttctgatttcgccgtttgtcgggcgtatttatgactggtatcaggcacgcaagccgatggacccgtatgtggtggaagaagatccgggcgttaaatcggtgcgcaatatctacgactactataagcaacaccactatgaaaccattgtgatgggcgcgagcttccgtcgcaccgaacaaatcctcgccttaaccggctgcgatcgactgactatcgcaccgaatttgctgaaggagctgcaggaaaaagtttcgccagtggtacgtaaattaatcccgccttctcagacgttcccacgcccagcacccatgagcgaagcggagttccgttgggagcacaatcaggatgcgatggcggtagaaaaactgtctgaaggcattcgtctgttcgccgttgatcaacgcaaactggaagatcttcttgccgccaaactataaaccagccacggagtgttatatgtcccgaaaagaccttgccaatgcgattcgcgcactcagtatggatgcggtacaaaaagccaattctggtcatcccggcgcgccgatgggcatggctgatattgccgaagtgctgtggaacgattttcttaaacataaccctaccgacccaacctggtatgatcgcgaccgctttattctttccaacggtcacgcgtcgatgctgctctacagtttgctacatctgaccggttacgacctgccgctggaagaactgaagaacttccgtcagttgcattcgaaaaccccaggccacccggagattggctatacgccaggcgttgaaaccaccaccggcccgcttggacaaggtttggcgaacgccgtcgggctggcgatagcggaacgtacattggcggcgcagtttaaccagccagaccatgagatcgtcgatcacttcacctatgtgtttatgggcgacggctgcctgatggaaggtatttcccacgaagtctgttcgctggcaggcacgctgggactgggcaagctgattggtttttacgatcacaacggtatttccatcgacggtgaaacagaaggctggtttaccgacgatacggcaaaacgttttgaagcctatcactggcatgtgatccatgaaatcgacggtcacgatccgcaggcggtgaaggaagcgatccttgaagcgcaaagcgtgaaagataagccgtcgctgattatctgccgtacggtgattggctttggttcgccgaataaagcaggtaaggaagaggcgcacggcgcaccactgggggaagaagaagtggcgctggcacggcaaaaactgggctggcaccatccgccatttgagatccctaaaaagatttatcacgcctgggatgcccgtgaaaaaggcgaaaaagcgcagcagagctggaatgagaagtttgccgcctataaaaaggctcatccgcaactggcagaagagtttacccgacggatgagcggtggtttaccgaaggactgggagaaaacgactcagaaatatatcaatgagttacaggcaaatccggcgaaaatcgctacccgtaaggcttcgcaaaatacgcttaacgcttacgggccgatgctgcctgagttgctcggcggttcggcggatctggctcccagcaacctgaccatctggaaaggttctgtttcgctgaaggaagatccagcgggcaactacattcactacggggtgcgtgaatttggcatgaccgctatcgccaacggcatcgcgcaccacggcggctttgtgccgtataccgcgacgttcctgatgtttgttgaatacgcccgtaacgccgcgcggatggcggcactgatgaaagcgcggcagattatggtttatacccacgactcaattggcctgggcgaagatggtccgacgcaccaggctgttgagcaactggccagcctgcgcttaacgccaaatttcagcacctggcgaccgtgcgatcaggtggaagcggcggtgggctggaagctggcggttgagcgccacaacggaccgacggcactgatcctctcaaggcagaatctggcccaggtggaacgtacgccggatcaggttaaagagattgctcgtggcggttatgtgctgaaagacagcggcggtaagccagatattattttgattgccaccggttcagagatggaaattaccctgcaagcggcagagaaattagcaggagaaggtcgcaatgtacgcgtagtttccctgccctcgaccgatattttcgacgcccaggatgaggaatatcgggagtcggtgttgccttctaacgttgcggctcgcgtggcggtggaagcaggtattgccgattactggtacaagtatgttggtctgaaaggggcaattgtcgggatgacgggttacggggaatctgctccggcggataagctgttcccgttctttggctttaccgccgagaatattgtggcaaaagcgcataaggtgctgggagtgaaaggtgcctgatggtgatcgccggatgctgattgccggatgcgacgctgacgcgtcttatccggcctacagcgtcttatccggcctacatgtccccgcaattttgtttaacgggtgatccacaacgtgggccaggcgtctggcccatgccagttatcgcaggtgggttctgcggcataacgcaccaggcgaaaacgctgaccgtcaaagcgccagcgcgcctgaatgccacaatcgcttaatccgcgccctttcgctaaggtcaccagttcacgcgatttctcatcaaatgttgcgttcatcagttccagttcattcgtctcctgaccgttgttgaacggcaaacgcaaccgaaccgggcgcgaggctagtggctttttacgcgacacaatccatgccaaatcaatggtgttataggcccctgcctcacagctaatcatcatcagcgctttatcatcagtcagcgcagtgacattcacctcacgacgtaacggatcaagcgagcagcgcagaccattcatccgccagtttccataatccagcaaatcgttgcgttcttcgagtgagagtggcgtcggcgttgggttaaccaccgcgacctctttcagcgcaggcgcgggcggtacgctgagcggcggttcgtcccctttcttgatccacgcggtttcactgccaacgcgcttttgctgagcatcaataaacaacaacgccgcttttaagccactcagagaaatggtctgattgccgtcgcgtaaggtgatcgccttcccttcctgaatcatctgcaaaaacgcggtgatggttgccgtatcatcggttactaataaccatggtgaaatccgccacttgtcaccacttaacgccaacggctcaccatctaacagcagccgtggcgctatctctccttcagacgcatccggcgacttcaacccgccgcgctcaatacgtaaaacggcatcggtatgcgccccggcgctgcggctcagggtcatcaccagtccattatgatcgcccgtattgcgcgccacgcagaagttttggttattacaggtgacctgccagtcggaaaacgcccgttgcgctggtgccgcccacaccaaagacgtcggcaacaaagcgaaaaaaaagagaaggaaaatgcgatagcgcatggacggtacgaccccagaagttcaaacaaacagcacaagtcgtatcttcgttgcgcaggtagcgcggctcaatcagatttgtcggattgagccaataataaacaacgaaatattattgttatttttcagtccattaaatgtgacgtttgcaaatagttaagcaataacaccgtcttaccgtcacgtatctcgccggttttgatcatctccagcgcctggctgaacggcagctcgagcacttcaatatcttcatcttcaacaccgccaccggcgttagcgcgctgattgtcactgtattcggcgataaaaaagtggattagctcagtcacaccgccaggcgacatatacagttcaaataatttgcgcacttcgcccacttcatagcccgtctcttcaatcgcttctttacgaatgcacacttccggttcgtcgttatccagcagcccggcgcaggtttcaatcagctgcccgctttcattgccattaacccaggtagcgacacggaactgacgaatcagaaccacggtctttttcttcgcgttgtacaggaggatcgtcgcaccattaccgcgatcgtaaacttcacgtttatggcggataacttcgccatctttgcgcgtgagatcgtaagtaatgttgtgcagggtgaaatagttatcggagagaattttgtctttaatgagggtgatttgttgcgtcataccgactccacagcgcgaaatgaacaattatattacgctgtgaagtcgggtttgtctgcgcaggctatcagtgagatttgactgattttacccccagccagtcaataatcccctgtgccgcatgacgtccttctgccattgcggtaaccaccagatccgcaccacgcacggcgtcgccaccggcgaagattttcggattggtggtctggtaacggtactggctttccacatccgcgatgatgcggccccatttgtctaccgttacaccgtgcgactccagccacggcatcccgtgtggattgaagccaaacgccataatcaccgcatcggctggcatgacaaattcactgccctcaatcggtacaggtcgccgacgcccctgggcatccggctcgccaagacgcgtgcgcaggaaacgaatcccgcagacgtgaccttgttcattcagctcaagcgccaccggctggacgttaaattcgaagttggccccctcttcgcgggcgttcctcacctctttcttcgagcctggcatgttagcttcatcacgacgataagcgcaggtgacgttactcgcgccgtggcgcagcgcagtacgcacacagtccatcgcggtgtcgccgccgcccagtaccacgacgttaagtccggcggtattgataaacggctcttccggtagctcttcgagccccatcacctgtttagtgttggcaatgaggaacggcagcgcgtcataaacgcccggcgcatcttcattgggtaaacccgctttcatggaacggtaagtgcctacgccaacgaagaccgcgtcgtattgttccaaaagcgaatccaaagagacatctttacccacttcacaattgagttcgaagtgaatccccatcgcgctgaagatttcccgacggcgtgccagcagggatttatccagtttgaaagaaggaatgccgaaagtgagcaagccaccgatttctggatggcgatcgtacaccgtcacccccacgccattgcgggtcagaacatccgcacaggccagccctgccggacctgcaccgataatcgccacccgcttgtccactttggtgacatggcttaagtcaggacgccaacctttcgccaacgcctgatctgaaatgtagcgttcaatgttgccgatagttaccgcgccgtgctcatcgcgaatagtacaggcaccttcacacaaacggtcttgcggacaaacgcgtccggtaatttccggcagggtgttggtctggtgagaaagctcgacggcggcgtcgatgtttccggctttcaccagttcaatccactgcggtatatggttatgcagcgggcaggtccattcacaaacgctgtgctcgccgcacttaaggcagcgcgaggcttcccgttgtgcctggtcggcgcgaaatggcagataaatttcatcaaaaccggttttgcgcgcttcaatcgccagtttatccggctcgccacgcgcgggcgttgcctgcatttgttcgactttactcattaccggcatttcttgcgccgcggtactggcatgccacggttgatgttcctgacgcgcggtgcgcaagcggcgggatttcgccatgccggagagtgcgacgtcagtgaccagttgcagcgcgtccgccgggcaattctcaacacaggcaggaccgttttcgcgccccgcacaaaggtcgcatttatgcgccgtggcttttacttttcctgccgcgacgggtgtcaggacgatttgcatcgtaccaaaaggacaggccaccacgcaggatttacagccaatacacttttgctgattgacctgaatgctgtcatcaacgtggctgattgcgccattagggcagctacgggcgcagggcgcatcttcacaatggtgacaggtcactgcactacgttgctgttgatgtttgataaccgtaattcggggatgaaaatggtgttggctcaggacatgttgctcatcattgtgagccatgacacaggcgatttcacaagcatgacaacccagacattgctgactgttggccataataaaacgattcataacgaccttcttttttggttgtaaaaaccttattctttatatgagtgttgttattacccgacttacaggggaatcggcaatgttcatgtgcccagaataagtaactatttcgctataaactgtggcagatcaaataatcccatcactgactaaattgtgtttcagcgaactggaacattaatgattttttgtggagaagacgcgtgtgattgttaaacgacccgtctcggccagtctggcccgggcctttttttacattgtgctgctgtcgattctttccacgggtatcgctctgctaactctggcgagcagtttgcgcgacgctgaggctatcaatattgccggatcgctgcgtatgcagagttaccgcctgggctacgacttgcaaagtggcagtccacaactcaatgcacattgccagttgtttcagcaggcactgcattcaccggtattaaccaatctcaacgtctggtatgtgccagaagcagtaaaaactcgctatgcgcatctgaatgccaactggctggagatgaataatcggctcagcaagggcgatttgccgtggtatcaggccaatattaataattatgttaatcagatagacctgttcgtgctggctttacagcactacgctgaacgcaaaatgctgctggtggtggcgatttccctggctggcggtatcggtattttcacgctggtctttttactttgcgccgcatacgccatcaggtggttgccccgctgaatcagctggttaccgccagtcagcgtattgaacacggacagttcgactcgccgccgctggataccagtctgccgaatgagcttggtctgcttgcaaaaacctttaaccagatgtcgagcgagctgcataaattgtacctttcgctggaggcgtcagtagaagaaaagacccgcgatctccacgaggccaagcgtcgcctggaggtgttgtatcagtgttcgcaagcgctgaacaccagccagattgatgtgcattgtttccgccatattttgcagattgttcgcgacaatgaagcggctgaatatctggagctgaacgttggggataactggcggattagcgaagggaagccaaaccctgagctgccaatgcagattttaccggtgacaatgcaagagacggtttacggcgaactgcactggcaaaatagtcacgtttcatcatcagaaccgctgcttaacagtgtttcatcgatgctgggacgcggtttgtactttaatcaggcgcagaagcattttcagcagttattgttgatggaagaacgtgcaaccatcgcccgcgaattgcacgactcgctggctcaggtactttcttacttacgtatccagttgacgttactgaagcgttcgataccggaagataacgccaccgcacaaagtatcatggccgatttttcccaggcgttgaatgatgcttatcggcagttacgcgagctgttgactactttccgcctgacgctgcagcaggcggatctcccctccgcgttgagggaaatgctggatacgttacaaaatcaaaccagcgccaaactgaccctcgactgccgtctgccaaccctggcgctggatgcgcaaatgcaggtgcatttgttgcaaattattcgcgaagcggtgctgaatgcgatgaagcacgccaacgccagcgaaatcgccgtcagttgcgtcaccgcgccggacggcaatcacacggtttatatccgtgataacgggattggtatcggtgaaccgaaagaacccgaaggtcattatggtctgaatatcatgcgcgaacgcgcggaacggctgggtgggacgctgactttttcacaaccttccggcggcggcacgttagtgagtattagctttcgctctgcggagggtgaggaaagtcagttgatgtaatgcctcctactgaccaaagaatacttgcacttaaggttcagtataaaagggcatgataatttacattaactcctttttttctccacgattggctcgtaccttgccgctacagtgaagcaagtcaagcctacaacgatacgcagaaacacgaggtcctcttttaatggcgaatttctttattgatcgccccatttttgcctgggtgctggcaatcctgttgtgtctgacagggaccctggcgattttttcattgcccgttgaacaataccccgatctcgcgccaccgaatgtgcgagtgaccgctaactatcccggcgcatcggcccagacgctggaaaacaccgtgacccaggttatcgagcaaaatatgaccggcctcgataatctcatgtatatgtcatctcagagcagtggcaccggtcaggcatctgtcactttaagttttaaagcaggcaccgatccggacgaagccgtgcagcaagtacaaaaccagctgcaatcagccatgcgaaagttaccgcaggcggtgcaaaatcagggcgtgacggtgcgtaaaaccggcgataccaatattctgaccattgctttcgtctctaccgatggttcgatggataaacaggatattgccgattatgttgccagtaatattcaggacccgttaagccgcgtgaatggcgtcggggatatcgatgcctatggttcgcaatattccatgcgtatctggctggacccggcgaaactcaacagtttccagatgacggctaaagatgtcactgatgccattgagtcacagaacgcgcagattgcggttgggcaacttggtggtacaccttccgtcgataagcaggcgctcaacgccaccattaacgcccagtcactgctgcaaacaccagaacagttccgcgatatcaccttgagggtgaatcaagacggctcagaggtaaggctgggcgatgtcgccaccgtcgaaatgggggcggagaaatacgattatcttagccgcttcaatggtaagccagcctccgggctgggggtaaaactggcctccggcgcaaacgaaatggcgacagcggagctggtgctcaatcgtctcgacgagctggcgcagtatttcccgcacggactggaatacaaggtggcgtatgaaaccacctcgtttgttaaagcctccattgaagacgtggtgaaaacgctgctggaagctatcgctctggttttcctcgttatgtatctgttcctgcaaaacttccgcgccacgctgatacccactatcgccgtgccggtggtgttgatgggaaccttctccgtactttacgccttcggttacagcgtcaacaccttaaccatgttcgcgatggtgctggcgatcggtctgctggtggatgacgcaatcgtggtggtggaaaacgtcgaacgtattatgagtgaggaaggactcactcctcgcgaagccacacgtaaatcgatggggcagatccagggggcactggtcgggattgcgatggttctttcggcggtatttgtaccaatggccttcttcggcggcaccaccggtgccatctatcgccagttctctattaccattgttgcggcgatggtgctgtcagtactggtagcgatgatcctcactccggctctgtgtgccacactacttaagccactgaaaaaaggtgagcatcacgggcaaaaaggcttttttgcctggtttaaccagatgtttaaccgcaacgccgaacgctacgaaaaaggggtggcgaaaattctccaccgtagcctgcgctggattgtgatttatgtcctgctgcttggcggcatggtgttcctgttcctgcgtttgccgacgtcgttcttaccgctggaagaccgtggcatgtttactacctcggtacaattgcccagcggttcaacccaacaacagaccctgaaagtcgttgagcaaatcgagaaatattacttcacccatgaaaaagacaacatcatgtcggtgtttgccactgttggttctggccccgggggtaacgggcaaaacgtggcgcgaatgtttatccgcctgaaagactggagcgaacgcgacagtaagaccggcacctcatttgccattatcgagcgtgcaacgaaggcgtttaacaagattaaagaagctcgcgttatcgccagcagcccgccagcaattagcggtcttggtagttctgcaggttttgatatggagttgcaggaccacgctggagcaggtcacgatgcgctgatggcagcacgtaaccagttgctggcgctggcggcggaaaacccggagctaacccgtgtgcgccataacggcctcgatgacagtccgcagttgcagattgatatcgaccagcgtaaagctcaggcgctgggcgttgctatcgacgatattaacgacacactgcaaaccgcctggggttcgagctatgtgaatgactttatggatcgcggtcgcgtgaagaaagtctatgtgcaggcagctgcgccgtatcgcatgctgccagatgacattaatctctggtatgtccgaaataaagatggcggcatggtgcccttctctgctttcgcgacctcacgctgggagacaggctcgccgcgtctggaacgctataacggttattctgcggttgagattgttggggaagccgcaccgggggtcagtaccggtacggcgatggatattatggaatcgttagtgaagcagttgccaaacggctttggtctggagtggacggcgatgtcgtatcaggagcggctttccggcgcgcaggctccggcgctgtacgccatttccttgctggtagtattcctgtgtctggcggcattgtatgaaagctggtcggtaccgttctcggtaatgctggtcgtgccgctgggggttatcggcgcgctgctggcaacctggatgcgcgggctggaaaacgacgtttacttccaggtgggcctgttaacggtcattggtttatcggcgaaaaacgccatcctgatcgtcgagtttgctaacgagatgaaccaaaaaggccacgacctgtttgaagcgacgctccacgcctgccgtcagcgtttacgcccgattctgatgacctcgctggcatttatcttcggcgtattgccaatggcaaccagcacgggtgccggttccggtggtcagcatgcggtgggtactggcgtaatgggcgggatgatttcggccactattctggctatttacttcgtgccgctgttctttgtgctggtgcgccgccgcttcccgctgaagccgcgcccggaataagcaataaaaaaggcgacatgccaatgtgtcgcctttttcaactttccgattaagaacctgctcagcgggttcttgctgtttatactttgtctcgggaattacttacgaagcataacttcgataaagtctttccagttccccagttcacgttcaatcataacaacctctcttataattatgggtattctacggaaacaatataccgtggtgaagctaatttactcgattgctgcgatgactacctccgggggacaaaccttatgtaaatactatggtcctgcggtgataatttgtatgtgatacacagcaacatttcgagatattcatacggcatctaatactgatttaattctggttaaaatacagacagataacaagatgaatattcttaatgtttacgttnaaaatgtttaatattatttaatagttgttaatttgaatacttcgataatgttatatttcctgataatcatttgcaggcaaaatgttttcacccttaaatgagtatttattctcatagatcgaaaaaggattcattatggttacactttacggcatcaaaaattgtgacaccattaaaaaggctcgccgttggctggaagccaataacatcgactatcgttttcatgattaccgcgtcgatgggctggacagcgaattattgaacggttttatcaacgaattaggctgggaagcgttactgaacacccgtggtacaacctggcgtaaactggacgaaaccacccgcaataaaatcaccgatgcggcctctgcggcggcattaatgactgaaatgcctgcaattatcaaacgtccattgctctgcgcgcctggtaagcctatgctgctgggtttcagtgattccagttatcagcaatttttccatgaggtgtagtctatgtcgtgcccggttattgagctgacacaacagcttattcgccgcccttccctgagtcctgatgacgcaggatgccaggctttgttgattgaacgtttgcaggcgatcggttttaccgttgaacgcatggattttgccgatacgcagaatttttgggcatggcgtgggcaaggtgaaacgttggcctttgccgggcataccgacgtggtgccgcctggcgacgccgatcgttggatcaatccgccgtttgaacccaccattcgtgatggcatgttattcggacgcggtgcggcagatatgaaaggctcgctggcggcgatggtggtagcggcagaacgctttgtcgcacaacatcccaaccatacggggcgactggcatttctgatcacctctgatgaagaagccagtgcccacaacggtacggtaaaagtcgtcgaagcgttgatggcacgtaatgagcgtctcgattactgcctggtcggcgaaccgtcgagtattgaagtggttggtgatgtggtgaaaaatggtcgtcgcggatcgttaacctgcaaccttaccattcatggcgttcaggggcatgtggcctacccgcatctggctgacaatccagtacatcgcgcagcacctttccttaatgaattagtggctattgagtgggatcagggcaatgaatttttcccggcgaccagtatgcagattgctaatattcaggcgggaacgggcagtaacaatgttattccgggtgaactgtttgtgcagtttaacttccgcttcagcaccgaactgactgatgagatgatcaaagcacaggtgcttgccctgcttgaaaaacatcaactgcgttatacggtggactggtggctttccgggcagccatttttgaccgcgcgcggtaaactggtggatgcggtcgttaacgcggttgagcactataatgaaattaaaccgcagctactgaccacaggcggaacgtccgacgggcgctttattgctcgcatgggggcgcaggtggtggaactcgggccggtcaatgccactattcataaaattaatgaatgtgtgaacgctgccgacctgcagctacttgcccgtatgtatcaacgtatcatggaacagctcgtcgcctgatgagtggttctgcaagaggaaataagcatggactggctggctaaatattggtggattctggtgattgtctttttggtaggcgtcctgctgaacgtgattaaagatctcaagcgcgtcgaccataagaaatttctcgccaacaagccggagcttcccccgcatcgtgatttcaacgataagtgggacgatgacgacgactggccgaaaaaggatcaaccgaagaagtaagctgagtgctcaaccgtaggccggataaggcgttaacgccgcatccggcaatggtgaacgatgcctgatgcgacgctcacgcgtcttatcaggccaggtaatctgtcttttacatcatttcaatcacatcatcatcgccaggcttaccgccacttagcgcttcgtcgaaataatgtttcggaatggtataacgcaagtgatccagggcaaattgcatactgcgattgtcgatcgcatggcctaaatcctccacgatatccagcgtcacgtcaccaccggcactgattaacgcttcctgcgccgcaaccgcatgcgccagatcgataaccggatcttcaccgccatgaatcaggtgaattgtcgtggctgtagacgcagtttccggcaggctcgcatagcgtccgttaaaagcaatgacgcgtgaagcaaggcccggttcggctttaatgctctccagcaccataatcgcgccttgagagaaaccgatgagcgccgtggcgttagcccctactccgctctgtttctgccagtagcgcaccgtttcaataaacgtcggcatgatcgcatccacacgcgcctggcgattatcttccgtaataccctgcaccgaaaaccactgacgccccgccggattaccgctcggctccgcgccaccgacactcaccaccagcgcatcaggaaacagcggtgcaaaccagctacctatttcccccattgccaccgggttatccccgacaccgtggaaaagcagtaacaactgttgcgcaggtttatccgggctttgaacaacaaaatggtcatgtttcatggcgaactccttaactgatgtcattaattttacgccgctgactcacaatgaccatgggagaaaattgaaggagtcagtgaaaaaattgccattgcgttatgcgatcgcgcagacgctcagtgcgaacatcattaagtgcgaacagcgcctgcgcggcctcttcccgctgacggaccagtaacatcttgcggcctgaaagtttaagtgtggtacataactgcgcgtcgctgacgtttttctgtaaacgcccacgcagcgccggtaatgccagttcactggtttgtagcagacgcaataagcaacctaacgatgttaatagcggacgatgagcgaaagcaaaaccggccagttcaagccagtcgtcgtcagaaaggacggcatcgtttagtggatcaacaggaagcgtttcgccattccactttgcgagagcttgcgcatcgcgacgtaaacggtaatgctcacgttcagccagttgtttacccgcattactcatcggtaacagcgccatcgccgtatagcaaccgctgctggcttcacgatgattacccatccgcaccagcacaaaaccgcagcggtgccagaaacgccataactccccggtgtaaccaaaactcaccgaaagatagtcgaggtcacgcgtatattgcaaagcaccagcaataagttgctgccctgtgccttcccgctgacgcgccggatgaactgctatccggctgacccgccgtccacgcaatgtcgctgccagtggattgctaccgtgcgccgccagcgactgggccaccagattaccccgcgggcgacgaaaacctgcccataccgcctgactgagttgttgagataatccgccctcatccaccagccacaacgccccggcaatctcgttttcgccagccgcctgtaaaaaatgttgccctggtgcatccatcatccggcgtaaatccagcggcgaggtccggtagtgcgcaccagacaataactgataaacctttaacggcgtttctggatcgcttcgccataacgtttgttcaaatgcggaaatgacgatattgccttgtggtgtatgggtgaagttttcatcgtcaaaaaccagtgcctcgctgaccattttttccagcgggcatccctgtgcccagcggatcggctgttgcagttcaaaacggtgtaaatgcggaaagcgagcgcaaaatttcagcaaaaaaccacgtccggtgccttcgtagccctgcaccgtagtggttaacaacgttcgaggaaaacgcgataccagttgatgcaacaacggcgcaggtatggctgcggcttcatcgaccaccagccagtcggcttgctcatcgctggctaacaaggcatccggcgcaataaagcgaaacttctcgcccgcaaattgtgccagtacatccgttgccgcttttgcgggcgcagtgacaatcgcactacccgcaatacgagaaatgagttgccctgccagcgccgatttaccgcgcccacgcgcagccgttaccgctgccacgcccgacggcatggtcagtagctgctgtaagagttgctgttgttctggttgtggtgcgccggtcgcggtgtgccagtcagtacggggagtaaaatgcgccaacgagaacggctggttttgccgccagagaatagcgtcgttatccgccgtaagtacacgtttgaaatgctggacaaaatgcggcgtcgcaatagggtcagggcaatcactccagcgcagcgagtcggtatcaggttggttttcccactcttcccatacagggagtaacaaaaccagccagcttcccgctttcaacgttccgctaagtgccgcaaaggcagcggcatcaaagccgtggcgggcgtcgaataccgcatgccggaactcgcgcccaagtaaagtttgtagtgccgagggagaacagtggttttcagcatctggctgcggcgaaatccacagccagtcgccaggtaaggcatcacgcaacttaagcgcatgatcaaaacaccaaccctcttccccgctcaacaccagcaagcggcggatcccttcacgtttcatttgcgctgttaatgtgtgaaacgcagtcagttcagccatccctgccccggaagttaaatgcttttaccaaaagtattgcattgtgccggatcgccgctgtcgaaaccacgtttaaaccagctgtagcgttgctgagaagtgccatgagtgaaactgtctggtactactcgcccctgactttgctgttgtaaacggtcatcgccgatggcctgcgccgcgttcagcgcctcttccagatcgccggtttccagaacgccttgctgctgcatactatgcccccagacaccggcaaaacagtcggcctggagttccatacgcacagataagcggttcacttccgcctgcgtcgcgttttgttgcagttgacgaactttcggctcgatgcctaacagtttctgcacatgatgaccgacttcatgggcgataacgtacccctgggcaaaatcgccatccgcgccaagtttgtctttcatgtcatcatagaaggagagatcgatataaaccgtgccatccgccgggcaatagaacggccccattatggactggcccgccccgcatccggtacgcgtcattccacggtacatgaccagcttcggttgctgataggtcttacccatcttctcgaactgttgtccccaggtgtcttccgtggttgccagaatcaccgaggtgaattttgcggcttcgtcttcattagggctaattgaccgcgttgattgctgttgggaaaccggctgcccggtcatcaacccggttaaatcaacgccatagtagcctgcaaccagcacgactatcagtaaaatcagcccgcctttaccgcttggcaggcgaaaaccgggaccgcccatagacggaccaccagagctgttgcgcctgtcttcaacattgtcactttcacgtcgtccttgccaacgcatagatacctcaacaatatattcattatagaaatgatcgtaggtggttcagaggaagattaccacaggaaagcgggatgaaatggcggaggaattaaggcttcatgccacgttatataatttacgaatgttagaagtaaaagagaatgttagctccaatcttctagtctgattcccgccactcgctcaaactctcgggtattgttggtaaccacaatcaaaccgcgactgcgagcatgtcccgctatcatctggtcaaaaggtccaacaggccttccctgccgggcaagctcggccctgatttgcccggtatgcgtcgcagcagcactatcataatcaagcacttccaaacgagatacgaaaccttcaatcaccgccaaattgcgttctggcatctgacttttttctgccccatagataagctccatcaatgttacagaacttatacacatccggccagaattcaggttaaaccgctctctgacatgtactggtttattcttaatagtgaaaatacagatattggtatccagcatgaatttcagcatcagaatgattccctttcctgcattgcgggttgatcacggatatccataaaatccgcactcacattttcgccatcaaaccaactgtcccaggactcaccggcgggagtgatgattcttgtacgaccaatcgcaataatttctactttcttaacatcctctggcagagcgaccgctttcggtaatctgacggcctgactgcgattacttaaaaatacagtagtttccatagcccccccttttttgggatatacgtcatgtatatacatattggcctgttattactttcctgtcaaagggagataatgcgaagtattgtagcgggggtatcgaagacatttagccggagtaccctccggctaaataaacaagcaaccagaaaaatcagtccagctgtacacccaggcggcgggcgacggcttcataggcctcgatcaggccaccgaggctctggcggaaacggtctttgtccattttctccagtgtttctttgtcccacaggcggctgccgtccggggagaactcatcgcccagtaccacttcacctttgtacagaccaaactccagcttgaagtcgaccagaatcagaccagcatcatcgaacagttttttcagcacgtcgttcgctttgtaggtcagctctttcatacgcgccaggttctctttgctcacccagccaaaggtttcgcagtaagattcgttgaccatcggatcgtgcatggcgtcgtttttcaggaacagatcgaacagcggcgggttcagctcaataccttcttcgattccaagacgtttcaccagagagccagcagcacggttacgcacgacacactcaaccggcaccatatccagctttttcaccagacattcggtatcggagagcagacgctccatttgagtcgggatacccgcttcagccagtttgctcataatgaagtagttgaacttgttgttcaccatacctttgcgatcaaactgctcaatgcgcgcgccatcccctgctgacgtatcattgcggaattcgagcaccaacaggtccgggttttccgtgctgtatacggttttcgctttaccacgatacaactcagcttgcttttgcatctttatcactcctgggtgtgaattaacgttttaaaatcttttgctgtctggtgtgccggatgttttgtcggatgcggcgtgaacgccttatccgaactacgtccgacaaacaaatttcgtgcgaattaccgctaaaatcgcgttttcctgccgacgcacacgtttgcgtatcatatcagaaaaaagggccggatgattccaggccctgtatttttacttgctaaacgcagcctggaagacagctaccagcgcgtcgttctgactctgagtcagagtatgacctttcggatcgatgaactgtaggctgctgcggttatctaaatcgccaacctgcagtttatagtcaccggatgccaggcctggatcgctcgcgcccagttcctgccagtcgctgtcagacagcggcttataagttacggccatgttgccctgcgaacgggtgctgtcggtcactttcatgcccactttttccagcgccgctggcagacgttgccaaaccacattgaacggcccgcgtacgaccagcattggtaaaccggtgtcatcagctgcactttgtacgtccatagtggtggaggcacgattttgcgcagcgttcgcggcgtcagtggcagatttatccagaccggcggaaataacgttcatcatctccgtgctgtaacgctgcatggaagccgcgtctgcaaccggtttgcccgcctgttccaggttcagcagtttaaccgtaaccgcctgctgataaccctgcggcttaacagagatttgataacgaccacgatactgctcgtcttcgtccagacggttccattgtacccaatcggtggtcagtgtctgaccagcatcatcacgttgggtgatggtgtagtttttcgcctgcagcacgctaaccacctgcggccacagagtattgccacgaccattttccaccagcaatgaagcggtatcgcccgtgaactgggtacgcgcgccagaaaccagtgccagcggctgggctggtggacgaatgtccagcgccttaccgacagcaccactaccgttggtcaccgggattgcataatcaccggaggtcaccggcaaaatcattccagccggggcatgaagctccgcaagcggtgccgcttccaggtaggcttcatcaccactgacctgacgcttatagcgtgagtcagaactacaggcagcgagtaataaaacaagcgaaacacccgcaacctttgccaggcgcgacttttgaacagagtaagccatcaaatctccctaaactttacagcaaaccggcatgcttaagcgccgctctgaccgtctcacgaccactgtcggtgattggtgtcattggcaggcgcagcgtatcggtcgccacaagacccagttccttacatgcccatttcaccgggattggattgggttcgacaaatagtttgttgtgtaatggcatcagacgctgattaataacgcgtgcctcggcaaaatgcccttctgctgccagtttgcacatctgggccatatcacgcgctgcgacgttagccgtaacggaaataaccccatgaccgcccaattgcatgaagtccagcgcgctcgcatcatcgccgctcagcagaacaaaatcatctgaaaccagctctttgatctggtttacacgcgttaagttccctgttgcctctttgattccgataatattttttactttcgccagacggcccaccgtttccgggagcagatcgcagccagtacgggacggcacattatacagaatttgcggcaggtcagtatgctcagcgatggctttgaaatgctgatacaaaccttcttgcgacggacgattgtagtaaggggttaccgtcaggcagccgacgataccgctgtcattgaagcgctgcgtcaggctaatggcttccgcagtagcgttagcaccagtcccggcaatcaccggaatgcgcccgtcagccagctccagcgtcatcatcaccacatcagcatgttcgtcatgatttaaggtagcggactcgccagtggtgccaacagaaacgatcgccgaagtaccgctggcgacatgataatcaatcagttttttcaagctagcccgacagacattacctttttcatccatcggagtaacaatcgcgacaatacttcccgtgaacatgggccatcctctgtgcaaacaagtgtctcaatggtacgtttggtatggcattaaaagcaagcagacagaaccgttctgattgttgtatgcatgttttttttatgctttccttaagaacaactcaccccttaaaggaataaccagtttgacactgtcatcgcaacattatctggtgatcactgcgttgggtgccgatcgccctggaattgtgaacaccatcacccgtcatgtcagtagttgcggctgtaatattgaagacagtcgcctggcgatgctgggagaagagttcacgtttatcatgctgctttccggttcatggaatgccatcactctgattgaatcaacgttaccgttgaaaggtgccgaactggatcttttaatcgtgatgaagcgcacgacggcgcgtccgcgtccgccaatgccagcatctgtctgggttcaggtcgatgtggcagactccccgcatttaattgaacgcttcacagcacttttcgacgcgcatcatatgaacattgcggagctggtgtcgcgcacgcaacctgctgaaaatgaacgggctgcgcagttgcatattcagataaccgcccacagccccgcatctgcggacgcagcaaatattgagcaagcgttcaaagccctatgtacagaactcaatgcacaaggcagtattaacgtcgtcaattattcccaacatgatgaacaggatggagttaagtaatgaatccactgaaagccggtgatatcgcaccgaaatttagcttgccggatcaagacggagaacaagttaatttgaccgacttccagggacagcgtgttctggtttatttctacccgaaagccatgacccccggctgtaccgtacaggcctgcggcttacgcgataacatggatgagttgaaaaaagcgggcgttgatgtgctgggtatcagcaccgataaacccgaaaaactctcccgttttgcggaaaaagagctgcttaactttacgctcctgtctgatgaggaccaccaggtgtgcgaacaattcggcgtctggggtgaaaagtccttcatgggcaaaacctacgatggcattcatcgcatcagcttcctgattgacgctgatggcaaaatcgaacatgtctttgacgatttcaaaaccagcaatcaccacgacgttgtgctgaactggctgaaagaacacgcctgattactttgctccattccgtgctggctgcgcttgcggccagcatacctcacttctcgtgatcaagatcacattctcgctttcccctgcgacacgggtgtcgaatccattttttgctgaacgttaatgaccatcatttttgtaccgttcagaatccagtcaatacataacttattgaatatattgagttaatcagaatggcatcctttatgcaatatgaaatgcaatgtttcatatcattttcaaggagccgacatgaaccgctttgtggtggccgaaccactgtggtgtacaggatgtaatacctgtctcgctgcctgttcggacgtgcataaaacgcaaggtttacagcaacacccgcgcctggccctggcgaagacgtcaacaatcactgcccctgtcgtgtgtcatcactgtgaggaagccccttgcctgcaggtctgcccggtcaatgccatctctcagagggatgatgcgatccaactcaacgaaagcctctgtattggctgcaagctttgcgccgtggtctgcccatttggcgcaatcagcgcttcaggaagccgtccggtgaatgcccatgcgcaatatgtttttcaggctgaaggctcactcaaagacggcgaagaaaacgtgctgccccaacatgcgttgctgcgctgggaaccgggtgtccagaccgtcgcggtgaaatgcgacctgtgtgatttcttgccagaaggtccggcctgcgttcgcgcttgcccgaatcaggcgttacggctgatcaccgacgatagcctgcaacgtcagatgaaagaaaaacagcgccttgccgcaagctggtttgccaatggcggggaggatcccctttccctcactcaggagcaacactaatggatgccctgcaattattaacctggtcgctgatcctctatctgtttgccagtctggcttcgctgtttttactcggtctggacagactggctattaagctttccggcatcacatcgctggtgggcggcgtgattggcatcatcagcggaattacgcaattacatgctggtgtaactttagtcgcccattttgccaccccttttgactttgccgatttaaccctgcgaatggatagcctctcggcatttatggtgctggttatctccttgctggtggtggtttgttcgctctattcattgacttatatgcgcgaatacgagggcaaaggcgcggcggcgatgggcttctttatgaatcttttcatcgcatcgatggttgccctgctggtgatggacaacgctttttggttcatcgtgctgtttgaaatgatgtcgctgtcttcctggtttctggtcattgccaggcaggataaaacgtcgatcaacgctggcatgctctacttttttatcgcccacgccggatcggtgctgattatgatcgccttcttgctgatggggcgcgaaagcggcagcctcgattttgccagtttccgcacgctttcactttctccggggctggcgtcggcggtgttcctgctggcctttttcggttttggcgcgaaagccgggatgatgccgttgcacagctggttgccgcgcgctcaccctgccgcaccatcgcacgcttcggcgttgatgtctggcgtaatggtcaaaatcggtattttcggcatcctgaaagtagcgatggacctgctggcgcaaacgggtttgccgctgtggtggggcattctggtgatggcgatcggcgcaatctccgcgctcctgggcgtgctgtatgcgctggcggaacaggatatcaaacggctgctggcctggagtaccgtcgaaaacgtcggcattattttgctggcagtcggtgtggcgatggtcggtctgtcactgcacgacccgctgctcaccgtggttggactgctcggcgcactgtttcatctgctcaaccatgcgctgttcaaagggctgctatttctcggcgcgggcgcgattatttcgcgtttgcatacccacgacatggaaaaaatgggggcactggcgaaacggatgccgtggacagccgcagcatgcctgattggttgcctcgcgatatcagccattcctccgctgaatggttttatcagcgaatggtacacctggcagtcgctgttctcactaagtcgtgtggaagccgtagcgctacaacttgcgggtcctattgctatggtaatgctggcagtcactggtgggctggcagtaatgtgcttcgtaaaaatgtacggtattactttctgtggtgcgccgcgcagtacacacgctgaagaggcacaggaagtgccaaatacgatgatcgtcgccatgctactgctcgcggcactctgcgtattaattgcgcttagtgccagttggctggcaccgaagataatgcatattgcccatgcgtttaccaatacccctcccgtcactgtcgccagcggaatagcacttgtacccggcacgtttcatacacaggtcaccccctcattactgttgctgttactactggcgatgcctttgctgcctggcctttactggctgtggtgtcgttcgcgccgcgcagcgtttcgtcgcacaggagatgcctgggcatgcggctacggctgggaaaatgcgatggccccgtcaggcaatggcgtgatgcagccgctgcgtgtggtcttctctgcgttatttcgtctacgacaacagctcgaccctacgctgaggctaaataaaggttttgcgcacgtcaccgccagggctcagagcacagaacccttctgggatgagcgggtgatccgccccatcgtgagcgccacccaacggctggccaaagaaatacagcatctgcaaagcggcgactttcgtctctattgcctgtatgtggtcgccgcactggttgtgctgctaatcgctattgccgtctaaggaaatcaccatgagacaaactctttgcgacggatatctggttatttttgcgttagcacaggccgtgattctgctgatgctaaccccactttttacgggtatttcccggcagatacgcgcgcgtatgcactcccgccgcgggccggggatctggcaggattatcgcgatatccacaaaatgtttaaacgccaggaagttgcgccgacatcttcaggtctgatgttccgcctgatgccgtgggtattaatcagcagcatgctggtgctggcgatggccttaccactgtttattaccgtttccccttttgcgggcggcggcgatctgatcacccttatctatcttcttgccctgtttcgttttttctttgctctttccgggctggataccggaagtccgtttgcgggagtcggtgccagtcgcgagttgacgctcggcattctggtcgaaccaatgcttattctctcactgctggtattggcgctgatagcaggttccacgcatatcgagatgatcagcaatacgctggcgatgggctggaactcgccgctaaccaccgtactggcgttactggcctgtggttttgcctgcttcattgagatgggaaaaattccctttgatgttgctgaagcagaacaggaattacaggaaggcccgctgaccgaatattccggtgccgggctggcgctagcgaaatgggggctggggctgaaacaggtcgtgatggcatcactgtttgtagccctgtttctgtcctttgggcgcgcgtaagaactttctctcgcctgcctgctgacttcacttgtcgttacgctgctcaaggttttgctgatttttgtactggcctcaatcgcagaaaacacgctggcacgcgggcgttttttactcattcaccatgtgacctggcttggcttcagccttgctgcgcttgcatgggtcttctggttaaccggtctgtaaggagcactgacggaatatggaaaatcttgctctgacgacgttattgctgccttttatcggcgcactggtcgtttcgttttcgccacaacgtcgggccgccgaatggggggttttgttcgccgcgctgaccacgctgtgcatgttgtcactgatctccgcgttttatcaggccgataaagttgccgtcacgttgacattggtcaacgtgggggatgtggcattgtttggcctggtcattgatcgcgtgagtacgctgattctgtttgtggtggtgtttctcggtttgctggtcacgatctactccacgggttatctgacggataaaaatcgcgaacacccgcataacggcacgaatcgttattacgcatttttgctggtgtttatcggcgcgatggcgggactggtactctcctcgacgctgctcggtcagttgttgttttttgaaattagggcggctgctcctgggcgttgatcagttattaccagaacgataaagcgcagcgttcagcactaaaagcgttgcttatcacccatatcggttcgttggggttgtatcttgccgccgccacgctgtttttgcagaccggaacgtttgcgcttagcgcaatgagcgagttacacggcgacgcacgttatctggtttatggcgggatcctgtttgccgcgtgggggaaatcggcccagctaccgatgcaagcgtggctaccggatgcaatggaagcgccaacaccgatcagcgcctatctccacgccgcatcgatggtgaaagtgggcgtttacatttttgcccgcgcaattatcgacggcggcaatatcccgcatgtgattggcggcgttggcatggtcatggcactggtcaccattctttatggctttctgatgtatttgccacagcaggatatgaagcggttgctggcctggtcgaccatcactcaacttggctggatgttcttcggcttgtcgctctccatcttcggctcgcggctggcgctggagggtagcatcgcctacatcgtcaaccacgcgttcgctaaaagcctgtttttccttgtagcaggtgcgctgagttacagctgcggcacgcgcttgttgccgcgtctgcgtggcgtattgcacaccctgccgttgccaggcgtgggtttctgcgtggcagcgctggcgattaccggcgtgccgccgttcaacggcttcttcagtaaattcccgctgtttgctgccggttttgcgttgtcagtggagtactggatcctgctgcccgccatgattctgctgatgattgaatcggtcgccagtttcgcctggtttattcgctggtttggtcgcgttgtgcctggcaaaccgagcgaggccgtcgccgatgccgcaccgctgccagggtcaatgcgcctggtgttgattgtactgattgtgatgtcgctgatttccagcgtaatcgccgcgacctggttgcagtaaggagatgatgaatgaccggttctatgatcgtaaataatctggcgggactgatgatgctgacatcgctgtttgtgattagcgtcaaaagctatcgcctgtcatgcggattttacgcctgccagtcgctggtgctggtgtctattttcgccactctctcgtgcctgttcgccgcagagcaactgctgatctggtccgccagcgcctttatcaccaaagtgctgctggtaccgttaatcatgacttacgctgcacgaaatattccccagaacatcccggaaaaagcgttattcggtccggcaatgatggcactgctcgcggcgttaattgtcctgctttgcgcatttgtcgttcagcccgtgaagctaccgatggctaccgggctgaaaccggcgctggcggtagcgttaggtcattttctgcttggcctgctgtgcattgtcagccagcgcaatatcctgcggcaaatttttggttactgcctgatggaaaacggctcccatctggtgctggcgcttcttgcctggcgagcaccggaactggtggaaataggtatcgctaccgacgccatcttcgccgtcattgtgatggtgttactggcaagaaaaatatggcgtacccacggcacgctggacgtgaacaacttgaccgcgctgaagggataatgagatgagttattctgtgatgttcgctttactcctgctcacgccgctgcttttttcgctgctctgttttgcctgccggaaacgggggctctctgcgacttgtacggtgactgtattacatagcttagggatcacactgctgctgattctggcactctgggtggtccaaactgccgctgatgcaggagaaatattcgctgcgggactgtggcttcatattgatggtctgggcggtttgttcctcgccattcttggtgtgattggctttctcaccggtgtttactcgattggctacatgcgtcatgaagtggcacacggcgagctttcccccgttacgctgtgcgattactacggtttcttccatctgtttttgtttaccatgctgctggttgttaccagcaataacctgattgtgatgtgggcggcgatcgaagccaccaccttaagctcggcgtttctggtaggcatttacggtcagcgttcatcgctggaagcagcatggaagtacatcattatttgtactgttggtgtcgcttttggtctgttcggtaccgtgctggtatacgccaacgtcgccagcgttatgccgcaggcagaaatggcgatattctggagcgaggttcttaagcaatcgtccttgcttgacccaacattaatgctgttggcctttgtgtttgtgctaattggctttggcaccaaaaccgggctatttcccatgcacgcctggctgccggatgctcacagtgaagcaccgagtccggtcagcgccctgctctccgccgtattgctgaactgcgcgctgttggtgctaattcgctattacatcattatctgccaggccatcggcagcgatttccccaaccggttgttgctcatcttcggcatgttgtcggttgccgtggcggcatttttcattctggtacagcgggacattaagcgtctgctggcgtactccagcgtggagaacatggggctggtcgcggtggcgctaggcattggcgggccgctgggaatttttgccgcgctgctgcacaccttaaaccacagtctggcaaaaacgctgctgttctgcggttccggcaatgtactgctcaagtacggcacgcgcgatctcaacgtcgtctgtgggatgctcaaaatcatgccatttaccgccgtgctgtttggcggcggtgcgctggcgctggcagggatgccgcccttcaacatttttcttagcgaatttatgaccgttaccgcaggactggcacgtaatcacctgctgattatcgtcctgctgttattgctgttaacgctggtgctggcgggcctggtacggatggctgcgcgggtgttaatggcgaaaccgccgcaggccgttaaccggggtgatctcggctggttgaccacctcgccaatggtgattctgctggtcatgatgctggcgatgggaacgcatattccacaacctgtcatcaggatcctggcgggcgcttccactatagtcctctcagggacgcacgacctgcctgcacaacgtagcacctggcatgatttttgccttcaggcaccgcatctgtttcggagaaacacagtgaacgttaattcatcgtcaaatcgtggcgaagcgattctcgccgccctgaaaacgcagttccccggcgcggtgctggatgaagagcgacaaacgcctgaacaggtcaccattacggtgaaaatcaatctgctgcctgacgttgtacattatctttattatcaacatgatggctggcttccagtcctgtttggcaacgacgagcggacacttaacggtcattacgcggtttattatgccctttcaatggaaggggccgaaaaatgctggatcgtggtgaaggcactggtcgatgccgacagtcgggagtttccgtcagtcacaccgcgcgtccctgccgcggtctggggcgagcgagaaattcgcgatatgtacgggctgattccggttggcctgccggatcagcgtcgcctggtgttgcccgatgactggccggaagatatgcatccgctgcgcaaagatgcgatggattatcgactgcgccctgaaccgacgacagattccgaaacgtatgcgtttatcaatgagggcaacagcgatgcgcgggtgatccctgtcggcccgctgcatatcacctccgatgaaccgggtcacttccgcttgtttgtggatggcgagcaaattgtcgatgctgattaccgcctgttttatgtccatcgcggcatggagaaactggcagaaacgcggatgggctacaacgaagtgaccttcttatcggaccgcgtgtgtgggatttgcggttttgcccacagtgtggcctataccaactcggttgaaaatgcactggggattgaggtgtcgcaacgagcgcataccattcgctcgattctgctggaagtcgaacggctacacagtcatttgctcaaccttggcctctcctgccattttgttggttttgataccggctttatgcaatttttccgcgtgcgggaaaagtcgatgacgatggcggaattgctgaccgggtcgcgtaaaacctacggtctgaatctgattggtggtgttcgccgcgatattctcaaagagcaacgtctgcaaacgctgaaactggtgcgcgagatgcgcgccgacgtgtcggagctggtagagatgctgcttgctatgccgaatatggaacaacgcactcagggcattggcattctcgaccgacaaatcgcccgtgattatagccctgtagggccgctgatccgcggcagtggttttgcccgtgatttgcgctttgatcacccctacgccgactacggcaatattccaaaaacactgtttaccttcaccggcggcgatgttttctcccgcgtgatggtccgtgtcaaagagacgtttgattcgctggcaatgctggaatttgccctcgacaacatgccggataccccgctgctgaccgaaggctttagctataaacctcacgcattcgcgctgggctttgttgaagcgccacgcggtgaagacgtgcactggagcatgctcggtgataaccaaaaattgttccgctggcgctgtcgtgccgccacctacgccaactggccggtgttgcgttacatgctgcgcggcaataccgtttctgacgcaccgctgattatcggtagccttgatccctgctactcctgtaccgaccgtgtgacgctggtagatgtgcgcaagcgccagtcaaaaaccgtgccgtataaagagatcgaacgctacggcattgatcgtaaccgttcgccgctgaagtaaggacagaagatgctgaagttactgaaaactattatgcgcgccggaaccgcgacggtgaaatatcccttcgcgccactggaggtcagcccaggctttcgcgggaaaccggacctgatgcccagccaatgtattgcctgcggcgcctgtgcttgtccggcaaatgcgctgactatccagaccgacgaccagcaaaattcgcgcacctggcagctctatctgaggcgttgtatttactgcggacgttgtgaagaagtgtgcccgaccagagccatccagcttaccaataactttgaactgaccgtcaccaataaagccgatctctatacccgcgcgacgttccatctacaacgttgcagccgttgcgaacgcccgtttgccccgcaaaaaaccgtcgcactggctgctgaattgttggcacagcaacaaaatgcgccacaaaaccgcgaaatgttgcgggcgcaagcgagcgtctgcccggagtgcaaacaacgcgcgacgctgatcaacgacgatacagatgtaccgctggtggctaaggagcagctatgagtccagtgcttacgcaatatgtcagccagcccatcacgctggacgagcaaacgcaaaagatgaagcagcatttgctacaggatatccgtcgctcggcttacgtttatcgcgtcgattgcggcggctgcaacgcctgtgaaatcgaaatttttgctgccatcacaccagtattcgacgcagaacgttttggcattaaggttgtttcatcaccgcgtcacgccgatattttgttatttactggcgcagtcacccgggcgatgcgtatgcctgcacttcgggcgtatgagtctgcccccgatcataaaatctgtgtttcctacggcgcgtgcggtgtcggtggcggtattttccacgatctctacagcgtctggggcggcagcgacaccattgtccccattgatgtttggatccccggctgcccgccaacaccggccgccaccattcacggtttcgccgtggcgctcggtttgctgcaacagaagattcacgctgtggattatcgcgatcccaccggggtgactatgcaaccgttgtggccacagatcccgccatcacagcgtatcgccattgagcgagaagcgcggcggctggcgggctatcgtcaggggcgagaaatttgcgatcggctcctgcgccatttaagcgacgatcctacaggaaatcgggttaacacctggttgcgcgaagccgacgatccgcgtctcaatagtatcgttcagcaactctttcgcgttctccgggggttacatggctgaggagtgcggggaaattgttttctggacgctgcgaaaaaagtttgtcgccagtagcgacgagatgccggaacacagctctcaggtaatgtattactcgctggctatcggtcatcacgttggcgtgattgattgtctgaatgtcgccttccgctgcccactgacggaatacgaagattggcttgcacaggtcgaagaggagcaagcccgacgtaagatgctgggggtgatgacctttggtgagattgttattgacgccagccacaccgccctgttgacccgggcattcgcgctactggcagatgacgcgacgtctgtgtggcaggcgcgtagcattcaattcattcatctgttggatgaaattgtgcaggaaccggccatctatctgatggccagaaaaattgcgtgagaaggatttctcattaataaggactgttgatggctatgtcagacgaggcgatgtttgccccgccacaaggaataacaattgaagcggtaaacggaatgctcgcggagcggttagcacagaaacacggcaaggcgtctttattacgcgccttcatcccgctgccgccgccgttcagcccggtacaacttattgaactgcatgttctcaaaagcaacttctattaccgctaccatgatgatggcagcgatgtgacggcaacagtagagtatcagggcgagatggtcgattattcgcgtcacgccgtccttctcggcagtagtggaatggcggagctacgctttattcgtacccacggcagccgttttactccccaggattgcacactgtttaactggctggcacgcattatcaccccggttctgcaatcatggctcaatgatgaagaacaacaggtggcgctgcgtttgctggagaaagatcgcgatcatcatcgggtactggtggatatcactaatgcagtgctgtcacatcttgatctcgacgatctgatcgctgacgtcgctcgtgagatccatcattttttcggtctggcttcagtcagtatggtactgggcgatcatcgaaagaacgagaagttcagcctgtggtgcagcgatctttctgcctcacattgtgcgtgtctgccacgcaatatgcctggcgacagtgtattgctgacacaaacgctacaaacccgacaaccgaccttgacgcaccgtgcagacgatctgtttctctggcaacgcgacccgttattactcttacttgcatctaacggctgcgaatctgcgctcctgataccgcttacctttggcaaccatacaccgggtgcattgttactggcgcatacctcttccactctctttagtgaggaaaactgccagctactacaacacatagccgatcgcatcgctattgccgttggcaatgccgatgcctggcgtagcatgaccgatttgcaggaaagtttgcagcaagaaaaccaccagcttagcgagcagctcctttcgaatctgggcgtcggtgacattatctatcaaagccaggcaatggaagacctgctccagcaggtagatattgtggcgaagagcgacagtacggtgttgatttgcggtgaaaccggaactggcaaagaggtgatcgccagagcgatccatcaacttagcccgcgacgcgacaagccgctggtcaaaatcaactgcgctgccatccccgccagtcttctggaaagtgagttattcggtcatgacaaaggggcgtttactggtgcgattaatacccatcgtggtcgttttgaaattgccgatggcggtacgttgtttctcgatgaaattggcgatctgccgttagaacttcagcctaaattgctgcgcgtattgcaggagcgggagattgagcgtctcggcgggagtagaacgatcccggtgaatgtcagagtcattgccgccaccaaccgtgatttgtggcaaatggttgaagatcgccagtttcgcagcgatctcttttatcgcctgaatgtcttcccactggaattgccgccgctacgcgatcgtccggaagatatccctcttttagcaaagcatttcacgcaaaaaatggcgcgccatatgaatcgcgcaattgacgcaatcccgaccgaggcgctacgccagttgatgtcgtgggattggccgggcaacgtgcgcgagctggaaaacgtgattgagcgggcggtactgttgactcgtggtaacaatctgaatttacatctaaatgtccgacaaagccgtttactgccgacgctaaatgaagattcagcgcttcgcagttcaatggcgcagttgctgcacccgacgacgccagagaatgacgaagaagaacgtcagcgcattgttcaggtattgcgagaaaccaatggcattgttgccgggccccgtggcgcggcgacacgattagggatgaagcgcaccacgctgctgtcacgaatgcagcgtctggggatctcggttcgcgaggtgttgtaatctgcttttgcaggagtatgcatgagaaacaaactctctttcgacttgcagttgagcgccagaaaagcggcaatcgctgaacggattgcctcccataaaattgcccgcagtaaagtgtcggtctttttaatggcgatgtccgctggcgtgtttatggcgatcggatttactttttacctttccgttatcgccgatgccccgtcttcacaggcattaacccatctggtgggcggcctttgctttacactcggctttattttgctggcggtttgtggcaccagcctgttcacctcgtcggtaatgacggtgatggcaaaaagtcggggcgttattagttggcgaacttggctgattaacgcacttctggtggcctgcggtaatctggcaggtattgcctgtttcagtttgttaatctggttttccgggctggtgatgagtgaaaacgcgatgtggggagtcgcggttttacactgcgccgagggcaaaatgcatcatacatttactgaatctgtcagcctcggcattatgtgcaatctgatggtttgcctggcgctgtggatgagttattgcgggcgttcattatgcgacaaaatcgtcgctatgattttgcccatcaccctgtttgtcgccagtggctttgagcactgtatcgccaatttgtttgtgattccgttcgccattgccattcgccattttgccccacgccccttcggcaactggcgcacagtagcgcagacaattttccggcactgacggtcagccattttattaccgccaatctgctcccggtgatgctgggtaatattatcggcggtgcagtgctggtgagtatttgttatcgggatatttatttacgtcaggaatcctgaaaaatcagcccggcgaaacagttcgtcgggctgaagattattcttgcgcgatttgcccatcgggccaggcgtggatcacggctttgatcagcgtcgccaatggaatggcgaagaatacgccccagaatccccacaaaccaccgaagatcactactgataaaataatcaccagcggatgcaggttaaccgcttcggagaacaacaccggtactaacaggttgccgtccagcgcctgaataatcagatacaccgcgaagcagctccagaattcagtacctgcgccaaactggaatagcgccacgccaaccaccggaatggtcaccacaaatgcgccaatgtacggaataagaaccgagaagccgaccagcaccgccagcagcagcgaatagttcagcccgaagagcaagaaccccagccaggtggcgatccctactacgatcatctccagcactttgccgcggatatagttggtgatttgttgattcatctccttccacacctgtcctgccagtccacggttacgcggcagcacccggcgaacggcgttcagcatctgctctttgtctttcagcaggaagaagaccatcaatggcaccagcaccagatagacggctatggtcagcaaaccgaccagcgaggcgagggaaattttcaccaccgaatcgcccatagtcagcatccgactgcgcatattttcggccattgcatcaataatgcccgcatccattaacgccggatagcggcgcggcaacgtggcggcaaagtcagaaagcttattgagcatccccggcatatcgcggattaagtagatgccctgttgccaggcgataggcagtaccacgaacgccatcagtagcaatataccgacgaaaaccaccaatacaatcgacgtcgcccagcggcgggagcagccaatagattgcaggcgcacggttggccattccagcaaataggccagcacaatagccaccagcaacggagcaagcaggccactaaagaaaaagataatgccaaatccggcaactaaaataaccagcaaggcaatcgcttccgggtcgctaaaacggcggcgataccattgcatcaacatttcgagcataaagaccttccctgaacctcaagagcgggattgcgatccgcaattgtatcgaaatgtcacaaaaaagacttcgctttttatgacggattcaggaaactgaaaagtcatttgagtgggctaatcttcgccgttacactcaaaggcggcgcggtgggaacgatatttcacagtatcggtcaaatgactatcttcagaaatacaggatagaggttatgttcaggcagttgaaaaaaaacctggttgcaaccctcattgctgcaatgaccattggtcaggtagccccggcgtttgccgacagcgcagacaccttgccggatatgggaacctccgcaggaagcacgctttccattggtcaggaaatgcagatgggcgactattatgtccgccagctacgcggcagcgcgccgttaattaatgacccgctgttaacgcaatatattaattcgctggggatgcgtctggtttcgcatgccaattcggttaagacaccgtttcatttttttctgatcaacaacgacgaaattaacgcctttgctttctttggcggcaacgtggtgctgcactctgccctgttccgttattccgataacgaaagtcaactggcttcagttatggcgcacgaaatctcccacgtcacccaacgtcacctggcgcgagcgatggaagatcagcagcgcagcgcgccgctgacctgggtcggcgcgttaggttctattttactggcgatggccagtccgcaggcggggatggcggcgctgaccggtacactggcgggaacgcgtcaggggatgatcagtttcacccagcaaaatgaacaggaagcggaccgcattggtattcaggtgctgcaacgctcgggattcgatccgcaggcgatgccaaccttcctcgaaaaattactcgatcaggcgcgttactcctcgcgcccgccggaaattttattgactcacccgttgccggaaagtcgtctggcagatgcccgcaaccgtgctaatcagatgcgcccgatggtggtgcagtcgtcggaagatttctatctggcgaaagcgcgcacactggggatgtataattccggacgtaaccagctcaccagtgatttgctggatgaatgggcgaaaggaaacgttcgtcagcaacgagcagcgcaatatggtcgtgctttacaggcgatggaagccaataaatacgacgaggcgcgtaaaacgctgcaaccgttactggcggcagaacctggcaacgcatggtatctcgatctggctactgatatcgatcttgggcaaaacaaagccaatgaagcgatcaatcgcctgaaaaatgcccgcgatttacgcaccaatccggtgttgcagctcaacctggcgaacgcttatctgcaaggcggtcaaccacaagaagcggccaatattctgaatcgctacacctttaataataaagatgacagcaacggctgggatttgctggcacaggcggaagccgcgctaaataaccgtgatcaggagctggctgcgcgagcagaaggttatgcgctcgccggacgactcgatcaggccatttcgctgttgagtagcgccagttcgcaggtgaaattaggcagcctgcaacaagcgcgttacgatgcgcgcatcgaccagttgcgccagctgcaggaacgctttaagccttataccaagatgtaattcgcattaaaggaagaacaatgaccaaacaggtaaaaatctaccataacccacgctgttcaaagagccgggaaacgctgaacctgctgaaagaaaacggcgtggagccagaagtggtgctctaccttgagacacccgccgatgcggcaacgctgcgcgatttgctgaaaatgctggggatgaatagcgcccgtgaattgatgcgccagaaagaggatctttataaagaactgaacctggctgacagttcgcttagcgaagaggcgctgattcaggcaatggtggataatccgaagctaatggagcgcccgattgtggtcgcgaatggcaaagcgcggattggtcgtccaccggagcaggtactggaaatcgtgggttaagatgtgctccatcgctagttgaagcacattgccggatgcgacgcttgccacgtcttatccggcctacgaatactatggattaacttcgcgtagttcggataaggcgttcgcgccgcatccgacaataaacaccttatctacaacttcagaatttctttcacaaacggaatggtcagcttacgttgcgcggtaatcgacgcacgatccaactgatccaacgtcataaatagcgtgcgcatttctctgtcgagccgcttcagcaagaaacgccccacatcttccggcagttcaaaaccacgcaaacgcgcgcgtaactgtagcgcctgcaacttatcttcatcagaaagtggctgcaatttgtagatctgcccccagtcgagtcgcgacgcgagatccggtaatcccagattcaactgccgcggtggacgatcgccggtgatcaacaatcgtgttttgcccgattccagaattcgattgtagagatcgaaaatcgccatctcccacaactcatcgcctgcaatacactcaatgttgtcgatacagaccagcgacaaatgctccataccgtcgagcacttccggaacaaaccaggtgcgtttatccagcgggacatagcccaccgcatcgccacgctgcgacaattccgcgcaagccgcgtgcagcagatggctgcgccccgcgccttcgcgtgcccagagatagatgtaaccgctatgttcctgacgcagcacgttttgcagcgcagccagtaaagaggagttatcccccggccagaaacttgcaaaggtttcgtcgtcaggaagataaagtggcaaagagagctgtgccggtgtgttcagagatacctcaaccaggatttcacaaaatcgcgagaagtttaccacagaatcccatgatgtttgaaccgggcagcaacactgcccggtcggtacattatttgtctgttatatccgcgtcttctgcgtccagcaccacttcttcagggcgcagcacactaatcagtttgaagatcaaacttaagccgataccgacgatggtcgccagcgccataccttttaactccgccgcgccgatgtttaccttcgcgccactgacgccgatgatcaaaatcacggaagtcaggatcaggttctgtgctttgttgtaatccactttcgattcgatcaaaacacgaataccggaagcaccgatgacaccataaagcagcagcgaaacgccgcccatcaccggcaatgggatcatctggatagcggcagccagtttaccgacacaggaaagcaggatagcgaaaatcgccgccccaccgataacccaggtactgtaaacacgggtgatcgccatcacgccaatgttttctccgtaagtggtatttggcgtagagccaaagaagccggagatcacggtcgacaggccgttagcaaacatcgaacggtgcagacctggatcgcgcagcagatcttttttgacgatattagccgttactaccaggtgccctacgtgttcggcaataaccactaacgccgctggcagaatagtcagaatggcaaaccactcgaagcgcggcgtatagagggttggcagcgcaaaccagtgagcattaataatcggcgtggtatcgacaattcccattgcgaaagagagcgcgtagcccaccagcacgccaattaaaatcgggataattgccaggaaaccacgaaacagcacggaacctaaaaccgtgaccgccagggtggtaatagagatgatgatggttttggagtctggcgtttgcccttcagccgggagtaaacccgccataccggcagctacgcccgccagctccagaccgatgacggcaacgattgcgcccattgccgcaggtggaaacagcacgtccagccagccggtccccgctttcttcacgataaaagaaaccaggcagaacagcacgccgcacataataaagccgcccagcgcgacttcataccctaacggcaacagtaacaataccggtgaaataaaggcaaagctggaaccaagataagccggaattttccctttacagatgaagagatacagcagagttccaataccgttaaataacagtacagtcgccgggttaatatgaaataagacgggcaccaggacggttgcaccaaacatggcgaacaaatgttgcaaactaagcgggattgtctgtaaaagtggcggtctttcactcaccccgatagcacggcgcgtcatagtattatcctctgtattatgtgttataggcgctttactcaaaaaaagccgactcttaaagtcggctttaattatttttattctttatttcgtaccaaagattttgtcaccggcatcgccgaggcccggaataatgtatccgtgctcgttcagtccctggtcaatcgatgcggtatacagttcgacgtccgggtgcgctttttccagcgcagcgataccttctggcgcagctaccagcaccagaactttgatgctgctgcagcccgcttttttcagcaggtcgatggtcgcgataacggaaccaccagttgccagcattgggtcaacgatcagcgccatacgctcatcgatgttagaaaccagtttctggaagtacggtaccggctccagcgtttcttcattacggtacataccgacaacgctgatgcgcgcgctcggaacattttccagcacaccgtccatcatccccagaccggcacgcagaattggcacaacggtaattttcttacctttgatctggtcgatttctaccgggccgttccagccttcgatagttactttttccgtttcgaggtcggcggtcgcttcgtaagtcagcaggctacccacttcggaagcgagttcgcgaaagcgcttggtgctgatatcttgctcacgcatcagtcccagcttgtgtttgacgagtgggtgtttgacttccacgatcttcatactctttctcctttgaggggcagccacaaaaaaaatcgacggattatacctcctttcttcaaggcggcaatattcttttcgttgactttagtcaaaatgataacggtttgagataaagttattttatattcaaatggttatgaaagaagattattccatccgaaaactaacctttgccctggcacaagtcttctttcgccgcgcgtctggggaaaagacgtgcaaaaaggttgtgtaaagcagtctcgcaaacgtttgctttccctgttagaattgcgccgaattttatttttctaccgcaagtaacgcgtggggacccaagcagtgaccgataaaacctctcttagctacaaagatgccggtgttgatattgacgcgggtaatgctctggttggaagaatcaaaggcgtagtgaagaaaacgcgtcgtccggaagtgatgggcggtctgggcggcttcggtgcgctgtgtgcattgccgcaaaaatatcgtgaacccgtgctggtttccggcactgacggcgtaggtaccaagctgcgtctggcaatggacttaaaacgtcacgacaccattggtattgatctggtcgccatgtgcgttaatgacctggtggtgcaaggtgcagaaccgctgtttttcctcgactattacgcaaccggaaaactggatgttgataccgcttcagcggtgatcagcggcattgcggaaggatgtctgcaatcgggctgttcactggtgggtggcgaaacggcagaaatgccggggatgtatcacggtgaagattacgatgtcgcgggtttctgcgttggcgtggtagaaaaatcagaaatcatcgacggctctaaagtcagcgacggcgatgtgctgattgcactcggttccagcggtccgcactcgaacggctattcgctggtgcgcaaaattcttgaagtcagcggttgtgatccgcaaaccaccgaacttgatggtaagccattagccgatcatctgctggcaccgacccgcatttacgtgaagtcagtgctggagttgattgaaaaggtcgatgtgcatgccattgcgcacctgaccggcggcggcttctgggaaaacattccgcgcgtattgccagataatacccaggcagtgattgatgaatcttcctggcagtggccggaagtgttcaactggctgcaaacggcaggtaacgttgagcgccatgaaatgtatcgcaccttcaactgcggcgtcgggatgattattgccctgcctgctccggaagtggacaaagccctcgccctactcaatgccaacggtgaaaacgcgtggaaaatcggtatcatcaaagcctctgattccgaacaacgcgtggttatcgaataatgaatattgtggtgcttatttccggcaacggaagtaatttacaggcaattattgacgcctgtaaaaccaacaaaattaaaggcaccgtacgggcagttttcagcaataaggccgacgcgttcggccttgaacgcgcccgccaggcgggtattgcaacgcatacgctcatcgccagcgcgtttgacagtcgtgaggcctatgaccgggagttgattcatgaaatcgacatgtacgcacccgatgtggtcgtgctggctggttttatgcgcattctcagcccggcgtttgtctcccactatgccgggcgtttgctgaacattcacccttctctgctgccgaaatatcccggattacacacccatcgtcaggcgctggaaaatggtgatgaagagcacggtacatcggtgcatttcgtcaccgatgaactggacggtggcccggttattttacaggcgaaagtcccggtatttgctggtgatacggaagatgacatcaccgcccgcgtgcaaacccaggaacacgctatttatccactggtgattagctggtttgccgatggtcgtctgaaaatgcacgaaaacgccgcgtggctggatggtcaacgtctgccgccgcagggctacgctgccgacgagtaatgccccgtagttaaagcgccagctctgccgctggcgtttttcaattcacctgtaaatcgcaagctccagcagtttttttcccccttttctggcatagttggacatctgccaatattgctcgccataatatccaggcagtgtcccgtgaataaaacggagtaaaagtggtaatgggtcaggaaaagctatacatcgaaaaagagctcagttggttatcgttcaatgaacgcgtgcttcaggaagcggcggacaaatctaacccgctgattgaaaggatgcgtttcctggggatctattccaataaccttgatgagttctataaagtccgcttcgctgaactgaagcgacgcatcattattagcgaagaacaaggctccaactctcattcccgccatttactgggcaaaattcagtcccgggtgctgaaagccgatcaggaattcgacggcctctacaacgagctgctgctggagatggcgcgtaaccagatcttcctgattaatgaacgccagctctccgtcaatcaacaaaactggctgcgtcattattttaagcagtatctgcgtcagcacattacgccgattttaatcaatcctgacactgacttagtgcagttcctgaaagatgattacacctatctggcggtggaaattatccgtggcgataccatccgttacgcgctgctggagatcccatcagataaagtgccgcgctttgtgaatttaccgccagaagcgccgcgtcgacgcaagccgatgattcttctggataacattctgcgttactgccttgatgatattttcaaaggcttctttgattatgacgcgctgaatgcctattcaatgaagatgacccgcgatgccgaatacgatttagtgcatgagatggaagccagcctgatggagttgatgtcttccagtctcaagcagcgtttaactgctgagccggtgcgttttgtttatcagcgcgatatgcccaatgcgctggttgaagtgttacgcgaaaaactgactatttcccgctacgactccatcgtccccggcggtcgttatcataattttaaagactttattaatttccccaatgtcggcaaagccaatctggtgaacaaaccactgccgcgtttacgccatatttggtttgataaagcccagttccgcaatggttttgatgccattcgcgaacgcgatgtgttgctctattatccttatcacacctttgagcatgtgctggaactgctgcgtcaggcttcgttcgacccgagcgtactggcgattaaaattaacatttaccgcgtggcgaaagattcacgcatcatcgactcgatgatccacgccgcacataacggtaagaaagtcaccgtggtggttgagttacaggcgcgtttcgacgaagaagctaacattcactgggcgaagcgcctgaccgaagcaggcgtgcacgttatcttctctgcgccggggctgaaaattcacgccaaactgttcctgatttcacgaaaagaaaacggtgaagtggtgcgttacgcacacatcgggaccgggaactttaacgaaaaaaccgcgcgtctttatactgactattcattgctgaccgccgatgcgcgtatcaccaacgaagtacggcgggtatttaactttattgaaaacccataccgcccggtgacatttgattatttaatggtgtcaccgcaaaactctcgccgtctgttatatgaaatggtagaccgcgaaatcgccaacgcgcagcaagggctgcccagcggtatcaccctgaagctaaataaccttgtcgataaaggcctggttgatcgtctgtatgcggcctccagctccggcgtaccggttaatctgctggttcgcggaatgtgttcgctgatccccaatctggaaggcattagcgacaacattcgtgccatcagtattgttgaccgttaccttgaacatgaccgggtttatatttttgaaaatggcggcgataaaaaggtctacctttcttccgccgactggatgacgcgcaatattgattatcgtattgaagtggcgacgccgctgctcgatccgcgcctgaagcagcgggtgctggacatcatcgacatattgttcagcgatacggtcaaagctcgttatatcgataaagaactcagtaatcgctacgttccccgcggcaatcgccgcaaagtacgggcgcagttggcgatttatgactacatcaaatcactcgaacaacctgaataaccctatgccaatacacgataaatcccctcgtccgcaggagtttgctgcggtcgatcttggttcaaacagttttcacatggtcatagcccgtgtggtagatggtgccatgcagattattggccgcctgaaacagcgggtgcatctggcggacggcctggggccagataatatgttgagtgaagaggcaatgacgcgcggtttgaactgtctgtcgctttttgccgaacggctacaagggttttctcctgccagcgtctgtatagttggtacccatacgctgcgtcaggcgctgaacgccactgactttctgaaacgcgcggaaaaggtcattccctacccgattgaaattatttccggtaatgaagaagcccgtctgatttttatgggagtggaacatacccaaccggaaaaaggtcgcaaactggttattgatattggcggcggatctacggaactggtgattggtgaaaatttcgaacctattctcgttgaaagccgccggatgggttgtgtcagctttgcccagctttatttccctggcggggtcatcaataaagagaatttccagcgcgctcgcatggcagcagcacaaaaactggaaactttaacctggcaattccgtattcagggctggaacgtggcaatgggcgcttccggtaccataaaagccgcccatgaagtattaatggaaatgggcgagaaagacgggataattaccccggaacgtctggaaaaactggtaaaagaagttttacgtcaccgtaatttcgcatcgctgagtttaccgggtctttccgaagagcggaaaacagtcttcgttcctggactggcgattttatgcggtgtgtttgatgctttagccatccgtgaactgcgcctttctgacggggctttacgtgaaggcgtactgtatgaaatggaaggacgtttccgtcatcaggatgtgcgtagtcgtaccgccagcagcctcgccaaccagtatcacatcgacagcgaacaggcccgacgagtgctggataccactatgcaaatgtacgaacagtggcgggaacagcaaccgaagctggcgcatccgcaactggaggcgctactgcgatgggccgccatgctgcatgaggtcgggttgaatatcaaccacagcggtttgcatcgccactccgcttatattctgcaaaacagtgacttgccgggttttaatcaggaacagcagctgatgatggcgacactggtgcgctatcaccgtaaagcgattaagctcgacgatctgccgcgctttaccttgtttaagaagaaacagttcctgccactgatacagctattgcgccttggcgtattactaaacaatcaacgtcaggcaaccaccacaccgccaacattgacactgattactgatgacagtcactggacactgcgtttcccgcatgactggtttagtcagaatgcgctggtactgcttgatctggaaaaggagcaagaatactgggaaggcgtggctggctggcggttgaaaattgaagaagaaagtacacctgaaatcgccgcttaatgctttgcgggccgacgagaaatgtcggcccgcattattcaggcactttcgcgaatgggttcgatttcattcagcgtatcaattaacggttgcggcttaccaataagataaccctgcatataatcgatccccaaagagagcaccgcctcgcggatctcttcgttttcaacgtactctgccactacccgcattttcttcattcgcgccaggtggcaaatcgatgccactatctgataatccagactatttgacacaatattgcggataaaactgccgtcaattttaagcagatcggcattcacatttttaagccgcgcatagctggcgtagccggtgccgaaatcatcaatcgcaatctggcagcctaattcctgaagatgctgcaaggtgatttgcgcctgcttaacattggtcagagcattactttcggtgacttcaaaaataagttgccacgcttcaatctgatatttagccagcaactgactgacttcaacaggaaaacgagcctgacataccgaggttggagacagattaatagcaaaacggtgagcgggcatcttcgctctgttttcagccataaattgcagcgtatgctcaatgacccacatgtcgatactcgacgataaaccaaattcgtgcgcgaccggcaagaagctatcggggctgatcagttcatcattctcacctttcatgcgcagaagaatttcatggtaaacatcaccacgcataccggtaatcggctgggccatcaggaaaaaatggttgtgttccagcgcctgctgtagtcgattcatcatcgcgactttatctttcaattcgcgttgcaaatacattgccccgcgacgctgcatattttccggggcgttggtcacgatggaaagttcggcgaccgtatttagctctcccagcagcaggtagatatgattcactggcgagcgcacatagcagtaactgacgccaatctgcggttgcatcggcatgccatcccaaaagaaacgaaattgcttgagatggctatccagtgcggtaatgcgctcctggtgcgattctgtattcagccgcagcgcgagatcgttacccgaaagctgataaacatcttcacccggttccagcaagggtgacagccagtgagaaagtttttgcttgtattgaatccgcagcatgatgccatagttcttaaccagcatttccatgccagggatgcgtaaataacaaagcgcagaccagggggcatcacgcaacgcgcgattcagggcgcgaacatttggcagatgaaccaccgggtccacatacgcaagccgctgaatgcgtctgactaccgctcgctgacgagttgccagtacagccatataattgacaataaaagagaataccagataactggaggaggttatggtcagctgcgtggtatagccaggataaatgggaatgtaattttgatagctgtggatgctgatcatcaacacgaccgcccagagcagcgaaatcagcttataaccatagcgcatcgctccccacatcatcaggggcagcaataatgacaaggtataattggtgctaaaaattgtgcttttttcatttaacggcatgcataacagcaacaataaagcacctaatgccagtagccagagcgcgaactctttttggtgactttggcatcaacctgctgttttaattgcgaataatagctacgtaaataaaatggatttcgcactacccgaatgatgaagtagcacagcgggacaccgatcagattacccaccagtaaggcctgataattgattaaagtcccgaggttaaaaggcatgacaccgaccagattttctctgctcgccagcaatcctacaaatgcagcaaactggaaaagtatcagaaacagcgttgcaggaaacactatctgccagaatatacgctgggaaattaaacgggtatcaccatgtgaaacgttgttacgccggggagtaaagaccctgtaaccgccccaacagagaatgataatgataataaaattagccgttaatgagagcgtttcgtaaaaacccagctctgcatatttgcggacaaaaatccctaaggtgatccctggcaatgccgcccagctgaaaaacatcatcatgctgatcatcagtgccaaaggcagataaaagagaaaaacctcaccggaagaaatatgcgcgaaagtattaatgtgggcgaaaatgggcaagattaaagaaggcaggaacagcggaagcccccaccatttatcacgtatttttatataagttgcattcagtttcatagatgctcagcagaatcccccacatcctgaaggaggtgtattcagacaggcatcccacctgacttcgaatgatgattattcatcactatagagagcattgattctaagtgtcatatgaaagttccaattgatatatatcaaacaaaataaccctgattaatgaattattacgtttatcatgttaattcatcattattacatcatcattgtaaataattaaattaacttccataacattaaaatatgtatccactgacgcttttttacataacgaagaattgaccattttgtcctgttgtgccttaatgtaagtaccgtccacagcgtgggacatacttcaaggaaccttttgtgagtcaggcaaccagtatgcgaaaacgacaccgatttaacagtcgcatgacccgtatcgtactgctcatcagctttatcttcttctttggccgttttatctactcgtccgtcggtgcctggcagcaccatcagagcaaaaaagaagctcagcaatccacactctccgtcgaatcaccggtacaacgttagcggttaccttctccactttcacagaacctaacggcacttcgctgtcggatgcttttgctctttggaattatcaaagcggcagatattctttcatcttaaattttacgtctttgtcctgactgatgtttatcctgtttggctgcgaaataaatataaaattaatatatatgttgtaatgatatatttttataaattatnnnnnnngtgaattttaataaatttaatctatccctttatacgcaatacatttactttcctcttttgatgatcttaaatgtcttatttttcgtaatgtgtataacaaggaatagtgatgaaatttaaaaaatgtcttctgcctgtggcaatgttagcgtcattcactctggcaggatgccagtcaaatgctgacgatcatgctgccgatgtttatcaaaccgatcaactgaataccaaacaagaaactaaaaccgttaatattatttccattcttcccgcaaaagttgccgtagacaactcccaaaataaacggaacgcacaagccttcggcgcgcttattggcgcagtcgctggcggtgttatcggccacaacgtcgggtctggcagcaattccggaacgacggcaggtgcagttggcggcggagctgtaggcgcggcagcgggttctatggtgaatgataaaaccttagtggaaggtgtttctttaacctataaggaaggcaccaaagtgtatacctctacccaggtgggtaaagagtgccagtttacgacaggtttagccgttgttattaccacgacgtataacgaaacgcgtattcagccaaataccaaatgtcctgaaaagagctaataatcaggaggagtcatgaagaaagtttttctttgcgccatcttagcctccttaagctatccggctatcgcctcatcattgcaggatcaactctctgctgtcgcagaagcggaacagcaaggtaaaaatgaagagcaaaggcagcatgacgaatgggtcgcggagcgcaacagggaaatccagcaagagaagcaacgtcgcgcaaatgcccaggccgccgctaacaaaagagcggcaacggcagcggcaaataagaaagctcgtcaggataaactggacgccgaagcctctgcggacaaaaaacgcgatcaaagttatgaagatgagctacgcagcttagagattcagaaacaaaaactggcgctggcgaaagaagaagcccgcgttaagcgagaaaacgaatttatcgatcaggaactgaagcacaaagctgcgcaaaccgatgtggtgcaatctgaagctgacgccaacagaaatatgactgaaggcggtcgcgatctgatgaaaagcgtgggcaaagcagaagagaacaaatcggacagctggtttaattaatcgatgttagtaacttcaatcctataattcttgaagataaaaaaccctctgtagtaacagagggttttgttcattcatagtgcagggtcaaatcattcccactcaatggtagctggcggcttgccgctgatgtcatacaccacgcgggaaataccgttcacttcattgataatgcggttggaaacgcgaccgaggaaatcgtacggcagatgcgcccagtgtgcggtcataaagtcgatggtttcgacagcacgcagagagacaacccagtcatacttacgaccatcgcccattacgccaacggaacgtaccggcaggaacacagtgaacgcctggctgactttgtcgtacaggtccgctttacgcagttcttcaatgaagatggcgtcagcacggcgcagcaggtcacagtactctttcttcacttcacccagcacacgaacgccaaggcctggtcccgggaatgggtgacggtacaacatgtcgtacggcaggcccagctccagaccaatcttacgcacttcgtctttgaacagctctttcagcggttcaaccaggcccatcttcatctctttcggcaggccgcccacgttgtggtgagatttgatgacgtgtgctttaccggttgcagaagccgcagattcgataacgtcagggtagatggtgccctgcgccagccacttcacgtcttccagtttcagcgcttcttcatcgaatacttcaacgaaaacgcgcccgatgattttacgttttgcttccggatcgttttcgccagccagcgctgacaggaagcgatcttctgccggtacgtgaacaatgttaagaccaaagtgatcgccaaacatatccagaacctgctctgcttcgttgagacgcagcaggccgttgtcgacgaatacgcaagtcaggtttttaccgatagcgcggtgcagcagcattgcggttacggaggaatccacaccaccagagaggccgaggatgactttatcgtcgcctacctgctcgcggatgcgagctacagcatcgtcgataattttcgctggcgtccacagggcttcacactggcagatatcacgcacaaaacgctccagcatgcgcataccctggcgggtgtgagtcacttccgggtggaactgtacgccatagaagcgtttttcttcgttagccataatggcaaacgggcagctttcggtgctggctacggtgacgaagtcggacgggatagcggtaactttatcgccgtggctcatccagacatcgagcagcggtttaccgtctgcggtcagcgcatcttcgataccgcgaaccagtgcgctgtcgtttacgacttcaacctgcgcgtagccaaattcacgttcgttagaggcttcaacgtgaccgcccaactgcattgccatggtctgcatgccatagcaaacgccgaataccggtacgcctgcttcaaagacatactgcggcgcacgcgggctgttttcttcggtggtgctttccgggccgccggaaagaataatgccgcttggattgaagtcacgaatttgtgcttctgtcacatcccacgcccacagttcgcagtaaacacccagctcacgcacgcggcgcgcaaccagttgagtgtactgagaaccgaagtccagaatgaggatgcgatgcttatgaatgttttccgtcattgacgcttattccgaggcaagtgaaacagataatataaatcgcccgacatgaagtcgggcgaagagaatcaggagcccagacggtagttcggggactctttagtaatggtcacgtcgtgaacgtggctttcctgaatgcccgcaccgctgatacgtacaaactccgctttagtacgcagttcgtcgatagtaccacagccggtcagacccatacaggagcgcaggccgcccatctgctggtgaatgatctctttcaggcgacctttataagctacgcgaccttcgataccttccggcaccagtttgtcggcagcgttatcgctctggaaataacggtcagaggaacctttggacatcgcgcccagggaacccataccacggtaagatttgtaagaacggccctggtagagttcgatttcacccggagattcttcagtacccgccagcatggaacccaccattaccgcgcttgcgccagcggcgatagctttggcgatgtcgccggagaagcgaataccaccatctgcgataaccggaataccggtgccttccagggcttcaactgcgtcagcaacggcagtgatctgcggaacacctacgccagtaacgatacgagtcgtacagatagaaccagggccgataccgactttaaccgcgctgcaaccagcttctgccaaagcgcgtgcacctgcagctgttgccacgttgccgccgatgatttgcagatccggatatttagcacgggtttcacggatacgctgcaaaacgccttctgagtgaccgtgggaggagtcgatcagcagaacgtcaacgccagcggcaaccagcgcgtcaacacgctcttcgttacccgcacctgcgccaactgcagcaccaacacgcagacggccttgctcgtctttacaggcgttcggtttacgttccgctttctggaagtctttcacggtgatcatgccgatcaggtggaattcgtcatcaaccaccagcgctttttcaacgcgtttttcgtgcatttttgccagcaccacttcacgggcttcaccttcacgcacggtgaccagacgctctttcggcgtcatgtaaacgctaaccggctggttcaggtcggtaacaaaacgcacgtcacgaccggtgataatacccaccagttcgttttcttcggtaacgaccggatagcccgcaaaaccgttacgctcagtcagttctttcacttcgcgcagcgtcgtggttggcagaacagtctgcggatcagtcaccacaccagattcgtgttttttcacacggcgaacttcttctgcctggcgttcaatggacatgtttttgtggataaagccgataccgccttcctgagccagagcaatagccaggcgcgcttccgttacggtatccattgctgcggaaagcatagggatattcagacgaatagttttcgtcagctgggtgctgaggtcagcagtattcggcagaacggtagaatgagcaggaacgaggagaacgtcgtcaaacgtcagagcttctttagcgatacgtagcatgggcaatatctcgaccagagtggttaataaatattgccgcggcattatacagagcgtaaccgattgcatctacccctttttgcaaaaaatgcttgctatccccgaagggcgggttactatcgactgaataacctgctgatttagaatttgatctcgctcacatgttaccttctcaatcccctgcaatttttaccgttagtcgcctgaatcaaacggttcgtctgctgcttgagcatgagatgggacaggtttggatcagcggcgaaatctctaatttcacacaaccggcttccggtcactggtactttacactcaaagacgacaccgcccaggtacgctgcgcgatgttccgcaacagcaaccgccgggtgaccttccgtccacagcatggacaacaagttttagttcgcgccaatattacgctctacgagccgcgcggtgactaccagataatcgttgagagtatgcagccggccggtgaagggctgctgcaacagaagtacgaacagctcaaagcgaagttgcaggctgaaggtttgttcgatcagcaatacaaaaaaccacttccctcccctgcgcattgcgttggtgtgatcacctcaaaaaccggtgctgcgctacatgatattttgcatgtgttaaaacgtcgcgatccttctctaccggtgatcatctaccccaccgccgttcagggcgatgacgcaccggggcaaattgttcgcgccattgaactggcgaatcagcgcaatgagtgcgacgtgttgatcgttgggcgcggcggcggttcgctggaagatttatggagttttaacgacgaacgcgtagcgcgggcgatttttgccagccgcattccggtcgtcagcgccgtcgggcatgagacggatgtgaccattgccgattttgttgccgatctgcgtgcgccaacgccgtctgccgccgctgaagtagtgagccgtaatcagcaagagttactgcgccaggtgcaatcgacccgtcaacggctggagatggcgatggattattatctcgccaaccgcacgcgtcgctttacgcagatccatcaccgattacagcaacagcatccgcagctccggctggcacgccagcaaaccatgcttgagcgcctgcaaaagcggatgagctttgcgctggaaaatcaacttaagcgtaccgggcaacagcagcagcggttaacacagcggctgaatcagcaaaatccacagccgaagattcatcgcgcgcaaacgcgcattcagcaactggaatatcgtttagcagaaaccctgcgcgtacagcttagcgccacgcgtgaacgtttcggtaatgcagtaacgcacctcgaagccgtaagcccactgtcaacgctggcgcgtggatacagcgttactactgctactgacggcaatgtactgaaaaaagtgaagcaagttaaagcgggtgaaatgctaaccacacgtctggaagacggctggatagaaagtgaagttaaaaacatccagccagtaaaaaaatcgcgtaaaaaggtgcattaagccagcacgaattcaacgcgttttttcgatatcaagccatgcccgtgctgacagaagtaatctactgcaccgcaggcttttaacacctgcaacggttgatggcagtctggacaaagagctttcatttcaataatttccccgcaggatgggcaacgcgcatggtcgttatcctgatcaagcacatgctgacattgtggacaatgcagttccatatgaattcctccggtagccatccctctacattcatagagggaatggcagataaaatacttacggataattatttatttttcttgatgtgcttcatcagacgcttacgtttacgcatctgggttggcgtcagggtgttacgcttgttcgcatacgggttttccccttctttgaactgaatacgaatcggcgatcccattacgtccagcgatttgcggaagtagttcatcaagtagcgcttgtaggaatcaggcaggtctttcacctgattaccgtgaatcaccacaatcggcgggttataaccaccagcgtgggcatatttcagcttcacacgacgaccgcgtaccagcggcggttggtgatcttcaacagccatcgtcatgatgcgcgtcagcatagaggtccccacacgacgggtggagctgtcatacgcttcacgtactgattcaaacaagttaccaacaccactgccgtgcaaggcagagataaagtgcacacgagcaaaatcgataaagcccagacggaagtccagcgtttctttcacctgctctttcacttcctggctcaggccatcccacttattcaccacaatgacaagtgagcgcccactattgagaataaagcccagcagcgagagatcctgatcggaaataccttcgcgcgcatcaatcactaacatcaccacgttggcatcttcaatggcctgcaacgttttgattacggagaatttctctacagcatcggtgattttgccgcgtttacgtacgccagcggtgtcaatgagcacatactcacgtccatcgcgttccattggaatgtagatactgtcacgcgtcgtgccaggcatgtcataaacaacaacgcgctcttcaccaagaatacggttagtgagtgtagacttacctacgttcggacgacccacaatcgccagtttgatcggcagactttgcgggtcgaagtcgtcttcctcttcttcttcgccgttctcttccgcttcaaattgcgcccagtattcagcgtcttcgtcgacttcctcttgcggtgcgagatcttccatccacggcagcagcacatgctccagcagacttaatacgccacgaccgtgagacgcggcgatcgggtagatttcacctaagccaagcgagtagaaatcaaccactgcctgatcgggatccagaccgtcagttttgtttgccaccaggaaggtcggtttttcacgggagcgcagatgtttggcaatcgcttcatctgccggcatcaggcccgcgcgcgcatccaccataaacagtacgacgtccgcttcttcaatcgccagcagcgactgttccgccatgcgggtttctacaccgtcttctgtgccatcaatcccgccggtatcaatacagataaactcacggccttcaatttccgcacgaccgtacttacggtcacgagtcagacccgggaaatccgcaaccagcgcatctcgggtgcgagttagacggttaaataacgtggattttcctacgttagggcgcccgacaagcgcgaccacaggtaccatgtttaaagcctcatttttataaatcatcagacaacgcacgctatattcgcgtcgttgttaaaaacaggaaaacggcccctgtccaggagccgttttcaaagtgaacgacagagacgattaacgtgtaatagagtacacggttccgtcttttgcctggatcagcagtttgccgtcagcggcaaccggttcagtctggaaaccggaactatcaactttttgctgggcaacgaaacgaccatcttcgacgttaatccagtgcagataaccttcactgtcacctaccaccaggttgccattatacagcaccggagaagtcagcaggcgatgcaacagatcgctttgtgtccacagcgtaacgccgccatcaatggtcaacgccatcacccggtcattttgatcgaccagatagatgcgattgccgtcgacgatgaaatcattcaccgaacccagttcgcgtttccacataatctgaccactgcgcagatcaagcgccgtcaggttaccattataggccagcgcgaaaacaacgccgttaacaacgacgggagtcgtgtcaacatcgctcagacggtcaatttcggtagaaccggtcgcctgggaaatacgctgctgccaaatcatctggccctgttccatcagcactgcgctgacgcgaccattatcgccacccacgacggccgcaccaaaagccgttgccggcgcagactcgccacgcaaagagagcgaaggcatatcgaggttaactgtccatttgacagcgccgtcagcctcgttcagcgcttgtaactgaccgttactggtgtggattaacaccagaccgtcgctgaccaccgggcgcgaaagtgcttcacccgcgactttagtttgccatgccacagtaccatcgctggtattcagcgcgtaaacctgcgccttttcgctgccaatgtagacatgcccaccagacacggtcagaccgccagaaagtaatgcaggctctttagagaaccagccatctttctcggccaggctgacagaccagatttctttgccatcatccgcattcagcgcttttaccaaaccagcgcggtccgctgcatagacaacgttgtccgccagtgccggatgaagattggaatagaagttgccaatgccgctaccaacggaagtgctccacgccgtggtcggcgtaaactggttttcaacggttggcaatggggacatctttaccacatcttcttcgctgttaaacagcgaacagccgcttaaaagggtaacggaaagcagtcctggcagcagtaatttacgcaattgcatcgggtccctctcagatggacaaattattaattttcatctgcatcatttcgctcagtgccggagtaacatcgcttttcacgcctgcttcccatgcactacgcgcaccttgcttatcacctttgctcagcaatgcttcaccacgcaggtcggcaacaatggcagcccacccttcacctttgatggtatcaagggttttcagcgcggcatcagcctgcttgagctgtacctgaacgcgagcaagacgcagatttatcacggctttgagattttcatcgctcgtgtctgccagcccctgttgtaactgggcggcagctttctctagttcatttttgtcaacaaattgctgcgcaagttccaaagaagccagcgcaccataagtatttttattttcagcagcaaatttttccgccgccgggatgctatccggtttgccttcgctcactgcggtaaccgcattttgataggcaagagaagcggagcgtgcagaatcaacctgatggctgttccagtagcgccagccaatcagtgcgccaacgcccaaaatcaccccaacagccagtgctttgccattttcagcaaaaaagcgtttaaccgcttctacctggtcgttttcgttctcgtaaatttccacgctgtccttctccttccttaacccagtaacgtgcgcaaatgcgcggctacgctatcctgcgcaactgccgtttgctcaccagagcgcaaatccttcactactgctgtgccgttagccacttcagactcacccagcaccacagcaacgcgggcaccccatttatcagcacgggtaaactgtttcttaaagttgccgccgccgtggttggtcatcaatttcacgcccggtaattcatcacgcagacgctcagctaatgccatagccgcagattgtgtatcagcacctgaagccaccaggtatatatcgacaacaggatcggctttaaattccggattaacggcctgtactaacaatacaagacgttcgaggcccatcgcaaaaccgacagccggtgttgcacgaccgcccagttgttccacaagaccgtcataacgaccgcctgcacacacggtgccctgggagccgagactgttagtcacccactcgaaaacggtacggttatagtaatccagaccacgcaccagacgctggtttacggtgtaagcgatccccgcgctctcaagcagtttgcacagaccggcaaaatgctcacgagattcctcgtccagataatcacctaatgccggagcgtcgttgagaagcgcctgcacttccggattttttgaatccagcacgcgcagcgggttagtgtacatgcggcgtttgcagtcttcgtccagcttttctttatgctgctcaaggaatgccaccagcgcatcgcggtaattggcgcgtgcttccagcgaaccgatagaattcagctcaagagttacgtgttcggaaatacccagcgcgcgccaccagcgggcggtgagcataatcagttcagcgtcgatatccggaccttgcagaccgaaaacttcgcagcccaactgatggaactgacgataacgccctttctgcggacgctcgtgacggaacatcggcccgatataccacagacgctgttcctgattgtacagaagaccatgctcaatgccggcgcgtacacagcccgccgtcccttcagggcgcagagtcaggctgtcgccattgcgatcctcaaaggtgtacatctctttttcaaccacgtcggtgacttcaccaatcgcacgtttgaatagcggggtctgctctacaatcggcaagcggatttcactgtaaccgtagctgccgagcacgtttttcagtgtgccttcaatgcgctgccagatggccgtttcgccaggcaggtaatcgttcatgccgcgaatggcttgaatgttttttgccacgtttattctctttctgaatataaaaatgaaccctcaacgcttccctcaatgtttcgggagctatgcgggttcaatcatacacgggaagcgaggcgcttcccatcacgttattatttttcaacctgctgaacgtcaattcgacgcgcttcgtccagctgactggctttcgcacgaatgcgtgcttccagctggtcgatcatatcgttgttgtccagacggtctttgcgcacgccatcttcatagaggccgcttttcttgttgccgccggtgacgccgagtgtagaaaccagcgcctcacctgggccattcaccacgcagccgataatcgaaacgtccatcggagtgatgatatcttccaggcgttgctccagcgcgttaaccgtaccgataacatcaaattcctgacgcgaacaggtcgggcaggcgatgaagttgatcccgcgcgaacggatacgcagcgatttcaaaatatcgaaaccgactttgatctcttcgaccggatcggccgccagtgatacgcgcagcgtgtcgccgatgccttcagacagcagcagacctaaaccaatggcggattttactgccccgctgcgtgcaccaccggcttcggtgatccccagatgcagcggctgatcgatctgttttgccagcaaacgataagactcaacagcgaggaagacgtcagacgctttcacgctgactttgaactgatcgaagttcaggcgatcgagatgatcaacatggcgcatggcggattccagcaacgcctgcggcgtcggttcgccatacttttcttgcagatctttttccagcgatccggcgttaacgccaatacggatcggaatgtttttatcgcgcgcacagtcaaccaccatgcgaatacgctcttcattaccgatattgccagggttaatacgcagacaatcgacgccgtattccgctactttcagtgcaatgcgatagtcgaagtggatgtcagccaccagcggcacgttaacctgctgtttgatgagtttgaacgcttctgccgcgtccatcgtcggtacggagacacggacgatatcagcgccaacgcgttccagcgccttgatttgattgaccgttgcttcgacgtctgtcgtacgcgtattggtcatggactgtacggcgatgggagcaccatcgccaatcggcacattcccaacgtaaatacgtgttgattttctacgttgaattggagcctggttatgcatgaaaaatctcccgcgttacccgtctgttactgcgccggtgattgttcggcattgagggtcagacgcgcaacctggttagttctgataaaacgactcagatcgacaggtttcccttgatactggatctgtactgcggctggcgcaccaattttcagtttgtatggtgcctggccggttaagttcaaattaccgtctttacgctgcataccgctaaacaatttttaccggtagcatcagtaacctccagccagcaatcggcagtaaagttcatcaccagcgcattcggatcagccgccggcgtagtcacgcctgcctgatcggttggcaacggcgcagcgccatctggcgttgttgttgccgttggtgccggggtcgcggcggtatcaacatttgcctgcgaaggcgaaacaaccgcattctgttgcggatcaacagctggtgctggcgcagttacggcaggtgtttgcgtgttggttgcggtagtatccacagacgctggcggcgtggacgttgtagccgggtctgtagttgtcgacgtatttaacggaacactctgcccctgctcgctattactgctcagttccgccgaagattgatcggccatagtggtgatctcttcctgctgagctttgtggtcttgccaccaccaggcaccgctcaggccgataaccacaaacaacaccagccaggtgaaggtcatcagccagccgtcacgttttttgcggcgtttaccgagggaaaaactctgcataggcgcaacttttgcagcccgtagtggagcctgcttttccagccctggcagcagttcttcttctggaatatgtaccagacgcgcataagagcggatatatccgcgcaggaatgttgaagcaagatcggcgggtgccttatcttcttcaatgtcgcgtaccgtggaaaccttcaggcaaagtcgctcggcaacggcctgctgactaagtcctagttgttcgcgagcattacgcaggcgagcgccggtagtaagtgcttcattttggtcgtgcgtggcttcagtattcattcgctgcaggtacgtttaaatgagaattgagatgccggtgaaccatcatgctcacccacaccgcgaaacatccgttaagttaaccgttatcatacagtataagaccgtctgtgtgctcgtgacaaagcccacattcactaaggctaacttactgttgcatcgttacatactgccttaaagtcagcaaaaacgcaccgttaatattgaccagacaattgcaacttaatacttcattcataaaagattacgccacggtacataaagtaaccgtggcgtaatggctatcagaccgctttaatgtcgatggcttcaccctgcatccgtttacgcagggtacgtttcgtacggtcgataacatcgcccgccaactgaccacaggcagcatcgatatcatcaccacgggttttacgcacaatagtggtgaaaccgtagctcatcagcacttttgagaaacggtcgatacggctgttcgagctgcgtccatacggcgcgcccgggaaggggttccacgggatcaggttgatcttacacggcgtatctttcagcagttccgccagttggtgcgcgtgttcagtgccgtcgttaacgtggtcaagcatcacatactcaatagtgacacggccctgattggcgttggatttctccagataacggcgcaccgcagcaaggaacgtttcgatattgtactttttgttgatcggcacaatttcgtcacgaatttcgtcgttcggcgcgtgcagggaaattgccagtgcaacgtcgatcatatcgcccagtttatccagcgccggaactacaccggaagtagaaagcgtgacgcgacgtttagacaggccaaaaccgaaatcatcaagcatgatttccatcgccggaacgacgttgttcaggttgagcagcggctcgcccatgcccatcatcactacgttagtgattgggcgctgaccggtgacttttgctgcgccgacgattttcgccgcacgccacacctggccgataatttccgacacccgcaggttgcggttaaagccctgctgggcggtggaacagaatttacactccagcgcacaccccacctgcgaagagacgcagagcgtggcacggtcgtcttccgggatatacaccgtttcgacgcgctgatcgccaacggcgatcgcccatttaatggtgccgtcggatgaacgctgttcttcaaccacttccggtgcgcggatctccgccacctctttcagtttgccgcgcaacactttgttgatgtcggtcatctcatcaaagttgtcgcagcaatagtgatacatccacttcatcacctgatcggcgcggaagggtttttcacctaaatctttaaaaaactcccgcatctgctgacggttgagatccagcaggttgatttttccatctttcgtggtgacgttttcaggtgtgactaattgttcagacatatgctattccggcctcgttattacacgttatggcccctggagggttgaaaaaagaaacgccccggtgagcggctgctcgtccgggggcgctgcattgtacaaattctggcgcacggatgccacgtttgcacgcggcatttacgaaattattaacgggtgcgcgggcacacttcgccttcgccaaagaaataagcgatttcgcgagcggcagattcgacggaatcagaaccgtgggtaccgttttcggtcaggctgtcagcgtaatcagcgcgcagagtaccagccagtgcgtttgccggattggtcgcgcccagcagatcgcggtgacgctgaacggcgttttcaccttccagcacggaaaccacgatcgggccagaggtcatgaattcaaccagaccatcaaagaacggttttccatcgtgttcagcataaaagccacgtgcctgttcaacggtcaggtgcagcattttggtgccgacaattttgaaccctgcagcttcaaagcgcgcaaagatattaccaatgacgttttttgctaccgcgttcggtttgatgatggaaaaagtacgttcaatagccatttttacctctgtaaattgttctgttgttgtctgtaccagcgtacgagatggcgcggattataatgagcaacagggccgttgactattgatgaaggtaacatttttttaaaataaaatgagttttagcaacaatcagggacaaaacagactattgcatgacaaatttcactgtcgcgatttgccccacatcatccatcaccagcaattgataatcacctttatccgtcaaatgcagggtcacgttgcgcccgcgttcagttaacggttcgccattcagaaaccaccagcgttcacctgcccctccacttgattgcaacggcaaagtcgcttccgctgcgcccggtaaacgtttaataatcgcgccatcgcgaacgcctgtcagctgcagagggagctgggcatcgtgaccgtatggcgggcaaattgtcgaggccggtggtaagcgcacagcgcgacgttctgatgcgggcagccagggttccagcggtagcggccagacatttatcatttcttgtcgcgcttgcgggcaatcagcggcaacacgtttgccattttcatccagccagatggggaaacgaatgccattaatgccttcctgctccggcagtaatagagttggcggctgactcccgtccagcagccaggttgccaggcggcggcgacagttaccgtcaccttccggcaaagactgtccgcccggccagcagataacgccacgagtgactgagttcgggcgcgggtcttccggcagattcgcactgcgcgacagtaagatattattgacctgattcaacaatggtacggcactggcaaagccaaactgaccaacaacgggcgtgccgtccggtctgccagtccagatcccaatgacatagcgagcgttaaccccaatcgcccaggcgtcacgatagccatagctggtgcccgttttccatgccagtggggcgacgcgcggcaaggcactatccggcaagggtttcgcttcatcagccataatccggcgaatgatccacgccgcccccgacgacattaaaggccgttcaagcagcggatcgtcaggctgtaagcgcaatttgcctgccttgccgtggcgagcaaacgcggtatacgctgccgccatatcttccagttttgcaccagcgccgccgagaatgagtgaaagattcggcgcagcaccgttgggcaaatataacggcaatccaacattgcgtaactttgccgcaaaccgtttcggtccataggcttccagcacctgcacagcaggtaagttcagcgagcgcaccagcgcctcgctcatgctgatcgggccatgaaaaccgctatcaaagttacctggtcgataatcaccggtgcgccgggggacgtcttgcagcagtgatgccgggtggatcaagccttcatccagcgccagaccataaacaaacggtttgagcaccgatcctggcgatcggatcgcattgaccatatcaacatgaccaaagcgtgaatcatcgttgagatcaaccgatcccacccagccgcgaacacgcatatcggtatgatcaaccacgatcatcgccagtgagctgcgcggtggcaaccgccctttccagttttgcgccagttcttccagacgtcgttgaagaccggcatccagcgtagtaacgattttgtcgcttttgcttttaccgagcatcatgcgcgaaaacagcggtgccagttgcggcatttgtcggggtgccagccagatgggttcttcccttgactcttttacctgctcacgggaccacacaccttgcacggccatccgttcgagcactttattacgcgcggcttcggcacgctccggccaacgatccgggcgaagacggctgggcgcttgcggcaaaaccgccagcattgccgcctcggaatagcttaaattcgcaggcgactttccgagataagcccaacttgccgcaccgatcccctgcaacgtaccgccaaacggagcgcggttaagatacaaggtcagaatttcacgcttagacagatgccattccagttgcaacgcgcgccagagttggcgaattttgccgccaaatgttttggggtgaggatcaagcagacgagcaacctgcatagtgagcgtgctgccaccggaaataacccgtcccgaagtgagatcttgccatgctgcgcgcgccaccgagaatggattcacccccggatgcttccagaaccagcgatcttcataattgatcagcgcttcaaggtaacgtggagaaacatcttcgattgttaccggataacgccagatgccgtcagcatcggcgaagcgccatagcggcgtaccatcctgcgccacgaccactcgtgcgggattgacttcatgcagcggtagaggccagcgtttatctgctccccacgctgcaagaaaaaggagaaatggcgcagctgccagcgttatccagcagccgcgtttggttaacaagcgaggcatttacggtcggacaatcagcagatcttcagccgcgccggtcgcccgccattggggaacatacattgattccaccatcggttgcggtacctgatacgttcccggcgtcaccgcccgcgccagatacaccagcgttaccggttggtattcatcaacggcaaccgccgccacaaagcgatcgtcacggaactcaatgtgcttaatgctcgcctgctgcatctggttcagtaagttttgcacttcgccaccactttgctccaggctggcgctaccgttcgccagattctgattttccagttccagacccgcaggcagcagatccacgactaacgcatccggcacgctgttactggcttttacctgcaaccagaccagcaccagatcgccgctacgtaacgagtccagcgatttgctcttaccatcagtaccaagaatatgacgctcgatttgcagcacattgttcgccggtaaaggtgcggattgcggataaccgctggcatccatacgcaaccataacggctgatcgccactgtttctcacctgcaaggtggcaagttgatcgctattcagattgctgtttagcgttttctcgcctgtcagcggctcagctgagaaagaggtttgcgcctgccatttacccggtaaatcctgaatcgtacgggcagccaggaacaacgcgttactttcctgcgtcgatagccagcgttcaccaaacgcctgctgcgaaagtgtgttcagcaaagtgtactgctcatcgggtagcagtttattttcttccagcaaggagagcattaacgcgttgtcgcgcagtggactaccgtaatcacccagccatatccgctcatcactatttctcggcgttttcagcgccagcacaatcgcttcttcaccacgcgttgcatcacccatggttttcagcgcaacgccaagttgcagcagcggtaaaccagaagcggcatctgcacgatgctcccagatttcacgcagcgcacccagtggtgctttttgctgacgggccagcaccagcgcagcgtaagactgaacggcgaatttactggctttgagattatccgcgtacgggatcgacatcatgcccggatcttgtaaatagcgcagcagacgctcattaccccggttaatggcgtctgtcggcacgctgtaaccctgttcgcctgcgcggactaggaaatccatcacgtaagccgtcagccagtactcttcgtcaccgtttttatcccacagcgcaaagccgccgttatcacgttgcatttgcagcaaacgggaaatgccgatatcgaccgatgcacggcgtttctcatcactgtcgcctttgatgcccaacgcctgcagttgggctgcgttggtataaagtgacgggaacaggccgctggcggtttgctcaagacagccgtacggatacgcttttaactctttgatataacgtgcaatgttcagcggtggtttgccgctcaacaacaattgcccttccagcgtaacaggcgagaagttttgcaatccatccgccggaatcgcccatgtctcaccaggctgtaacgccgtaccgtaattaaccgtttgtgccgggaacgccggacggacgccgattttccactgcttatgctgatcggcaacggtttcacccggtaacgctaacccgctaatggtggcctgaatttctccatcgccataacccggcaatgctcgcaccgagataaacagcgtagtacgcacacctggcgctaattcaacggctgcgggtgaatcgctgaccagttcaagcaaaccactggcggtcagggcaacgttcagtttttgcggtttatcggtaagattagtgatatccagcgtcagacgcgaggtatcgccactcgccataaagcgcggcatgttcagttcagcaatcaccggtgcggcaactatcactttgctttcgttgctaccgaaatcatctgccgtccaggcttgcgccatgacgcgcaattcaccgttaaaatcgccaatcggcagtgtaaccgagccttcgccctgttcgttgagcgttaccggcagcgcctgctgcgcgacaatattgacgtgattgaccggcggtttaccaccacgtttcagctcatcaccatcgccaccgaaacgcagagctgccagacgcccctgaccttcaataacctgaccgtaaatatcgtaaatgtctgcgccatagcgtttctgaccaaagaacgcctgccacggatctggcgtgacgtagtcagtaatattcagcacaccactatcaacggcagacaccagcacattcacctgtttaggcttctcgccatttttagtgctggctttaattttcacggttaatggttgattgggacgcatttttgctggtgtttccagcgccagatcgaggcgacggttttcatcgccaagcggcagatgcaacacaccaaccgcgcgttttggcgtcgcggagcgagatttatcgccaggacgtaccaccagcgtacttaaatacagatcatgacgattccaggttttatcgaccggaatcgtcagatccagcccttgagcccgaacatcaatctcttgccaccacagcggcccttcactggactcgaccatcgcataacctttacccgccgttggcgcggcgatatgcaacttaatggtgtcgccagggcgataactggctttatccagtttcagcgtgacacggtcgggtcgcactgcgccgctaccgtcgctgttgtcctgccagctatagccagcccagaaacgaacactactgaccgcttcattcggcgctttgacttccagacgataagcgccccactctaccggaaaactgaccttgccggtttcgtccgctttcagatccagagtttgttcattttcgatcagatctttttgatcaaactgtgactgccagccttcatcttctgaccagttccagtagtaatcgcggcgttcgcgaatcaggcgcacctgcaagcccgacacggcttttttcacgccttgcgcatcgctataaacgatgtcaaaagcggcgttactgccttcatcaacaatgggctgtttcaccgtgctgtcagtacgataatcgtaaaccgatttcgaggcgaactgcggacggatccccggcaatgcatcggcaggccagatagcctgctcagcgcggcgcgtcaccgggcgaccgcccgattccagcaaactaccctggaaaataacctgtaatggggaatgcgtttccttccactggctttctgtagaaacttcgccgcgccctttatcatccagcgtcaactgaacttcatccagcgtgcgggaaagattttcggcagctatatcgccgaattcaaaaccaggtaaggctgacacagcttcacgcagtgggcgcaggaaaagttgcccttgcaaagtattaccattagcaggtgcaccatacaggtagtaccccaccacggagaatttcacttcatctttcggcgttagcggggttttctcaccggtcagattcagcgccatgcgctctggcataaaatcttcgacgtggaaatcccacatccgatactggttatcgcccgtgttagcgcgaatatgccacataccggttgccgcattgctatcgagtggccaggtaaagtggtagaggccattctccggctgactaacgacgctcctgagtacctgcccatcgggtttaatcacgtctaacttgatgggttgattgggcaacgctttaccgtctgcatcacgcagcaaaccattgaggattaccgtttcacctgggcgataaagatcgcgtgggccaaacatgaaaaactgtttgctatagcctggcgcgccagcaatgttaaattctgctaagtccagcgccggaagttttaaatcgagtagcgttgtctgaccgtctttacgcgccaacagtaatgccgcgtttttatcattttccagctgcacatgcccctgagcgtcactggttgcctgagtcagagtctgccctttctcatttaataaagagacttcaattccttgctgggccgcgccgttttccagactttgggtaaagatatccagacgattgtgataacggtgagctgaaacgccgatatcacttaacgtaaacagcgtcgcgggattactgtaatcgtaacgtccagcctgattcatcacagccagatacacgcccgcctgctgaagcggtttgatatcgcccagcggcagcaataatttttcacgggtgttacgcgcaggattgagatcaaaccgtccggtgtagaccagatccgccatctgcagcagtttgtctgactgccagttcgccagcgaattgcggtattcccattggctaatgaatgctggcagagattctggcttaacgcggaagaagttaacatcgacattattaacgttgagcgccattaccggcagcccttcaacgactttaccaggcagcagcgaaccacggctggcaaaaccgacgctgggttggatgtcgcgggtagttatagttttttcgtaatctttactgaaggttgcgttgttgagtgctttgacctccttgccaatagtaacgatcaaatcacgtttcggttcgaggtggcgtaaacgtaactctttaagattatctgacagctcccaggcaccatccactttgccgctttttttatcgacgacatgaataacgcgtgagaaatcctgatccgggtcgagagggatggagaacgtcagcaccagcgtggctgcaccatcaagttggacttcagagagatccagcaatgtcagcactttaccggcactctgttgggccagtttttgtctctccggcacggagagttttgctgaactcgcgttttctgaagaggccgctttagtaacttcagaaggcgcatcttttttcaccgctgttggcgcgttatcgttgttgtcgcaccctgccagcgccagcattagcatgcaggcggctacgcgtaactttttcatttttcatccctgccacaatggcccgttagcaacgtcgaataattattatgcgtgagaatttacgttatgtaattcagtatcacgcccatacaatccgaattttagtgagaattgtggctcagacagccaaatcagcctctttcgcttgtcgcttttcactaaacatccgacaatttagcctaaccccggcaaaaatggagatgcctatgtccacgacatggtttgtaggagccgactggctcgccgaacatattgatgacccggaaattcagattatcgatgcccgcatggcgtcgcctggacaggaagatcgtaacgttgctcaggagtatctgaatggacatattcccggcgcagtgttttttgatatcgaagcgctttctgatcacacttccccgcttccgcacatgctgccgcgcccggaaacgttcgccgtggcgatgcgtgaattaggcgttaaccaggataagcacctgattgtctatgacgaaggtaatcttttctcagccccacgagcatggtggatgctgcgcacctttggtgtagagaaagtgtcgattctggggggtggacttgcaggctggcagcgcgatgatctgctgttagaagaaggtgcagtagagctgccggaaggagagtttaacgccgcgtttaatcctgaagccgtggtgaaagtaaccgatgtattattggcaagccatgaaaatacggcgcaaattattgatgcccgcccggctgcacgttttaacgcagaagttgatgaacctcgcccaggtttacgtcgcggacatattcccggagcactgaatgttccgtggacggaactggtgcgcgaaggcgaactaaaaacgaccgatgaactggatgcgatattttttggtcgcggcgtcagctacgacaaaccaattatcgtcagctgcggctctggtgtaacggcagccgtggttttgttagcactcgcgacgctggatgtgccaaacgtgaaactgtacgacggcgcatggagtgaatggggcgcgcgggcagatttaccggttgagccagtgaaataagtattttacaggcaataaaaaaccgccgaatttggcggttttttattgctggtctggttcgcggcctttccagcaggttgtattaccgtagtaatgcaagcgcgtctcagcggagacaatactcgccagtaactctctttttgtcaagcaaaagagagttattattgttctgttagtgtattatccactgcggccctttccgccgtctcgcaagcgggcgctggcttaaggaaaggatgttccgcgaccgttagagcaagcgcgtctcagcgcttgctatcgcggcaatatcgccagtggtgctgtcgtgatgcggtcttcgcatggaccgcacaatgaagatacggtgcttctgtatcgtacttattgtttctggtgcgctgttttcccaagtaaataataaccggagtctctccggcgacaatttactggtggttaacaaccttcagagcagcaagtaagcccgaatgccgccctttagggcggcatattttagattatccggttctgtttaaagtcacgcaaaaaaccaccccagcgacgttcatagaatggcgcaatatgttcggtaataaagtggctaattcctttttccccttttttcacctgacaaatatcgattggttcatcgccaggtaatgtatcggtcgctacacttcccgtcgcctgaataatttcttcgatatcaccatcggcttcaatgccaataagtaaattaggctgtgcctcttcgttctctttaattgaacaaataaaagcacgcttcaccggcttaatggttttaaataaggtggtgagtgaatcaatcatttgtgctggcggctctgcgacttccgataatatcagcgattcaccgccttccaggatttcctggctgctcagcggatttccctctccaccaatcaacaaactgatttcacgcggcataaattctttaccggtcggcagtttggcattaaggaagagcgtttcgccaagggtcatctcaaacaatgtgcgaacgggcattacgacaaatgcctgttcgtcttcaaccgcctgttgaagcgcttctaacgaggtgaaaaaaggaatgacgctggtgccgtcttctttttcccagtgctgtaaatcaagcgcactatcttcaaccacagcctcgccctgcgccgccgtaccaggcacccagacggtggattccagtagagtacggaaaaaggccgggcggtgcgccggttcggttgctgctttttccagcaggtcttcaagttcgttttttgtttcggacatatgaaccacaattcattcaacgttcggggcgcaaatgcctgatgcgctacgcttatcaggcctacaagggattcgcaatttgttgaatttgcagaatttgtaggccggataaggcgtttacaccgcatccggcatattagtttacgccgttaacagattagctatcgtgcgcacaccaagtcccgtagcgcccgcagaccactgttcaaccggcgctttacggtaagtcgccgagcagtcgatatgcagccagccttgctgatagttctcaacaaagtgcgacaggaagcccgccgccgtgctcgcgcctgccggatacgccgcgcttccggtattgttcagttcggcaaagttagacggcagctggctgcggtggaattccgccagcggcagacgccagaatggttcgttctcttgtgaggcactcgccagcaaacgaccggcaagcgcatcgtcaaaactgaacagcgcgtgataatcattacccagcgcagttttcgccgccccggtgagggtcgccgcatcaatgatcatttccggtttctgcgcactggcatcaatcagaccatcggcaagcaccagacgcccttcggcatcagtgttcatcacttcaacttttttaccgttgcgataggtgatgatatcgcccagcttgaacgcattgccgctaatcaggttatccgcacagcagaggaacagcttcacgcgcttgttcagtccgcgcgtaatggcaaatgccagcgccccggtaaccgttgccgcgccgcccatgtccgacttcatcgagtccataaacgcagtctgtttgatgctgtagccgccggagtcaaaagtgatacctttacctaccaggcacgcgtacaccggtgcttctttatcgccagttgggttgtaatccagcgccagcaataccggagaacgttctgaaccgcgcccgacggtgtgcagccccatataaccttgctcacgcagatcttcgcctttggtgatccgataagtcacacgatcgcccgcgacgttgctgatcagatcaacagcacgctgtgccagttgcgatggtcccaattcttctgccggtgcgttgatggtgtcacgcacccagtcgatgatcatcaggcggttatccagttcctggcgctgggcatcgtccagatccggccactccactttacgcgtgcctttcggggctttgtaaccttgccagaatgcccagcagcgatccgcatcccagccttcaccgcttaactgaacatgcttgatgcccagaccgtcaatcttgcgcgccgcacgctggatcagccccagatcgtctgccccgttcaaatgcagggtaatgccgtcattattaatgctgtaagttgctttttctccccagcgcgcgtcggcaggttgggtagagagggtaatcttcatcgcttctgtcattttagttatccttctttgtaaaagggccgccagttggcagccccaggatttttccgctaaatgattcgcgttgcaggaaggcggcaagtgagtgaagccccaggagcatagataactatgtgactggggtgaacgagcgcagccaacgcatctgcggcgtgaagcatgacgcggaaattattcggcctcgtccagccagactaacaaaatcgcttcgaggattttctcgttggatgcctgcgggtcgtcgtcgaaatcttccagatcgcaaatccactgatgcatatcggtgaatcgaaccgttttcggatcaagatcgggatacgcatcgtacagtgcttcgccaatttcgcggctatcggtccatttaagtcccatactaacctctgttaatgctcacgcgcatggttgatagtgtaacgcgggatttcgaccactaaatcttcgtcggtgacgcgcgcctggcagcttaaacggctttccggctccagtccccaggctttgtccagcatgtcgtcttcctgctctgagctttccggcagcgagtcaaaaccttcacgaacgatgcagtggcaggtggtgcaagcacaggatttttcacaggcgtgttcaatctcgataccgttacgcagagctgcgtcgagaatggtttcaccgctattagcttccagaacagcgccatcagggcagagatcctgatgaggcaaaataacaatctttggcatattaaacctcgtccacggaatggcctttcagcgcacgacgaaccgactggtccatgcggcgagcggcgaaatcctgggtttgtttgtctacgtttttaatcgcttgttcgatggcgtcaacgtcatcgccctgcgccacttcactcaggtgagcggcagcatcgtcaatgacctgacgttctgcggcgcttaacagcgcggcatcagcagccagcgcgccgtgcagactttccagcacacgcgccgcttctactttttgttctgccagcattcgggcttttacgtcctgctcggcatagctcattgagtctttgatcatcgaagcgatttcgctatcggtcagaccgtaagacggtttgacctgaatagacgcctcaacgccggtggatttctccatcgccgtcacgctcaaaagaccgtcggcatcgacctggaacgtcacgcgaatatgcgcaccaccagccggtagcgccggaataccacgcagcgcaaaacgcgccagtgagcggcagtcctgcaccagttcgcgctcaccctgcattacatggatagacatcgccgtctgaccatctttaaaggtggtgaaatcctgagcgcgggccaccggaatagtggtattacgcggaatcactttctccaccaggccgcccatcgtttcgaggcccagcgacagtgggatcacatcaagcagcagcatttcgctgtctggcttgttacccaccagaatatccgcctgaatcgccgcgccaatagcgacgactttatccgggtcgatggaagtcagcggtggacgaccgaaaaattcgcctacccgttcacgcaccagcggcacgcgagtagaaccgcccaccatcaccacttccagcacttcatcagcttctacacccgcgtctttcagcgcgcgacgacaagccagtaaggttcgttttaccagtggcgcgatcagttcattgaattgttcacggctgatttcgccctgccagcccgcaacgttaacggtcacggagtccgcatcgctcagcgcgattttggctgcaatggcggcatccagcagttcacgctgaacgcggttatcgctacgatcaggaatgcccgcctgctcgcgaatgtaatccgccagcagatggtcgaaatcatcgccgccgagcgcggaatcaccgccggttgccagcacttcaaacacgccgcgacttaagcgcagaatggaaatatcaaacgtcccgccaccgaggtcataaacagcgatcacgccttcctgaccggaatccagcccgtaggcgatagccgcagcggtcggttcgttaagtaagcgcaggacgtgaaggcccgccagacgcgccgcgtctttggtgccctgacgctgggcatcgtcaaagtacgccggaacggtgataactacaccatccagctcgcctgccagggcttcagttgcccgcgccgccagtgctttgaggatgtccgcagaaacgcgcaccgggttcagcagccccgccgccgtttcaatcatcggcaggccgttttcgctggcctggaattgataaggcagatgcggatagcgttgctggatatcagccagcgagcgccccatcaggcgtttaacagaactaatggtgttggcggtgtcaagcgctgcgttagtacgcgcgtcataacccaccgaatgcccttgctgttgatagtgaacaacagatggcagcaggtgacggccttcatggtcggctaacgtttcggcctgaccgctgcgcactgtcgccaccagcgagttggttgtgcccaggtcaataccagccgccagacgacgctgatgcggcgcagcactcaaaccaggttcactaatttgtaataaggccatgtttagcttccagaaattaaaaatcgagcagtttttcttcgagttgttcggcactgctccgcagtttatcgagaaaacgcagcttacgcacggtatccgccgccgcgtcccacgcctcgttgtctaactgttcaaccatcaactgatggcgggtatcaaacatctttttcacacgtttgataaagctttccagccgcgcttcatctttcgcctgttcgatctcgtccagctcttcgcgcagctccaactgttccatcaggaacgcggtgtcgcgcacagtatgctgctcgctggcgagatcaaaaccgtgtaaagaaagcaaatattccgcgcgcattaacggatgacgcagcgtttgccaggcctggttaatggttgcagattgctgtacggcggcgagttgttccgcctggcttccgctggcgaatttatcaggatgatactgacgttgtagatcctgaaaacgcaggctcagcgcctgggtatcgagttgataacgggcaggcaagccaaagagggtgaagtaatccataacattctcagggctgcgatccgccgcgataacggcgaatcaggtaaaacaaaccccacgcgcaggcgaccacggtggggttatcggtatgcgcatcaaacgtggaagctttcgccgcaaccacactcatctttgacgttcgggttggtgaatttaaacccttcgttcaggccttcttttacgaagtccagctgcgtaccgtccagaaattgcaggcttttgccatcgaccacgactttcacgcctttgtcttcaaacacgatgtcttccggcgtcggttcgtcaacaaattccagtacataagccatacctgaacatccggaggttctcacgcccagacgcaggccaaaccctttgccgcggttagccagaaaggtatttactcgcgctgctgcactgtcgctcagtgtaatcgacataaccaaacctcaactcttattttgcttcacgtttgcttttatagtccgcaatggcggctttgatcgcgtcttctgccagaatagaacagtgaattttcaccggcggcagttcaagttcttcagcaatatcggtgtttttgatcgcctgcgcttcgtcgagagacttccctttcacccattcggtgaccagggagctggaagcgatagcagaaccgcagccgtaagttttaaaacgcgcgtcttcaatgataccttcatcgttgactttaatctgcaacttcatcacgtcgccacaggccggtgcacccaccatgccgctgccgacgttctcgtcgttgttgtcaaaggaacccacgttacgcggattctcgtaatggtcgataactttttcgctgtaagccattataaattctcctgattccgataccgattaatgatgagcccattcgatgctgttcagatccacgccctgcttgtacatttcccacagcggagaaaggtcacgcagacgaccgatggatttacgaactaactcgatggtgtagtcgatctcttcttcagtagtaaaacgacctaaagagaaacggatagagctatgtgccagctcgtcgttcagccccagcgcgcgcagcacgtaggacggttcgaggcttgctgacgtacaggcggaacctgaagaaactgcgaggtctttcagcgccataatcagcgactcaccttcaacgtagttgaagctgacgttgagaatgttcggcgcaccgtgttccaggtcaccgttcaggtaaacttcttcgatatctttgatgccgttccacagacggttacgcaggccgcgcagacgttccatctcggtcgccatctcttcttttgcgatgcgataggcctcgcccattcctacgatctggtgaacaggcagagtgccggaacgcataccgcgctcgtgaccgccgccgtgcatttgcgcttcgatgcgtacgcgcggtttacgacgtacatacagcgcaccgatacctttcgggccatagattttgtgaccggagaaagacatcaggtcaactttcaactggctcaggtcgataggcagtttgcccacgctctgggttgcatcaacgtgatagataatgccacgagcacggcacatttcgccgatagccgcgatatcctgcaccacgccgatttcgttatttacgtgcatgatggaaacaaggatggtgtcgtcacgcatcgctgcttcaagttctttcaggtcgataatgccgttacgctgcggtgccaggtaggtgacttcaaaaccttcgcgctccagctgacggcaggtatccagtaccgctttgtgttcggttttgctggtgatgatgtgcttgccttttttctgataaaagttggctgcacctttgatcgccaggttgtcagattcggttgcaccagaggtaaagacgatttcacgcggatcagcgccgaccagatcggcaatctgattacgggcgatatctaccgcttcttcagcctgccagccgaaacggtgagaacgagaggccgggttaccaaaggttccgtccatcgtcatgaactgcatcattttctcggcaacacgcgggtccaccggcgtggttgcggagtagtcgagataaatcggtaatttcattgctctataaactccgtacatcactcaatgcaaggaaccaggctaccggctggatgtacgaccgtgtttacggagcgcgatacgccccggcctgattctgaattctttttattaagcgcgtaacttaacgtcgatcgcgtcttgtgtgcgggtgcgtggcgcgtcgtgagtatgctgacgaccagacacatccagcacttcctggttattaaccagttcgcctaaagtaatgttgttgagaaaaccggtgagacggtcgctcaaatcacgccacagcgcgtgggtcaggcatttatcgccgccctggcagccgcctttaccctgacaacgggtggcatctacagattcgtcaacggcgctaatcacttcgccaacggcgatgctgctggcatctttgcctaacagataaccaccgcctggtccacgtacgctggaaaccagaccatttttacgcagacgggaaaacagttgttccagataagaaagggaaattccctgacgttcggaaatatcagccaacggtaccgggcccgcttcagagttgagcgcaacgtcaagcattgcggtcacggcatagcgccctttagatgtcagtctcatgtcttacttcacctcaaactcgcccctgcccggggttttttattgtaaaagtgggggtattgcatagcagggtcaagtctgacattcccgagtaaattggtcaactatttacttgactgatttagtcgggtatttaaccttcagtgccatttttttatcgtggcgtttgtacctgttgtcggatgcggtgtgaacaccttatccgacctacggttctgtacattgtaggcctgataagacgcgttaagcgtcgcatcaggcaactactgttattcggccttgttacctttattctgctgctcaatagaagccagaatcccgcgcaggatattcaattcctggctttccgggcgcgcacgggtaaacagacggcgcaatttattcatcacctgccccggatggttttcacggataaaaccggttgccagcagcgtttgttccagatgaccataaaaacgctccagatcatcgaccagcggatacggcgtctcttcatgctcgacctgctcgccgttttcctgagttgccagccaggccatgcgcacttcataggcaataacctgaaccgccatcgccaggttcagcgagctgtattccgggttagccgcaatcgcgacatgataatggcatttctgcaactcttcattggtcaagccgacgcgctcacgaccaaacaccagcgccaccggggtatttgccgcttcagcgacgcttttcagaccgcattcgcgcgggtcgagcatcggccacggcagcgtgcgggagcgtgcgctggtgcccaccaccaggctacaaccggctaacgcttcgtcgagcgtatcgacgatgtgagcattaccaatcacatcgctggcccctgctgccagggcaatcgcctgggagtcgggtttcaccagtggattaaccagccacagattggttaatcccattgttttcatggcacgggcaacagaacccatattgccggtgtgtgacgtctccaccagcacaattcgaatattttgcagcattgtctttcttcatctaaagattattcacgcatcttatcataaaacgaagacagatgccgatctcgctgctatactctgcgccgttttcccgttctttaacatccagtgagagagaccgatgcatccgatgctgaacatcgccgtgcgcgcagcgcgcaaggcgggtaatttaattgccaaaaactatgaaaccccggacgctgtagaagcgagccagaaaggcagtaacgatttcgtgaccaacgtagataaagctgccgaagcggtgattatcgacacgattcgtaaatcttacccacagcacaccatcatcaccgaagaaagcggtgaacttgaaggtactgatcaggatgttcaatgggttatcgatccactggatggtactaccaactttatcaaacgtctgccgcacttcgcggtatctatcgccgttcgtatcaaaggccgcaccgaagttgctgtggtatacgatcctatgcgtaacgaactgttcaccgccactcgcggtcagggcgcacagctgaacggctaccgtctgcgcggtagcaccgctcgcgatctcgacggtaccattctggcgaccggcttcccgttcaaagcaaaacagtacgccactacctacatcaacatcgtcggcaaactgttcaacgaatgtgcagacttccgtcgtaccggttctgcggcgctggatctggcttacgtcgctgcgggtcgtgttgacggtttctttgaaatcggtctgcgtccgtgggatttcgcggcaggcgagctgctggttcgtgaagcgggcggcatcgtcagcgacttcaccggtggtcataactatatgctgaccggtaacatcgttgctggtaacccacgtgttgtgaaagccatgctggcgaacatgcgtgacgagttaagcgacgctctgaagcgttaatgactcaggcgggtgatgtcactcacccgccctcgcctttcaggcgctattctgaaatacttcctcaccgctttactttctttcgtcactctcccaccatctttccccgattaatggatgataaagaagtcgcaaggaaaggttatggcactgccagtgaacaaacgcgttcccaaaattctgtttattctctttgttgttgccttctgcgtttatttagtgccgcgcgttgccatcaacttcttctattatcctgacgataaaatttacggtcccgacccctggtcggcggaatccgtcgaatttacggctaaggacggtactcgtctgcaaggctggtttattccttcttcgacgggccctgctgacaacgccatcgcaaccatcattcatgctcacggcaatgccggaaatatgtccgcccactggccgctggtcagttggttacccgagcgtaatttcaacgtttttatgtttgattatcgcgggtttggtaaatcaaaaggcacgccgtcccaggccggattgctggacgatacgcaaagcgccatcaatgtggtgcgccatcgcagtgatgtaaacccacaacggctggtgctgttcgggcagagtattggcggggcgaatattcttgctgttattggtcagggtgatcgtgaaggcatacgtgcggtgatcctcgactccacatttgcctcttatgcaaccatcgccaaccagatgatccccggcagtggctacttacttgatgagagttacagcggcgaaaattatatcgccagcgtcagcccgatcccgcttttactcattcacggtaaagctgatcacgttatcccatggcagcacagcgaaaagttgtatagcctggcaaaagagccaaaacggttgatcctaatcccggatggcgaacacattgatgctttttccgatcgccacggcgatgtttatcgcgaacagatggtggactttatccttagcgcgttgaatccgcagaactaacccatgatcgctagcacgataatcattcacaaaaccaccttaagacatgctaatccactggtcagaacagtttaagatgagaaaaattctgtgacgcttgccaacatttctgatgattagcattcccttcgtcatttccctgagcaaactttagctattcttatcaattatgcttatgggagatctacagatgatgcctacgcttgctccaccatctgtcctttcggctccccagcgccgctgccagatcttgctgacgctctttcagccggggttgaccgccaccacggcaactttcagcgagcttaatggtgtggatgatgatattgccagtcttgatatcagcgaaacaggacaggagatcctgcgctatcatcaactcacactgacggctggttatgacggtagctaccgggttgaaggtacagtgcttaaccaacgtttgtgtttatttcactggctacgacgtggtttccgtctgtgtccatcatttattaccagccatttcacccccgccctgaagagtgaactgaagcggcgcggaattgcgcgtaacttttatgacgataccaatctacaagcgttagtgaatctctgctcccgacggctgcaaaaacgctttgaaacgcgcgatattcatttcctgtgtctgtatctgcaatattgtttgctgcaacaccacgctggaattacgcctcagtttaatccgctccaacgtcgctgggcggaatcctgccttgaatttcaggtagcgcaggaaattggacgccactggcagcgtcgggcgctccagcctgtaccacctgatgagccactgtttatggcactacttttttccatgttgcgggttcccgatccactgcgggatgcgcatcagcgagacagacaattgcgtcagtctatcaaacgtctggtaaaccattttcgtgagctgggaaatgttcgtttttatgatgaacaggggttatgtgatcagctttatacccacctcgcccaggcgttaaatcgcagtttgtttgccatcggtattgataataccctgccggaagagttcgccagactgtacccacgcctggtgcgcaccacccgcgcggcgctggccggatttgaaagtgaatacggcgtccatctttctgatgaggaaagtggtctggtcgcggtgattttcggtgcctggctaatgcaggaaaacgatctgcatgaaaaacagattattcttcttaccgggaatgatagcgagcgagaagcgcagattgagcagcagttacgcgaactaacgttactgccgctcaacattaagcatatgtcggtaaaggcatttttgcagacaggcgctccgcgtggcgcggcactgattattgcgccttataccatgccattaccgctcttttcaccaccgctgatctatacggacctgacgctgacaacacatcaacaggagcagatccgcaaaatgctcgaatcagcatgagggaacaactttcgggcgcaaaaacattgccggaagcgccaccagcgccattacccagaacacgccgtggcccagatattgatacaggaaaccggcgaaaacggtcatgatagcgatactgccgcccatcgcgacggcagagtaaaccgcctgtaaacggatgacttcgctaccctggcgagcagcaatataacgcatggcggccaggtggcagaccgtgaaggtgccgcaatgcagaatttgcaccactatcaaccacggcaacgccgtagttgctcccataatgccccagcgcactacgccgcaaatcgccgagatcaacagcatatcgcgtgcactacaacggcggaaaagtttattactcagcgcaaagataatgacttccgccaccacgcccagcgaccacaaataccccaccgccgaggccgagtagccagctgcctgccagtaaatggcgctaaaaccgtaataggccgcatgtgccccctgcaataaacaaacgcaggccagaaagcgccagttctggcgaaccagcgccaaccacgctgaccaaccggtgctctcctgctggcggcttgccccttgtggctgaatcgtcggacggatgagaaagccgagcagcatggatgccacgcccaacgtcaacagcgcgaggatcacccgataatcaaacatagtgaccagtttgcccgtcagcgccgagccaatgacaaacgccaccgagccccacagtcgcactttgccgtaatcaagcgggaactgcttttgccacgtattcgccagtgcatcggtcaacggtaccagcggtgagaaaaagaggttaaagccaatcatcaccagcatcagccacgctacgtgcgcccccgcccagaaggcgacagcaaagagaagtgtcagcagtgccagcacgcgcaaggcggaaatcaggcgggaaggatcgctgacgcggggcgcgatgagcaaactcccgagaaaacgggcaaccagacctgcccccaataacaggccgatggtttctggcgttaaaccaatccctttaagccagacgctccagaaaggtagaaaaatgccgtaactaaaaaagtatgtgaaatagccgagcgccaaccagcgcgtggattgcaaaaccatgagtccctcccgtcaggaggcgttagtctggggttaatcgaatgttggtgcaagttgaaaaataagaatattcgagcctgcttcccgatgtctgtaacgccagttcacaagcactaaaaaactgagatccgcgacgcatgttgcaaaaataatgcgtaattatgccgttacgcttgccaaacgttcctgcacaatggcgatgaaatcgcgtaatgccggcttcatctcccctttcttccacgccatcagtaaagcaatggaaggcacatttccggcaatgggacgaaaaacaacctgtccggtattaaaattattcatataaccgggtatcaaagtgacgcccagccccatgcccaccagattcatggtcaccagaatattcgttgccacctggacgatatttggctggctgttttcttgcgcaaaccacgctttaacgatcggcgcaagcgaaccggaatacgccggatcggtactgacgaaattcacgccatccagttgcgcggcggtgatctctttttcatgtgctaaagggtgatcaaccggtaacacaaccactaatggttcgtcaaaaagctccagataatcaatctccgggctataaacaggatggcgcattaagccgacgtcgagttcaccacggcgaattttttcctcctgttgcgtggtgattaaactcaccagctcaatcaaggtgtctggctgtctgagacgaaacatcggtaatacttttggcagtaaattcacttccgccgatggcacaaagccaatggttaattgtctgtcttcctgaacaattttccgcgcccgtaatttggcattttccgcttgttcgaggattgccagcgcgtcctggagaaaacattctcccgccgctgtcaacgcgactttgcgcttatccctcaccagtaacggaacaccgacacagttttcaagatcgcggatctggctgcttaacgaaggctgtgaggtatgcagtttttccgccgcacgggtaaagttcagtgcctgcgccactgcgacgaaatagcgtaaatgccgtagttccatcaccttccccttgttatcgaaaaaacgtctcagctggtagaaattaactatttcacatattagcaaccaaccagcaacatccttatggcacaaaaatagaaggtcaatacatcttatctttcaggattaaaaaatatgaccacaccctcagatttgaacatttaccaactgattgacacccaaaatggtcgggtcactccgcgtatttataccgacccggatatttaccaactggagcttgagcgtattttcggtcgttgctggctatttctcgcccacgaaagccagatcccaaaacccggtgatttctttaacacctacatgggagaagatgcggttgtcgtagtgcgtcagaaagacggcagcatcaaggcgtttctcaaccaatgccgccaccgggccatgcgtgtgagttatgcagattgcggcaacactcgcgcctttacctgcccgtatcacggctggtcttatggcattaacggcgagttgatcgatgtaccgctggaacctcgcgcctacccacaagggttgtgtaaatcccactggggactaaacgaagttccttgtgtggagagttataaagggctgatttttggcaactgggataccagcgcaccgggcctgcgtgattacctgggtgacattgcctggtatctggatggcatgctggatcgtcgcgaaggcggcaccgaaattgtcggcggcgtacaaaagtgggtgatcaactgtaactggaaattcccggcagagcagttcgccagtgaccagtatcatgctctgttcagccatgcttctgccgttcaggtattaggggcgaaagatgatggcagcgataagcgcctcggtgatggacaaaccgcccgcccggtgtgggaaaccgccaaagatgcgctgcaatttggtcaggacggtcacggtagcggtttcttctttactgaaaaaccggatgctaatgtctgggtcgatggcgcagtttcaagctattaccgcgaaacctatgccgaagcagaacaacgtttaggtgaagttcgcgccctgcgcctggcgggtcataacaatatattccccacgctttcatggctaaacggcactgccacactccgcgtctggcatccgcgcggccctgatcaagttgaagtgtgggcgttctgtattactgacaaagccgcctccgatgaagttaaagccgcttttgaaaacagcgccactcgtgcttttggtcctgctggttttctcgagcaggatgactcggagaactggtgtgaaatccagaaattgctgaaaggtcaccgcgcccgcaacagcaaactgtgtctggaaatggggcttggtcaggaaaagcgtcgcgacgacggcattccaggcattactaactatatcttctcagaaacggccgctcgtggaatgtaccaacgctgggccgatcttctgagtagcgaaagctggcaggaagtgctcgataaaaccgccgcttaccagcaggaggtgatgaaatgagtgcgcaagtttcactagagttacatcaccgcattagccagtttctctttcacgaagccagcttactggacgactggaaatttcgtgactggctggcgcagctcgacgaagagattcgttacaccatgcgcaccacagttaacgcgcaaacacgcgaccgccgcaaaggcgtccagccaccgacaacctggatttttaatgacaccaaagaccagctggagcggcgaatcgcccgtctggaaacgggcatggcatgggcagaagagccgccgtcacgcacccgccacttaatcagcaactgccagataagcgaaaccgacatcccaaacgtatttgctgttcgggtgaattatctgctttatcgggcacaaaaagagcgcgatgaaacgttctatgtcgggactcgttttgacaaagttcgccgtctggaagatgacaactggcgcttgctggaacgggatatcgtcctggatcaagcggtaatcacttcccataacctgagtgtactgttctgatgaatcgaatttatgcgtgtcccgttgcggatgtgccggagggtgaggctctccggatcgatacctcgcccgtcatcgccctgttcaacgttggcggcgagttttatgccattaacgatcgttgcagccatggtaatgcgtcaatgtcagaagggtatctggaagatgacgccacggtggagtgcccgctacacgccgccagtttttgcctgaaaacggggaaagcgttatgcctgcccgccaccgatccgctcaccacttatccagtacacgttgaaggtggtgacattttcatcgacttaccggaggcgcagccatgagcgatctgcataacgagtccatttttattaccggcggcggatcgggattagggctggcgctggtcgagcgatttatcgaagaaggcgcgcaggttgccacgctggaactgtcggcggcaaaagtcgccagtctgcgtcagcgatttggcgaacatattctggcggtggaaggtaacgtgacctgttatgccgattatcaacgcgcggtcgatcagatcctgactcgttccggcaagctggattgttttatcggcaatgcaggcatctgggatcacaatgcctcactggttaatactcccgcagagacgctcgaaaccggcttccacgagctgtttaacgtcaatgttctcggttacctgctgggcgcaaaagcctgcgctccggcgttaatcgccagtgaaggcagcatgattttcacactgtcaaatgccgcctggtatcctggcggcggtggcccgctgtacaccgccagtaaacatgccgcaaccggacttattcgccaactggcttatgaactggcaccgaaagtgcgggtgaatggcgtcggcccgtgtggtatggccagcgacctgcgcggcccacaggcgctcgggcaaagtgaaacctcgataatgcagtctctgacgccggagaaaattgccgccattttaccgctgcaatttttcccgcaaccggcggattttacggggccgtatgtgatgttggcatcgcggcgcaataatcgcgcattaagcggtgtgatgatcaacgctgatgcgggtttagcgattcgcggcattcgccacgtagcggctgggctggatctttaaggaagcacgatgaaagaaaaaacgatcattattgtcggtggcgggcaagcggcggcaatggctgcggcctcgctacgccagcaagggttcaccggtgagctgcatctgttttccgatgagcgacatcttccttatgaacgacctccactctcgaaatccatgttgctggaagattccccgcagttacagcaggtgttacccgctaactggtggcaggaaaacaatgttcatctgcattccggtgtaaccatcaaaacgctgggtcgcgacacacgagagttagtgttaaccaacggcgaaagctggcactgggatcagcttttatagcaaccggcgcggcagctcgaccgctgccgttgcttgatgcactgggagaacgctgctttaccctacgccatgccggtgatgccgccagactgcgagaagttctgcagcccgaacggtcagtcgtgattgtcggtgccggaactattggtctggaactggctgccagcgccacgcagcgcagatgtaaggtgacagtgattgaactggcggcaaccgtcatgggccgtaatgcaccaccgcccgtgcaacgctatcttttacagcgccaccagcaggctggtgtgcgcattctgctcaataatgccattgaacatgtggtcgatggtgaaaaagtagaactgacgctgcaaagtggggaaacgcttcaggctgatgtggtgatttacggtattggtatcagcgccaacgagcaactggctcgcgaggccaaccttgatactgccaatggcattgtcattgatgaggcttgccgcacctgcgatcccgcgatctttgccggtggcgatgtggcaatcactcgtcttgataatggtgcactacaccgctgcgaaagctgggaaaacgccaataaccaggcgcaaattgccgctgccgcaatgttagggctaccgctaccgctactgccgccgccgtggttctggagcgatcagtacagtgataacttacagtttattggcgatatgcgtggcgatgactggctttgtcgtggcaacccggaaactcagaaggcgatttggtttaatctgcaaaacggcgtgcttatcggtgcggtcacgctgaatcaggggcgtgagattcgcccaattcgcaaatggatccagagcggcaaaacgtttgatgcgaaactgctgatagatgagaacatcgcgcttaaatcactgtaaccaggataattagcgaatatctcaatgcctggggcgtggcgaggtgcaagagtgtgtattacgtttaaatcacattatcttgcaaagggattggttatgaacacactacgttattttgattttggagctgcccgccccgttttgttattaattgcccgtatcgccgtggtcttaattttcattatttttggttttcccaaaatgatgggctttgacggtacggtccaatatatggcctcgttgggcgcgccaatgccgatgctggcagcgattattgcggtagttatggaagtgcccgccgcgatattaatcgtgcttggctttttcacccgtccgctggcggtgctgtttattttctacacgctgggtacggcggtgattggtcaccattactggtatatgaccggcgatgcggttgggccaaatatgattaatttctggaagaatgtcagtatcgctggcgcattcctgctgctggcaattaccgggccgggggcaatttctctcgatcggcgttaggaaagatgccggatgcggcgtgaacgccttatccggcatttaataaattacagccactctacccgcaacgacatctctgaagttgttgattcccctggtgctagcgcaatgagatcacccccttccgggcgatgatgatcatccggcgcatggctcatcggttccagacagaagaaatcaaacgcatatcctttatcaaacgcagggtcggaaacaaagatgaaataacacggtgcaggtggcgtcgtttccatgatgatggcataaccttcctgcggctgctcgatgcgggcctgaccattccatccggcaaaaccattgttcacccactggcgcggcaacggcgcgggctggttaaaatccagttcctgcggtagctgctcgcaaaactcacccgccagccactgctcccgctccagccagtaaccgctcgcctgtgcctgaatccgcgtttgcggcgacaacggaaaataaggatgccagccggtaccaaatggcagcgtctctgccccttgattggtgacagagagcgtcaccgtcagcgtatccgccgttaaatgaaacgcctgacttacccgatagtgatagacaccgctgcgatgttcatacaccagacacaaactatcatcgctgtgcgagacacattgccactcgcccagccagccatcgccgtgtagatagtgcgcatcccactcaacattcggttgcagttgatactcacgcccctgccagacaaaacgattgccgctcacccggtttgcaaatggcaccagcggaaaacatgaggcatcggttgccacaccgctttttttaccaggacgtaagagcggcgtcgtatcgcgccagaagccttcgattacgccgccctggtcagaaacgtccagctttagcgacccgtgggataaggtatagatggtcatccgctaactccttaatccgggaagttaatcacaactttcccgcatttgccgctcgccatcagcgcataggcatcacctgcctgttccagcgagaagcgatgggtaatggcgttacgcggccacagtttccagtccgtcagatcatgggcgcatttttccatatggaacagactggtcacccaggagccgataatccgccgttgatggtgcatcagatcggcgctgacctcgaactccacttttccggtttctccgatgtaaaccacccgtccccagtcagcggtggatcgcagtgccagcaagcgacctgcggcattaccagaacaatcgagcgcaacatccgcgccaccgtgggtgagttcggcgataatctgcggcagaccttcggtggttgctaaatagccgtgctccatcacccctaactgttttgccatcgccagacgttccggcagcatatcaacgccgatgatccgttttgcaccgcgacctttcgccagcatcatcgccatcatgccgactggccccagaccgaccaccagcacgttatcactgccggaaacttcgccgcgcaaaatcccttcataggccgtgccaacgccgcaactgataaacgcaccatcttcgtagctcagcgcatccggcaggaggatcagatctttttcttccgccagcagatattcggcatgaccgccgtcacgctgccagccgtaagccgcttttcctttgccagtacaagagataggaaagccgcggcggcagttcgggcaaaaaccacagccagaaatgtgatacaccagcacgcgatcaccctctttaaaatggcgacagccttgccccatcgccacaatctgcccgcacggttcatgaccgttgataaatccctggtataacggtttatcgggtgccgccgccgtggcacggtgttgatgatagatatagtggacatcgcttccgcaaatcccggaggatttcattttgatcagtacctggttaatccccggcgtcggcaccgcaacttcccgcagatcgacggttgaatttcctggtaaataagctgccagcatcgttttcataaatccctcattaacaatacgattaattttcatccctgccgcacccgcgccaggggcgttaaggtttagcgtttcgctttactgcttcgctgggtcagcaagatattcgccagcaccgccaccacgatgatgacgccgcgtaccacctgctggaaaaaggagttaataccgagcagcaccagaccgttaccgattagcgtaatcaccagcacaccaagcaatgtaccgaacagggaaccgcgaccgccggaaagtgccgtaccgccgaccacgaccgcggcgatgacgtcaaactccagaccgtttgcggcacctgcgttaccagaaccgaggcgcgccgccaacaaaatgccggtcaccgccgctaataatcccgaaagggtaaagataagaatgcgcacccgacgaacgttgatgccgcacaactgcgccgccgtagcattaccgccaacggcaaaaaccgagcgcccgaaggcggttttgcggctgatgaacacaaacagcgcaaacaacacaatcatgatcagcgcggataccggcacaccgagaaattgtccgcccagccagtccagcacctcgttttcgtcaatcggcactggcagtgcgttcgtcataaacagccccattccgcgcagggcgctccacagccccagtgtggcaacgaaacttggtacgttaaacacgccgcgcagcaccccggccagcgttcccatcagcgcgcctaacagcaacaccagcagacacgccaccgccagcggaacttcaaattgcagcaaaaatgccaggcacaccgagacaaaagccaccatcggcccaacgctgacatcaatttcaccggagataataatcagcgtcatcgcccaggcggcaatcccaatggtggcggcatcgcgcagcacgttcatctggttattcaatgagataaagccaggcgcgttcagggagaagaccagataaagaatggcgattaccaccagcaaaccgatctcattaatatggcgactgacaaattgtttgagcgagacgctcttgccctgcggcaatgataatgacgaagcagacatcttcaggttcctcggtaaaattcatcagtgcacagacagaatggcggacatcagctcatccacattgaccggcgagtgaaactcctgcgagaacgtaccgtgctgtaacaacaggatgcggtcgcacaccagcggcaactcctccacttcactggagataaacaccacgctttttccttcggcagccagctcacggacaatacggtaaatctgctgtttggcttcgatatcgacgccgcgcgttggctcgtcgagcaacaaaatctggctggcggcatagacccaacgaccgatcaccactttttgctgattgccgccagaaagcgtgccgatgggcgtttcgctactggcggccttgaccgtcatccgctgcatcacctcttcggtcaggcggcggatggtggaccattgcagtacgccgttggcgctgattttttgccgattggtcagcactgtattttcgtcaacgcccaaccagggaatgatccccgcttctttgcggttttctggcgtatagccaatgccgcgtttcagcatgtcgccgtaatcggggcgcgtgattttctcgccgttgataacaatttcgccctgttcatactcctccagcccaacaatcgccttcagcaattcactgcgccctgcccccagcaggccagcaatgccaagcacttcgccgcgacgtaacgtaaagctgatatcctccagcttgggcttatggcgtaatgcacggacttccagcacggcctgatcgacaatttcctgagggctaccggcgcaatatcaacgtgatcgcgccctagcattagcgacacaatatgatgcgtggagatgttttcgagcatcacatcgcccgccacctgaccatcgcgcataacggtggcacaggaggcaatgcggcgaatttcttccatccggtggctgacataaatcaccgccacgcccagtgccgacatctttttcaccgcgctgatcaccagttcaacttccgcactggcaagcgaactcgtaggttcatcaagaatgaccacgcgcggctcgcccttcatcacccgtgcaatttccaccagttgcttttgcgccgggcttagcgttgaaacaagttgttcaggactaacgtcaacgcccagcgcctgtaagcaacgttgggcatcctgcgccatttgcaggtaatcaatcatgccgttgcggcgaggccattgaccaaggcagaggttttctgccaccgtcagcccttccaccagacttaattcctgataaaccgcacgaacccccagttcagcggcacggcgagtcaacgtagcttcgtcaccttccagtcgcgtctcgccaatccagatatcaccgctatccgggcgttcgctgccggtaagcattcgaatgagagtcgatttgcccgcgccgtttttacctaacagcgcacgaacttcgcctttattgagcgtgaagttaacgttatccagcgcaacgacgccggggtaacgcttatttcctgccaccacttttgctaccgggactgcctctgttgccgtgaacatagggacctctgcgaatcagcgattagggcagaccatcaacgtgcgttgccagccactgtttaccatcttccgttttggtatagagatcgataggcacctgaatcactttttcaccgtcggcttgtttattgataaccttcaatgtttgcgcgaaaacagcattgcccattttcttaccggaaatatccactaccgctttcagcacctgattgttttccagctcctgagcaatttcggttgtcatatccgaaccgaaaacagcaatttttccggcctgattttgattacgtaccgcttttaccgcgccgagtgtcgcaccgcccgactcccccataatggcgttgagatccggcgtggagataatcagtttttcaccaacggaaatcgctttatctaaaacagtcccttcctgattagcgacaatttgcgcgccgggaacgcgggattttaatacttcttcaaatcctttacgtcgctgcacacaaacttcaaaggcttcgcaattgatgacggcaattttcggctggtcaattttattggcaataaaataatcggcggcagcgttacccagttttttaccaaattccagtggatcgccgaccagatacgccgagacatatttatcgacacccttttgattaatacaggtgttgtagcaaatcaccggaatacccgcttcactggcgcgacgaacggtacggctactgccattttcagacactgccgataaaataatggcatcgacattacgcgccacgagggtatcaacaaaggtactttctttcgaaatatcaccctgggcgttagtttcaattaactgtacctgtactgaagaatcttttgccgcatcctgaacgccttgacgcactccagcgtaatatccctgagtatcaaggtatattgcgccaatggtcatttctttttccgcagccctggcaaataaagcgctacctaatagcgtagccattaataatagattacgggttgttctcatttttttaggcatagagcctcctgtagggtttttattaacaacggcttattctaattattttgtgatgagcggcagcgcgtgccgctcaaatattacagttaatagggtttagtgaacgtagttaaaaataaaaggcatcacagtggtgaataatgccgctttcggccaggccggattaatcgccgtcaattcagcgcgagcagactcatattgcgcaacctccccgagtcccgcggacgccagcatcgccaccatcaggcatttttctttatgctgctgttgtaaatcgccatacagcgacaacagatcaggttgtgaaacagcaaagaaatccgcctcaatactggttttcgccatctcttgcgcccactgtttcatttcactaaacagttgctgtgcggtgtgttgttcgcccagcagtcgcagcgccattccttgccagaagagataatcaaccggctgatcgttgtaataactgtggatgttaatggtgcgatcgccggtcgccgccagacgtaaacaacgcatcgcttcagtttcatcgccctgcgcgttggcgcatatcgcctgccagaaccagatgtcgttatcagtttgccccggtaaacggccttcgcttaaattctccggataatgcagcgcggcatgaagcagttcgctggcctgctgcggctgtctggcatcaaggtgctgccaggcgcgtaataactggttgaggataaactgactggtgaccttcccttccccgccttcccacgggtggaatttgcgcgtggcgagaatgtccgccgctttgtctgcctgacccgtgagatgccacaaattgagcaactctgctgtcatgtcgtcgcgtttcagcgcaatttccagattattttccagacgcgccagtcgtttctccggtgtggctccgcttaacttatcaagcaaatcccgttcgaaaagcagacgtgcatcctgcggcgcaagctgataagcattatcaagataacgcgcggccagctcataatcgtgttgcttattccacgcatggatcgctaacccgcgccagccgtcggcaaactccggcgacatctctacgcaacgttgccataaggtaatggctttgttgtagctacgcttgttgtagtagaagcaggccagtaaatgacgggcaaaccagcactcttcaatactctccagcgccgccacttcttccagcgtattcgggaaacggacaaactgcgggaagacatcaatggcttttgcgaccagttcgccgcgttcggctttcggcaataaactcgcctgcaggtaaagcggcagcgtgcgctggcagtccagtgcgttcagcatctctgccgccagggtgggcattccccagttaatcagttgcccggcggtcatcagagcgttaacgtcgcgtccctgacacagaccgcgccactgcgcgagggctgattcgctacgaccatcgaaccagttcagccaccacagagtggcgttcagcggataatcacgcagcagtttcgcgcgctgcaaacgcgcgttgtcctgacgaccacttaacaccagcagcagattatgcaggcaaagcacttcctgattggttgggcaggcacgaagactttgttggcaaaaatccagaccagcgtcgaagttaccattacgcgccgccagtcgtgccaggccataatagccaccggctttgctgttgccgctccagaccgcacgccagaaatcctcttcggcttgttgatattgtccctgacgttcgtaagcactggcgcgaatcaaactggcctgtccgcactgcggatttttgttcagcgcatgtgcgcgtttcagagcctgagtggcatacgccaccgcttgcgggaaatcggcgcggttatattccagcatcgccagcgccaggttacagcgataatccagcggatccagcgccacgccgcgcaggtagtaatcgaacggtgaacggctggcgtgatgatattgctccagatgctgaccgataaaccaggcttcatctgtactggtaatgtcttgtgctgacagtggcgctttggcgacgtccggcaacggcaactcttgcggctgatgttcctgataactcagtacaatattgccgtcggcatcggagagctcaatggtcagcctttcaggattgataccgtgcaacacgccctggatggcggtcgcaggcatcagtgccacggcatcatcaagtaacgcgttgcatttgccgatttcgcggatcgccaggcggtatccgttcaacggagagatggcatacagcccccactcaatcccccgctcactacgctggagttttatcaccgcatcgcgggaggcattttgcaccatgcccaaagaatgataaggcaggaaatactgctcaaaacgcttctcttcgtaagcatcaagccaggtaaaatcaggctggttatcggcaaaaataccggtcatcagttcgatatacgggccgttattgtcggtcagactcttgtcccacgcctggccgaattcactgtgtccccagctccactgttttttacctggcgcgatatggtggttggcaacgtgtagcaaaccgccatcttcatcgtgacaccacgcgccaacaaaatcgtactgtgatttttcagccatatatgaggttggaacgggcacatttttatagcgagaaatgtccactccggcggagtagtccactttgtagtaagtgccggtggcgatggggaaagcggagacggcccgtttgccgtgatcaaacaccgccgttacatccggcgggaagacgctctgatgcccttccccccctttcactgccgggttggcccaccacaagaaatgacgcggcgtggcgttgccgttatagacgcggctggcgatttccaacgccgcccgttcaggacgcagtgtgaaacctgtcatcacctgtaaaccgtgcatcggctccgtttcgccgacccacaccgtctgtgcgccgtcttcatgggcttcgagggtgaaatcaacgggcataaaggtggtcgggcgatggtgttgcggccagttaaactcaatcccgccagagatccacggtcccagcagccccaccagcgcaggtttaatgacttcattgtgatagacaaaatcgcgttgtttcactttatcccatgcgcgatgcacacgaccgcccagttccggcaggatcatcactttgatgtagtcgttttccagccacaccgcctgccaggatttcagggttttctgctcgctcagcgtatcggtcacgccgtagggataaaccgcgccggacgatccctgataaacgcgattttccaggaacatgggatgtatatcctgcggcccggtttcataggtcgggatctcaacgcgctcttgccacacttttactggagtcatggtgccctcaatattaacaagacatactgaattaaaagatttgtggcagtgtattgaacaatctggcaatgttttcgcggaataatcacgcaattaactaaacaaggtttagtgaagatgagagcctgcattaacaatcaacagattcgccaccataacaaatgcgtgattctggaactgctgtaccggcaaaagcgcgccaataaatcaacgctggcccggctggcgcaaatttcgattccggcagtcagtaatattttgcaggaactggaaagcgaaaaacgggtggtgaatatcgacgatgaaagccagacgcgcgggcatagtagcggtacatggctgattgcgccggaaggtgactggacgctgtgcctgaacgtgacgcccaccagtattgagtgtcaggttgctaatgcttgtttaagtccgaaaggcgaatttgagtatttacagattgatgtaccgacgccgcaggcgctgctgtccgaaatcgaaaaatgctggcatcgccaccgtaaattgtggccggaccgcaccatcaatctggcgctggcaatccacggtcaggttgatccagtgacaggagtgtcgcaaaccatgccgcaagcgccgtggacaacgccggttgaggtgaagtatctgctggaagagaagctgggcattcgggtgatggtcgataatgactgcgtgatgctggcgctggcggaaaaatggcaaaataatacgcaggaacgggatttctgcgtgatcaacgttgattacggcattggctcgtcgttcgtgattaacgagcaaatttatcgcggcagtttgtatggtagcggacagattggtcacaccatcgttaatccggatggcgtcgtctgcgactgtggacgttacggctgcctggaaaccgtcgcctcgttaagcgcattaaaaaaacaggcgcgggtatggctaaaatcacaaccggttaatactcagcttgatcctgaaaaattgactaccgcgcagttaatcgctgcctggcagagtggagaaccgtggatcaccagctgggttgaccgcagtgccaatgccattggtttgagtctgtataacttcctcaacatcctcaatattaatcagatttggttgtacggtcgcagttgtgcctttggtgagaactggcttaatactattattcgccagacgggatttaacccgttcgaccgcgacgaaggaccgagcgtgaaagcgacgcaaattggcttcgggcaattaagccgcgcacaacaggtgctgggaattggctatttgtatgttgaggcgcagttacgacagatttgatggcgcgataacgtagaaaggcttcccgaaggaagccttttttcaacagattaaccgtttcgcttatgcgtaaaccgggtaacgtgcgcagatgtcgagaactttacctttgatgcgctcgataacggcttcatcattgatgctgtccagcacgtcacacatccagccagccagttctttcgcttctgcttctttgaagccgcgacgcgtaattgccggagtacccacgcgaataccggaggtcacaaacgggctcttcggatcgttcggtacgctgtttttgttgacggtgatgttagcacggcccagagcggcgtctgcttctttaccggtcaggtttttatcaaccagatcaaccaggaacaggtggttatcagtgccgccggaaaccactttgtagccgcgttccaggaacacttctaccatcgctttagcgtttttagcgacctgctgctggtaagttttgaactcaggctccatcgcttctttcagagcaaccgctttaccggcgattacgtgcatcaacggaccgccctgaccaccagggaaaacggcagagttcagttttttgtacagctcttcgctaccacctttcgccaggatcaggccgccgcgcggacccgccagggttttgtgagtggtggtagtaacaacgtgagcatgaggaaccgggttcgggtagacgccagcagcaaccaggcccgcaacgtgcgccatatcaacgaacaggtaagcaccgatgctgtcagcgatttcacgcattttcgcccagtcaaccacgccggaatatgcagagaaaccaccgataatcattttcggcttgtgttctttggcttgtttttccagatcggcgtagtcgatatgaccggtagcatcgataccgtaaggaacgatgttgtacagtttaccggagaagttaaccggagaaccgtgagtcaggtgaccgccatgcgccaggttcatacccagaacggtatcacctggttccagcagcgcggtgtagaccgcaaagttagcctgggagccggagtgcggctggacgttagcgtagtcagcgccgaacagttctttcgcacgatcgatcgccagttgttcaacgatatcaacatactcgcaaccgccgtagtagcgtttgcccggataaccttcagcatatttgttggtcagctgagaaccctgcgcctgcattacgcgcgggctggtgtagttttcggaggcgatcagttcgatgtgctcttcctgacgtactttttcctgctccatagcctgccacagttcggcatcataatcggcaatgttcatttcacgctttaacatccgcatctcctgactcagctaacaataaaatttttggcctttataggcggtcctgttggacaacggcgaacagtataaccgaatcattgtgcgataacaggtcttgacaaaggaatttacgcaaacgattaccttcaggctacgcaaggctttggagaataaagagcttgcaaccggaaacggatttcttttcaggtttgtgatgcaaatttttcacttcatcacattctttctgaaaaacaccaaagaaccatttacattgcagggctattttttataagatgcatttgagatacatcaattaagatgcaaaaaaaggaagaccatatgcttgacgctcaaaccatcgctacagtaaaagccaccatccctttactggtggaaacggggccaaagttaaccgcccatttctacgaccgtatgtttactcataacccagaactcaaagaaatttttaacatgagtaaccagcgtaatggcgatcaacgtgaagccctgtttaacgctattgccgcctacgccagtaatattgaaaacctgcctgcgctgctgccagcggtagaaaaaatcgcgcagaagcacaccagcttccagatcaaaccggaacagtacaacatcgtcggtgaacacctgttggcaacgctggacgaaatgttcagcccggggcaggaagtgctggacgcgtggggtaaagcctatggtgtactggctaatgtatttatcaatcgcgaggcggaaatctataacgaaaacgccagcaaagccggtggttgggaaggtactcgcgatttccgcattgtggctaaaacaccgcgcagcgcgcttatcaccagcttcgaactggagccggtcgacggtggcgcagtggcagaataccgtccggggcaatatctcggcgtctggctgaagccggaaggtttcccgcatcaggaaattcgtcagtactctttgactcgcaaaccggatggcaaaggctatcgtattgcggtgaaacgcgaagagggtgggcaggtatccaactggttgcacaatcacgccaatgttggcgatgtcgtgaaactggtcgctccggcaggtgatttctttatggctgtcgcagatgacacaccagtgacgttaatctctgccggtgttggtcaaacgccaatgctggcaatgctcgacacgctggcaaaagcaggccacacagcacaagtgaactggttccatgcggcagaaaatggcgatgttcacgcctttgccgatgaagttaaggaactggggcagtcactgccgcgctttaccgcgcacacctggtatcgtcagccgagcgaagccgatcgcgctaaaggtcagtttgatagcgaaggtctgatggatttgagcaaactggaaggtgcgttcagcgatccgacaatgcagttctatctctgcggcccggttggcttcatgcagtttaccgcgaaacagttagtggatctgggcgtgaagcaggaaaacattcattacgaatgctttggcccgcataaggtgctgtaatttgatgttgccggatggaaacatccggcaacccttgacgcggtttaaattgccgcgtcgtcctcttcaccggtacggatgcgaatgacccgtgccacgtcaaagacgaagattttaccgtcaccgattttgccggtttgcgccgtgcgaataatggtatcgacacaggtatcgacaatgtcgtccggtacgacaatctcaattttcactttcggcagaaaatccaccatatactccgcgccgcggtacagctcggtatggcctttctggcgaccaaagcctttcacttcggtcaccgtcatgccggtaataccgacttcggccagtgcttcgcggacatcgtccagcttgaagggttttataatcgcatcaatctttttcatgctattccttgaaaaggtcgcctgtcttttgatctgctaaacgtaacacataacgccaattcattccttgaaatcgtttgcatccagctcgtgtcgggaaagcagtttataaaattctgtccggttgcgccccgccattctcgccgcgtgggtgacgttgcctttggtaatttgcagcagcttacgcaaatagttgagttcaaactgattacgtgcctcaacaaaggttggcagcgccgtgttttcaccctccagcgcctgctctactaatgcatcgctaataaccggagatgaggtcagcgccacgcactgttcaatcacgttgaccaactggcgcacattacccggccaactagcggtcatcaggcgtttcatcgcatcagtggagaacgcgcggacaaacggtttatgtcgctctgccgcctggcgcaacaggtgatttgccagaagcggaatgtcttctgtgcgctctgccagagccggaattttcaggctgacaacgttgaggcggtaatagagatcttcgcggaattccccgcgcgccatcgcttttggcagatcacggtgagtggcagaaataatccgcacgtcgatatcaatatcgcggttgctgcccagcgggcgcactttacgctcctgcaacacgcgcagcagtttgacctgtaacggcgcaggcatatcgccaatttcatcgagaaatagcgttccgccttccgccgcctggaataaaccttcgcgattgctgacagcgccagtaaacgcgccacgcgcatgaccaaacagctccgactccagcaattgctcgggcaatgcgccacagttaatagcaataaatggtttgctattgcgcgggctggcgttgtggatagcctgggcgaaaatctctttcccggtgccgctctggccgttaatcaaaacgctaacgtctgattgcgccaccagccgcgcctgttccagcaaacgcagcatcagcgggctgcgggtgacaatcgcctcgcgccagcgttcatcggtggctggcgcggattgttccagcgcatcgtcaattgcctgatatagcgcatctttatcgacaggcttggtgaggaaactgaacacgccctgctgtgttgcagcaacggcatcgggaatagaaccatgcgcggtaagaataattactggcattcccggctgcactttctgaatttcagcaaacagctgcataccgtccatttcatccatccgcaggtcgctgatgactaaatctactttttcgcgattcagtacccgtaatccttcagcgccactttccgccgtgaccacgctgtagccttcgctggtcaggcgcaggccaagcagtttcagcaatcccggatcgtcatcgaccaataataaatgcgcaggtttatggctcatcaggagtgacctcatgggtggatggcgcgggcttttcaccctcgtgcggcgtatccggcgagaaatttccagccggtttgcgggtcgagagctggcgttcaatatcagtcaggttttccagcttgcgggtggtgagttccagttgctgctgtagaacgtgatgttgctggcgcaatgtatccagctcgctgtcgctggcctgctggagcttgccgtagcgttggcgctcttccgccagttgcagttgcagcgcctgaccgtcgcgccagagttgatacagagggcgaacctgtgccgggatctcggtacttagcgcatcaatgcgcgcgaccagctggcggcgctcatacggcgtaattttggcgtcggcgagcaaaatcccttgtttaaaggtattttgccagctgccgtcgtcatattggcgagcttgctgacgtgactgcgcaggcattaaacgatcagcacaatccatcgcccgcagccagtaaagcggattggtttcggttgatttaccttgcagcgcccagatgtcgctacattcagtagaaagatagtcagccagttgataaaccggaattttttcttctgctggcgtatcaatggctggcttattgtgactctgcacgcaacccagcaatgccagacatggcagccctgccagccacagccgtcggggcaataatcgttgaaaaatgtgtcgcatattcaccagacttaatgcctatcccagtgggcgtaattattgcaggcagtttggacatggacagcgcggagaaaccggagcgtacacgtcgtacgtgaggatttcgagcactgcccggggccgaactggcaaataaaatagcctgatgggataggctgttagcattatttcgtgtttttcgacgacggcaattcaatgcggaaacaaacgtcttgcccgctctcgtcgaccagatacagttccccttgcatacggcgaatacaatccctggcaatgcttaatcccagaccgctgcccttcaccgccccttttcgctggtggcttccttgaaaaaagggttcgaagatcatggcgcgttcctcttgcggaatgggtgtgcctgtattgatgacatcaatataaacccgtgcaccatgtaagctgctgcgaaggcaaatgttaccggattcagccccgtagtgcaccgcattggagtaaagattatccagtacgctcatcagcagcattggctccgccaggcaagctgttgctttgagatcgacgtcggtatgcatcattttagcccgtgcgggcaggctatgagcagaaactactgtctccaccagcggtgctaactcaacattctccagttccaccgcactgtccgcttgtttacggttgtaatcaagcagttgttcgatcagtttttgcaaattgcggctgctgctatcaagaatgctcaccacctctttttgctctggcgtaagcggcccgacaacctggtcagccagtaattcagtgccctcgcgcatactcgccagtggcgtttttaattcatgagataaatgtcttaaaaattgatggcgttgggattccagccatgacaggcgctcacttaaccaaagaatacgttgcccaaccgagcgtaactcgctcggtccactgaacgaaacgctattgcccagagaacgcccttcccccagacggttgatcatgcgctcgatatttttcaccggcccgataatcatccgcgtgaaaagtagcaccatcaccagactcaccagaaatagcaccagcgattgccaaccaaaatattgcccacgttcggcgatttcacgctgaagttgctgcccacgagagaacaccactgtgcgcgtggcctgcaccatttcggtattggcactggcaaaggcttcaagacgcgcggcggcggcagcatcgggaccactgttgttacactgaagttgggccagattgttcaaatcctgacgcaatgcctggtaaagtttatcgtctggcagtacgcctgcgtgggcatcgagcatttcgctgtaacgcttgcgctggctttgataaaccttcgcaagcgtagggtcgtccagcacgcaatactgacggtagctacgctccatctccagcgccgcgttggtcatcgcttcactacgccgggcatcaataagcgtagtgcggttaaccagcgccgcctgatcgctaagcgcattcaggctttgccaggcttgccatgccagcaccaacaggggtagtagaattagcaaaaatgccagcattaccagttgtcgtaatgagcggggaaaaacgggccagcgcttcaaggtgttactctcgtcagacgcgaatagcctgatgctaaccgaggggaagttcagatacaacaaagccgggaattacccggctttgttatggaataaggcggtgcctaactcgacgtttcgcccgatggttgatatagctacgctgatatcagaagttggacggcaggcaccttgttgtgcgtcattcgaattttatgtagcacgtcccgaaggggctgacataagtcggtgaatgagccactgcttactattatgcagtaactgtgccaataaagaaaatagtttggtaacgtactgattatacgttgctttgagggatttatggcttcttcgctatttgaatgtaaatcagccactgtgtcgccaaaaagagacaacttaagataaacttattagattacaataaaatcaatcatttaagtgtcgccagaaagcgacacggtaaaccacccattgtcgtgatttacagacacaaaaaagctcccggagttgggagcttatgatagtggttggtgcttaatgccggatgcggcgtaaatgccgcatccgggctgcaaaaccaatgaactgatgacttaccccaactgcttacgcgcattgcggaaaatgcgcatccatgggccatcctcgccccagttttccggatgccaggagttgctgacagtacggaaaacacgttccgggtgcggcatcataatggtgactcgaccactttcagtcgtaatcgacgtaataccgttcggtgaaccgttcgggttagccgggtaggtttcagtgactttgccgaagttatcgacatagcgcagtgccaccagccctttgctttccagtgccgccagatgcgccgcatcacgcacttccacgcgcccttcaccatgagagacagcaatcggcatttgcgagcccaccatcccctgcaacagcagcgacgggcttttgggtcacttcaaccaggctgaaacgcgcttcaaagcgatcggaggtattgcgcacaaaacgtggccacaactcactacctgggatcagttcacgcagattagacatcatctggcaaccgttacatacccccagcgccagcgtttgcggacggtggaagaaggttgcaaactcatcgcgtacacggtcattgaacaggattgacttcgcccaaccttcaccggcacccagcacatcaccgtaggagaaaccaccgcacgcgaccagggcgtggaaatcttccaggcccgtgcgtccggtcagcaggtcactcatatgcacgtcgatagcatcaaagcctgcacggtggaaagctgccgccatttcaacatgcgagttcacgccctgctcacgcagcacagcaactttcggacgtgcgccagtggcaatatacggtgctgccacatcttcgttgatatcgaacgacagttttacattcaggccaggatcggcatcgttagatttcgcctgatgctcctgatcggcacactccgggttgtcacgcaggcgctgcatctgccaggtagtttctgcccaccaaacacgcaacgtagtgcggctttcgctgaatacagtctgcccgttggcagtaatcacaaaacggtcaccggaaaccgcctgcccaacataatggacacaatcagcaagcccatgctgtgccagtacggactcgaccgcttcacggtcagcggcacgaacctgaatcaccgcacccagttcttcgttaaacaacgccgccaggcgatcgtcacccagagtggcgatatccgcgtcaatgccacaatgaccagcaaaggccatttccgccagcgttaccagcagaccgccatcagagcggtcgtgatacgccagcagcttacgctgtgcaaccagcgcctgaatcgcgtcatagaagcctttcagttgcgcgacgtcgcgtacatctgccggtttgtcgccaagctgacgataaacctgcgccagcgccgttgcgcccagcgcgttattgcctttgcccaaatcaatcagcagcagtgcgttatcttcggtagaaagctgcggcgtgatggtgtgacgtacatcttccacgcgggcaaatgcagaaatcaccagcgacagcggcgacgtcatttcgcgctcttcgttaccttcctgccagcgggttttcatcgacatagagtctttacccaccgggatcgtcaggcccagcgccggacaaagctcttcgcccacggctttaacggcttcatacaggcccgcatcttcaccagggtggcctgccgccgccatccagttggcggaaagtttaatgcgtttgatatcgccaatctgtgttgcggcaatattggttaacgcttcaccgaccgccagacgggcagaggcggcgaaatccagcagcgcaaccggcgcacgctcgccaatcgccatcgcttcaccgtagtagctgtcgaggctggcggtagtgaccgcgcagttagcgaccggcacctgccacggacccaccatctgatcgcgcgctaccatgccagttacgctgcggtcaccgatggtcaccaggaaagttttctccgccacggtcggcagatgcagtacgcgtttcaccgcgtctgcaatggtgatcccttcacgggccagcgcgtcgcctttcgctttcagcgtttgtacatcgcgggtcatcttcggcgttttaccaagcaggacgtccagcggcagatcgatcggctgattatcaaaatgacgatcgtgcagagaaagatgcagttcttcggtcgcttcaccaatcaccgcgtagggtgcgcgctcacgcttacacagttcgtcaaacagcggtaattgatcggcagcaaccgccagcacgtagcgttcctgggattcgttacaccagatttccagcgggctcatgcccggttcgtcgcttagaatatcgcgcagttcaaatttaccgccgcgcccgccgtcgctcaccagttccggcatcgcgttagaaagaccgcctgcgccgacgtcgtggataaacagaattgggttggcatcaccaagctgccagcaacggtcgatcacttcctggcagcgacgctccatctccgggttgtcgcgctggacggaagcaaagtcgaggtcggcatcagactgaccagacgccatggaagacgccgcgccgccgccaagaccgatgttcattgccgggccgccgagaacgaccagcttcgcaccaacgttgatctcgcctttttgtacgtgatcggcacgaatgttgccgatcccgcccgccagcatgatcggtttgtgataaccgcgcagctcttcgccgttgtggctgttcactttttcttcataagtacggaagtagccattcagtgccggacgaccaaattcgttgttaaacgccgcgccgcccagcgcgccttcggtcatgatgtccagcgcggtgacaatgcgctcaggcttaccgaaatcttcttcccacggctgttcgaagccaggaattcgcaggttggaaacggagaaaccaaccaaacccgctttcggcttcgcgccgcgcccggtggcaccttcatcgcggatttcaccgccggaaccggtcgccgcgcccggccacggagaaatcgccgtcgggtggttgtgagtttcgactttcatcagaatatgcgccggttcctgatggaaatcgtagcggcccgtttcgtggtcagcaaagtagcggcccacttcagaaccttccattacggcggcgttatctttataagcagagagaacgtaatctggcgtggtttcgaaggtgtttttgatcatcttaaacagcgatttcggctgttgctcaccgtcgataacccaatcggcgttaaaaatcttgtggcggcagtgctcggagttcgcctgggcgaacatatacagctcgatgtcgttcgggttacgaccaagctttgtgaaagcatcctgcagatagtcaatttcatcttccgccagtgccaggccaagacgcaggttagcgtcgattagcgcctgacggccctgccccagcaaatcaacgctggtgaccggagtcggttgatggtgtgcaaacagctgctctgcatcatctaaagcaaaaaagaccgtttccatcatgcggtcgtgcagttcagcggtaacctgctgccattgttcattggtcagcgtaccggcttctatatagtaagcaacgccgcgctcaaggcggtttacctgttgtagcccgcagttatgggcaatatcggtcgctttcgaagaccagggagagatggtgccaggacgcggggtcaccagcaggagtttgccttgcggggcgtggctggcgagtgccgggccatatttcagcaggcgttcaagttgtgcgtgctcatcatcgtttaacggcgcattgaggtcagcaaaatggacatactcggcgtaaatattgtgaaccgggagcctggcagcctgaaaacgtgccagcagtttgttgattcggaatgccgacagtgcaggcgaaccacgcagaatttccatcataagtctctcgtcttctaagctttcggtgtacccaagggggggaaacgggcgtcattataaagaatctgatgcgctgacgaaaccgtttgcgtggaaataaaatcaccatcgtgaattagcaacgcgtgccgccaatggctgtaataagttgccatctggcgcaggtttacgcaaaatgccgctcatttatgagtaaacctttcactattattacgtttttcaagctgggacgcgcacgacacagagaattaactaattgaaaaaattaaagattaattatctgttcatcggcattctggcactgctgctcgcggtcgctctctggccatccattccctggtttggtaaagccgacaaccgtatcgccgccattcaagcgcggggagagttgcgtgtgagcaccattcatactcccctgacttataacgaaatcaacgggaaaccttttggcctggattacgaactggcgaaacagtttgccgattacctcggcgtaaaactgaaagtgaccgtgcggcagaatatcagccagctgtttgatgaccttgataatggtaacgccgacctgctggcggcaggactggtctataacagtgagcgggtaaaaaattatcagcctggccctacctattattccgtgtcacaacaactggtttataaagtgggtcagtatcgcccacgtacgctgggcaacctgacggcggagcaactcaccgttgcaccgggtcatgtggtggttaacgatctccagaccctgaaagaaacaaaattcccggaattaagctggaaggtagacgacaaaaaaggctctgcggaattaatggaagatgtcatcgaaggaaaactcgattacaccattgctgattctgtcgccatcagcctgtttcagcgcgttcacccggagctcgccgtagcgctcgatatcaccgatgaacaaccggtgacttggtttagcccgttagatggcgataataccctttccgccgccctgctcgacttcttcaacgaaatgaatgaagacggtacgctggcacgcattgaagagaaatacctggggcatggcgatgattttgattacgtcgatacgcgcacatttttacgcgccgtcgatgcggtactgccgcagttaaagcccctgtttgagaaatacgccgaagaaattgactggcgtttgctggccgctattgcttatcaggaatcgcactgggatgcacaggccacttcaccgacgggtgtgcgcggcatgatgatgttaaccaaaaataccgcgcaaagcctcggcattacggatcgtaccgatgccgaacagagcatcagcggtggcgtgcgttatttgcaggatatgatgagtaaagtgccggaaagtgtgccggagaacgagcggatctggtttgccctcgctgcgtacaatatgggctatgcgcatatgctggatgcccgcgccctgacggcaaaaaccaaagggaatcctgacagttgggctgacgtaaaacagcgtctgcctttacttagccagaaaccctattacagcaagctgacttacggctacgctcgtggacatgaagcctacgcttatgtcgaaaatattcgtaagtatcagattagcctggtgggttatctgcaagagaaagagaagcaggctacagaagcggcgatgcaactggcgcaggattatccggcggtatcgcctacggagttgggcaaagagaaatttccttttctctcgtttctttcccagtcgtcatcaaactatttgacccattctccctctctgctgttttccaggaaagggagtgaagagaaacaaaattaatccgtcgaggattgcgcttttttctgcgctttaatttcctggcggcgcatgcgaaagaagtcactgagcaacgccgcgcactcatccgccagtattccttccgtaatttccactcggtgattcatacccggatgatgcagcacatccattaaagatcccgcagcgccagttttcgcgtcacgcgcaccaaagaccacgcgaccaatgcgactgtggatcatcgctccggcacacattacacatggttcaagcgtgacatacaacgtggcgtcgatcagacgataattttgcatcaccagaccaccctgccgcagggccatgatttctgcatgtgcggtgggatcatggcgaccaatcgggcggttccagccttcgccgattacccgattgttatgcactaataccgcgccgaccggcacttcccgctcatcccaggcacgtttcgccagcgtcagcgcgtgacgcatccagtattcgtggctaaattcgacttcagacaaaaagaaaactccggttataaaagcgcggcgcattatacacggacgctatgctttactctattccagttgctggagttcaccgcgcggggttactcgccaacgatgctgacagaaataaagcagcggattgtcctgattactgtcgctatagccactgtacagccgcagcggagtgccgattttgcgctccagttgtgcgaccttttcatgtcccagacaacgcatcgtcaatacccaaccaccatagccacgttgaatttggctggcgataagattaacccgcggcagccagggcgtatcgaaataaaccgcttcaaccagcggctgcggagagccggtaatcaaccagatatcagcatcgaaacttaacaggtaggtggttaatcgctcctgaaccagcggaaaggcggtaacattgtcgcgaaaccagcgcacgaaatcggcctgcaacgtctgtaaacgtgcttcgctgtgaccaaaagtgcacccccacagaagcagactcatcggccagcgtgccgcacgaccttttatcaataacgcaatggctataatcggtaacaacggcaggacaagtaacgcattcagcggttggcgacgcagtaaatagcgcagaaaactgccgaacatatcctgctgatgcaatgttccatctaagtcaaaaaacaccacacgacgctcgtgagttgccaaaccatactcctctggactgaaacatcctgattaattttcgctactacatagcctaacagatagatcatcacttttccggcaacaatcgaccgcatcatggctaactggaatttttaattcatggcaattagcggcaatggaatataaaattcactcgcgtgtctctcatattgcctgttgtcgccactatttcatcgcgaggaaagatatgaacggcttacttcgtatccgtcagcgttaccaggggcttgcccagagtgataaaaaactggcggattatctgctgctacaacctgatacggcgcgccatttaagctctcagcaactggccaacgaagccggagtcagtcagtccagcgtcgtgaagttcgcgcaaaaactcggctataaaggttttccggcgcttaagttggcgttgagtgaagcgctggcaagccagccggaatcgccctccgtgcccattcataaccaaatccgcggtgatgatccgttacggctggtcggcgaaaaactgattaaagaaaatactgccgctatgtacgcaacgctaaacgttaatagtgaagagaaactgcatgaatgcgtaacaatgttgcgctctgcgcggcggataattctgaccggtattggcgcttcgggtctggtggcgcaaaactttgcctggaagctgatgaagattggcttcaatgctgccgcagtgcgcgatatgcatgcgctactcgcaacagtacaggcgtcgtcccctgacgatctgttattagccatttcctacaccggtgtacgacgcgagttaaacctggcggcagatgagatgctgcgagtgggcggaaaagtgctggcgattaccggctttactccgaatgccctgcaacagcgtgcttctcattgcctgtataccattgccgaagaacaagcgacaaacagcgcttcaatctctgcttgtcacgctcagggaatgttaacggatttgctgttcattgcgctgattcagcaggatctggaactggcaccagaacgtattcgtcatagtgaagcgctggtgaaaaaactggtctgagtaaagaatgcgcgtataatgcccgcccggtttgtgttgttttgagagtttccttatggcgttgttaatcactaaaaaatgcatcaattgtgatatgtgtgaacccgaatgcccgaatgaggcgatttcaatgggagatcatatctacgagattaacagcgataagtgtaccgaatgcgtagggcactacgagacaccaacctgccagaaggtgtgcccgatccccaatactattgtgaaagatccggcgcatgtcgagacagaagaacagttgtgggataaatttgtgctgatgcaccacgcggataaaatttaatattctactctggaagtagagtattaattatattactgggaagccttaacgccattatatttatttaattgatgacattagcataatcattcactaagttaatttatatagtatctgccaagacacttatttatagttattaaaggcgcgtccgattggttcaccggacgcaccttaagtacgtttccttgtgttataagaacagaaggatcagctgtaaaacagcaatgatgattttgatgacccgtttaatcaggtatcggcaatcagtcattcgtttttccttaaacaaggaatgcagccgttcagattagcccttacatctccccaaaactgaacgtgcgagttattgagggtgcatgctgcactccacaccagagctttgacgacaccactcgtttcaatgggggaattctgtggcatggtgtaaagcacagcaaaatcttcaataacgaagccaattttaatgtacttacgaattggcggtcacgttaatctttccatcaatattgctttcttcgtaaaggctcgagtttttatgctaaagattgcaagttgcttgtaaaagataagtacactgatccataatcgctgttgttgagggtgcatgctgcacaaaattaaagttaaaaagtaaaacccccgttccttaccagttcgggggttttactttttaaagagaacggtattattttaactttcaataattaccgtggcacaagcatagtggcgttcatctgccagcgttacatgcatatttacaacgccgagcttttccgccagttttaatgcctcaccccatagccgtagccgtggtttgccgagctcatcattgaatacttcaaattgattaaacgccagaccattgcggatcccggtgccaaacgcttttgctgcggcttctttcacagcaaaacgcttcgccagaaaacgcaccggctggtggtgcgttttccagattgcccattcgttatcgcttaatacgcggcgtgccaggcgctcaccggatcgggcgatcactgcttctatgcgagcgatctctacgatatccgtgcctaaacctaatattgccattagccacgcgcttccagcatcagacgcttcatttctgccaccgcatctttcagtccggtcatcactgcacgaccaataatggcatgaccgatattcagttcatgcatctcagggatggcggcaatagctttcacgttgtgataggtcagaccgtgaccagcgttaactttcagaccgagactagcggcaaaggtcgcggctttggcgatacgcgccagctcttgcgcctgttcggcgtcagttttggcatcagcatagcaaccggtgtggatctcgataaacggtgcgccaacctctgccgcagctttgatctgctcttcatcggcgtcgataaagagagaaacctggatcccggcatctgccagacgtttgcaggcatcgcgcattttgtcacgctgccctgcgacgtccaggccgccttcggttgttacttcctgacgcttttccggtaccagacagcaaaaatgtggcttcgtctcaacggcgatcgccagcatctcttcggtcaccgccatctccagattcatgcgggtatccagcgtctgacgcaggatgcgcacatcacggtcagtaatgtggcggcgatcttcacgtaaatgcacggtaatgccgtccgctcccgcctgctcagcaataaacgccgcctgcaccggatccgggtaagcagtaccgcgtgcgttacgcagcgttgcaatatggtcaatgttgacgcctaacagtaattcagccatgacaatcctcatcattcataatgtgttttcaccgttcgcttaggcataaactgccggaacagttccctgctctttaatggtttaccgccaagatacggcttaagcgccatgcgggtaaagcgtttcgcggcgcgtagtgtgtctgcgtcaggaaattcccgcgcgtttaacgcttttaactgccttccggtgaacgttttattgtcgataacgacgcttgcgataaaccctttttcttcgcgataacgatacgtcatggtgtcatctaccggctcgccgctacccgcacaatgggtaaaattgacgccatagcccagatgcccgagcagtgccaattcaaagcggcgcagcgcgggttctggcgtaccagtggcacctgcaagagactgaatgcagtgcaagtaatcgaaaaagagttcagagaagcgcgtctcgtattccagtacgcgggagagaagttcgttgatgtacagaccgctgtaaagcgtgataccgcttaatggcagcgccagcgagacagcttcagcactgcgcagcgttttgacttcgccacgcccgccgaaacgtagcaagagaggggtgaaaggctgtaatgcacctttcagagtagagcgtttagagcgtgcgcctttggcaaccagacgcacgcgacccgattcctccgtgaagacgtccagcatcaggctggtttcgctccacgggcgactatgcaggacaaatgcgcgctgccagccttccatcggagtgactcttaaagatcgtcaacgtaaccgagactgcgcagtgcgcgttcgtcgtcggcccaaccggatttcacttttacccacagttcaaggtggacaggcgcttcgaacatttcctgcatgtctttacgcgcttcaatcccgatggttttgatcttggcccctttgttgccaataaccatcttcttctgcccttcacgctcaacgagaatcaaaccattgatgtcataaccaccgcgttcgttagagacgaaacgttcgatctccacggtcacggagtacggcagttcagcgccgaggaaacgcatcagtttttcgcggatgatttcagacgccataaaacgctgtgagcgatcggtgatgtaatcttccgggaagtgatgggtcgcttcagggaggtgcttacgcacgattgctgcgatagtgtcgacattcagcccggtttcagcagagatcggcacgatatcgaggaagttcatctgacttgccaggaactgtaagtgcggcagcagatcggctttttcctgcacgttatccactttgttcaccgcgaggatcaccggcgctttgccatcgcgcagtttgttgagcaccatttcgtcgtccggcgtccagcgggtgccttcaacgacaaaaatcaccagctcaacgtcgccaatagagctgctcgccgctttgttcatcaggcggttaatagcgcgtttttcttccatatgcaggccaggggtatcaacgtagatcgcctgatacgcgccttcagtatggatccccacaatgcggtgacgagttgtttgcgctttgcgggaggtgatggagatcttctgccccagcagtttgttcaacaatgtggatttgccaacgttcggacgtccgacgatggcaataaatccgcagtaacttttatcgatgctcattccagctccagttttttcaacgcctgttcggcggcagcctgctcagccttacgacggcttgaacctgtgccaaccaccggttcactcaggccgctgacctggcagtggatagtaaattcctgatcgtgcgcttcgccacgtacctggactaccagataagtcggcagcggcagatggcgaccctgcaaatattcttgcaagcgcgttttcggatctttttgtttatcgcctgggctaatttcgtccaaacgagtttgataccagttgaggattaatttctcgacggtttgaatatcactgtcgaggaatacgccaccaattaatgcttcgacggtgtcggcgagaattgactcacgacgaaatccaccgcttttaagttcacctggccctaaacgtaagcactcgcctaactcaaattcgcgcgccagttccgccagcgtattgccacggaccagcgtggcgcgcatccggctcatatcgccttcatccacacgagggaaacggtgataaagcgcattggcgataacgtagctcagaatagagtcgcctaaaaattctaaacgctcgttatgtttactgctggcactacgatgagttaatgcctgctgcaacagttcctgatgattaaaagtgtagcccagcttccgttgaagccgattaattacgatggggttcatgcgataccaataaataaatgcgtcaacaattcagcacacgaaacagacctgatatacatggctctgctaactgcttcgctgcagtttcagtttaccggtatatggggaccaacgctgtttcgtgtgccgtggcaacctggaggtgccaaccttaaacttcgggggaatattctatacacaacgacgggggatgtcgttagccacgggagatttatctcataaataattcacgttgtcgccataacggcgacaacgtgaacgaagatgagctattaatggatgccgccaatgcgacttaagcgcacaccagtcggccattcgccttcttgcttatcgaagctcatccagatagccgttgcccgaccgaccagattcgcttcaggcacaaacccccaataacggctgtccgcgctgttgtcgcggttgtcgcccatcatgaagtattgtcccggaggaacaatccaggttgccagttgttgccctggctgctggtaatacatccccacctgatcctgcgcaatcggcactgtcagaattcggtgcgtcacatcacccagtgtctctttacgctcggaaagacgaattccattttctttggtttcgtttttcggcacttcaaagaatccgctggtcgcttccccaccattacggcgtgagaaggtctgaacgaaatcgctcggttccacgtttgagtaggtgaccggcagcgcgttttcacacgcctggccggaactgcatcccggttgaatcgtcagctctttcgagaccggatcataagtaactttatcgcccggtaaacccaccgcgcgcttgatgtaatcaagctttggatcttccggatatttaaagaccacgatatctccgcgtttcggatgaccggtttcgatcagcgttttctggtagataggatctttaatgccataagcaaacttttctaccagaataaaatcaccgattaacagagtcggcatcatcgaacctgacgggatctggaacggttcataaataaacgaacgcacaatcaatacgatagccagtaccggaaaaacagaagcaccggtttccagccagccaggcttcggcgcaacctttttcaacgttgctttatccagtgagtcaccggcagccgcctgcgccgctgcctgacgttcccgccgtttaggtgcgaaaaagaatttatccacgcaccataaaatgcccgtcaccagtgtggcaatcaccagaatcagggcaaacatattcgccatgccaactcctaagggttatttgttgtctttgccgacgtgcagaatggcgaggaacgcttcctgcggcagctcgacgttaccgatctgcttcatgcgtttcttaccttctttctgcttctgcagcagctttttcttacggctgatatcgccgccataacatttagccagtacgtttttacgcagctgtttcacggtggatcgcgcaataatgtgcgtaccaatcgctgcctgaatggcgatatcaaactgctggcgtgggatcagatctttcatcttctccaccaactcgcgaccgcggttttgcgaattatcacggtgggtgatcagcgccaacgcatcaacacgttcaccgttgattaatacgtctacacgtaccatgtcggacgcctggaagcgtttgaagttgtaatccagagacgcataaccacgcgaggtagatttcaggcgatcgaagaagtcgagcaccacttccgccatcgggatctcgtacgtcagcgccacctgattaccgtggtaaaccatattggtctgcacgccgcgtttttctacgcacagcgtaataacgttgccgagatatgcctgcggcagcagcatgtgacattcggcaatcggctcgcgcagttcgtagatgttatttaccgctggcagcttggatggactgtcgacgtaaataacttctcttgacgtggtttcaacttcatacactacggtcggcgcagtggtgatcagatccagatcgtattcacgttccagacgttcctggatgatctccatgtgcagcaggccgaggaagccgcagcggaaaccaaagcccagcgcgctggagctttccggctcatagaacagtgaagcatcgttcaggctgagtttacccagcgcgtcacggaaggcttcatagtcgtcggaacttaccgggaacagaccggcgtatacctgcggtttgactttcttaaagccaggcagcgccttttctgccggattacgcgccagcgttaaggtatcgccgactggagcgccgtggatatctttaatcgcacataccagccagcctacttcgccacatttcagttcagtgcggtcaacctgtttcggcgtgaagatgcccagacggtcggcgttataggtctgcccggtactcatgactttcactttgtcgcccttacgcagggtgccgtttttaatacggataagtgaaacaacgcccaggtagttgtcgaaccatgagtcgataattagtgcctgcaacgggccttccggatcgccttccggcggcggaatgtcgcgcaccagacgttcgagaacgtcctgcacgccaacgccggttttcgctgaacagcgcaccgcgtcggtggcgtcgatgccgacgatatcttcaatttcttccgccacgcgttcaggatcggctgccggcaggtcaatcttgttcagtaccggcaccacttcgagatccatttccatggcggtgtagcagtttgccagggtttgcgcttctacgccctgcccggcgtcgaccaccagcaatgcaccttcacaggcagccagcgaacgggaaacttcataggagaagtcaacgtggcccggggtgtcgataaagttcagctgataggtttcgccgtcagacgctttgtagtccagcgtcacgctttgcgctttgatggttatgccacgctcacgctcaagatccatggaatcgagaacctgcgcctccatttcacggtcagacaggccaccgcagatctggataatacggtcagacagcgtcgatttaccgtggtcaatgtgagctatgatcgaaaagttacgtatattcttcataaagtatgattattgtgccttaatgcccggttaaccaggcttttagaagtcgctgttctgagcttaacgtctgtattaatagaaacgccgcattctacactacaacattgaggcgaggaaatgttcataccgtatggattgtggtatctggaaacgtcctcgcatttgttatgcaaaatgcaacaaagccagtgaaatcactggctcgcgtcttccgaagatgtttcaaatcgcacaaggccaggcggcaatgccacgcttaagatgatcggttgccattctgcccgggcagcaaacttacgcgagtagccgcgcgcaatcaggaacccgccaataccgccgaggaccgcaccacataatgctgcgacgtcagaagcaaagagtagctgaaatagcgaagcgatgaggaataatcccaccagcggcgacatataaaccagtaatgcggagctaagcaggctgccttcggcgatccccaattccactttttgccccggcactaacggctcatcacagggtacgacaatggtatgcgtggtttgcgggccaagtttatttaacacgcggctaccgcaaccggcgcgtgaagcgcagctgctgcatgaagctttaacatcacaactgaccagcgcctgcccgttttgccaggagacgacggtagcccactctttgatcattgcgctgccccgaacttaatattctcggcaatgcgtttcgccgtttgcggcggcagttcaccgacaatggtgatttcggcgttatcacgtacgcttgtactgacggttctgcgtccggtgcgcaacatctgatcggtgctcgatggcgtagcgcggttaacgtttaccgagaagctgaataatccgtcggaatagagacgtgattcgataggcatgttgtccatcgtcggtagcggacgtcgactactggaaacttcgctaaaaccctgtggcaaccaggttggcgtccagctgaatttagctttttcacctacaggaacagaaagcaacggcggcaaatttgccttcgccagcgtctgcatactgctgctgatatcctgattgacgttaaaagcaatcacgcgaaattgttccagcgtttcaccatcgcgatcaaggagatcaacccgcatcggtaatttcgattcggtgtccatccacacgatgtagctgtagcgtgtaccatctcgggcaaccacgcgaatgacttcgcaaagacgatcagcaatacgcgtgcgcccgacggagataaagtcgtagtaaggagaaaggcgtttgaaatcggtatagataagcgatggcagagaatcaacaatgtaatcgccattaagcgtgaacggttcaagtcccggttcaaaatagctgatttcattgccgcgctgtaccacttcccggcgcgggccatccatttgcaacaattgtgcaagagggcggttatcgaggcgtgcatgtcgataacgcagagactcaacaccctgtttattgatgctgatgaatgacagctcgtaattcagtgactgactggccaggttcatctgctgtaataacgccccggacgcgggagtggccgaggcgttagcagagaataacaggctacctgtcactaatgacatggcaaaccaaagttgcttcattactgcgattgcgttcctaaagtttgaattcctggcacctgtacagcggcttgctgggtttgcgcctgctcaaactgaagctgttcagagtggagtcggcgttgcagttcgtaatcctgcaacattgcattaatgcgacgacgctgctcctgtacctgctgctgttgaccattgtttgcggtcgcttcagaaggtactcccaggcttaccgggctggctttacccatcatcggcagtgtattaaataccggcgtttcgggctgctgggacgtttcagattgtccattatagtgctggacgccaacgataactgcaagcgatacgcatgctgctacgcccatttgggtaagctgtgccgcccacggacgtactttctgccagaatggcattttctgccattgatgcggcgcaggctgggcttccgggatcaatgtcgccggttgacgtactggctcttcttcaatggcggccatcacgcgtgaagagatatcgaaatggagcacctcgggagtatcaccccgcattgagtcacggattaagtgatagctttcccaggttttctgcatttctgggttatgagccagttcgttaagcagctcactatccagcgtttcgccatccattaaagcggaaagttgttctttctgcatgcctaatacccttatccagtatcccgctatcgtcaacgcctgataagcggttgaactttgttatcaatagcttccctcgctcggaagatacgtgaacgcaccgtacctaccggacaatccatgatagcggctatctcttcatagctcaggccatccagctcccgcaaggttattgccatgcgcaaatcttccgggagggactcaatagttcggaaaactatctgtctcagttcttctgacaacattaagttctcagggttcgaaatttctttcaacgcgccgccactttcgaagttttcagcttcaatggcatccacatcactggaaggtggacgacgcccctgagcaaccaggtaatttttcgctgtatttacagcaatccgatacagccatgtataaaaagcgctatctccccggaacgaatccagcgcacgataggctttaataaaagcttcttgtaccacatcgggaacatcacccgacggcacatagcgggaaaccagactcgccactttatgctgatagcgcactaccagtaggttaaaggctttctgatctcccttctggacccgttcaaccaggacctggtccgttaactgctcgctcatccgaggtaaagtctccccaaaccaaatttccacgcgctatcgaaacgccactccattagctgcaatttgagcaagcaaagggttagagtgtctcgtttttgtaaagttccgtaacgcatctgtttttgtttgtcatgctgtagacggatcattatctatcattataagtctacagaatctgaacatcgcattatctgtgtagaaatgcccatttaactgcctgaagagtaacccaacggcctttttatttcaccacctaatcctccaccagccagtaacttctctttttctcgccgccctgcgtcagcgtgtttagccactgtaacaaatattaaaatagcaggtgtttattcgcacaacatgatgctatgctgaccaaacagtgtttagtaaattaaacaaagaaaatgaatactctcccagaacattcatgtgacgtgttgattatcggtagcggcgcagccggactttcactggcgctacgcctggctgaccagcatcaggtcatcgttctaagtaaaggcccggtaacggaaggttcaacattttatgcccagggcggtattgccgccgtgtttgatgaaactgacagcattgactcgcatgtggaagacacattgattgccggggctggtatttgcgatcgccatgcagttgaatttgtcgccagcaatgcacgatcctgtgtgcaatggttaattgaccaaggggttttgtttgatacccacgttcaaccgaatggcgaagaaagctaccatctgacccgtgaaggtggacatagtcaccgtcgtattcttcatgccgccgacgccaccggtagagaagtacaatccacgctggtgagcaaggcgcagaaccatccgaatattcgtgtgctggagcgcagcaacgcggttgatctgattgtctctgacaaaattggcctgccgggcacgcgacgggttgtaggcgcgtgggtatggaaccgaaataaagaaacggtggaaacctgccacgcaaaagcagtggtactggcaaccggcggtgcgtcgaaggtgtatcagtacaccaccaatccggatatttcttctggcgatggcattgctatggcgtggcgcgcgggctgtcgggttgccaatctcgaatttaatcagttccaccctaccgcactgtatcacccacaggcacgcaatttcctgttaacggaagcactgcgcggcgaaggcgcttatctcaagcgcccggatggcacgcgttttatgcccgattttgatgagcgcggcgaactggccccgcgcgatattgtcgcccgcgccattgaccatgaaatgaaacgcctcggcgcagattgtatgttcctcgacatcagccataagcccgccgattttattcgccagcatttcccgatgatttatgaaaaattgctcgggctggggattgatctcacacaagaaccgataccgattgtgcctgctgcacactatacctgcggtggtgtaatggttgatgatcatgggcgtacggacgtcgagggcttgtatgccattggcgaggtgagttataccggcttacacggcgctaaccgcatggcctcgaattcattgctggagtgtctggtctatggctggtcggcggcagaagatatcaccagacgtatgccttatgcccacggcgtcagtacgttaccgccgtgggatgaaagccgcgttgagaaccctgacgaacgggtagtaattcagcataactggcacgagctacggctgtttatgtgggattacgttggcattgtgcgcacaacgaagcgcctggaacgcgccctgcggcggataaccatgctccaacaagaaatagacgaatattacgcccatttccgcgtctcaaataatttgctggagctgcgtaatctggtgcaggttgcggaattgattgttcgctgtgcgatgatgcgcaaggagagtcgtggcctgcatttcacgctggattatccggaactgctcacccattccggtccgtcgatcctttcccccggcaatcattacataaacagataaaaagcctgggtcagcgccgtatacgcttcggaatagttctggtctggcccacgaatgactaagcgatcgctaaagcattctcccgcctgcggggagaatgccagcagcacccgatgcggcagtcgcgcttcgttttccgccacatccgtccgcaaacgtaaatgccagcccatgcttaatgccagctccgtaaaaccattaccaatctgctctggcagcactacgcagaaaaatccctcttcggtaatgcactccgccgcacaggtcagcagcgatgggtgatcaagcgtagtggtatagcgagcctgttcccgttgaggggtcgcgcactctactccctgctgatagtaaggtgggttactgatgattaaatcgaagcgtactgtctgctgtgtgatccactgctgaatatccgccgtatggacgttaatccgctctgcccacggggactggttgatattttcctgcgcctgcgcggcagcttcactttccagctcaacggcatcaattatcacgctgtcatcggttcgctgcgccagcattaatgccagcaacccgctacccgcgccgatatcaaggcaacgtttcaccccagccaccggtgcccatgcgcccagcaaaatgccatccgttcccactttcatcgcacagcgatcgtgagcaacaaaaaactgtttaaaagtaaatccattacgacgaagcacggatgtagactgtgacatgaaaataaaaccttgcaggaaaaacggcgatagcaccgggtgagaacaatacccgagaagcgatatccatacaaacagatgaagattgcagccgtaacgtctataatcagcgccccacacagaggtagaacatgactgtaacgactttttccgaacttgaactcgacgaaagcctgctggaagccctccaggataaaggtttcactcgcccgaccgccattcaggctgccgccattccgcctgcgctcgatggccgtgatgtactcggttctgcgccgacaggcaccggtaaaacggcggcgtatctgctgccagcgttgcagcacctgctcgatttcccgcgtaagaaatccggtccgccgcgtattttgatcctcaccccaactcgcgagctggcgatgcaggtggccgatcatgcccgcgaactggcgaaacatacgcatctggatatcgccaccatcaccggcggcgtagcctatatgaaccacgcggaagtgttcagcgaaaatcaggacatcgtggtcgccacgaccggacgtctgctgcaatacataaaagaagagaacttcgattgccgcgcggttgaaacgctgatcctcgacgaagcagaccgtatgctggatatgggctttgctcaggatatcgaacatattgctggcgaaactcgctggcgtaaacagaccctgctcttttcggcaacgctggaaggcgatgcgattcaggactttgccgagcgtctgctggaggatccggtggaagtttctgcgaatccgtccacccgtgagcgcaaaaaaattcatcagtggtattaccgcgccgatgatcttgagcataaaaccgcgttgctggtgcatctgttaaaacagcctgaagcgacccgctcaattgtgtttgtgcgtaagcgtgaacgtgtgcatgagctggcaaactggctgcgcgaagcgggcatcaacaactgctatctcgaaggtgagatggtacaaggcaagcgtaacgaagcgatcaagcgtttgaccgaaggtcgcgtaaacgtactggttgcaaccgatgttgccgcgcgcggtatcgacattcctgacgtcagccacgtctttaacttcgatatgccgcgcagtggcgatacttatttgcaccgtatcggacgtaccgcgcgcgccggtcgtaaaggcaccgcgatttcgctggtggaagcccatgaccatttgctgctgggcaaggttggccgttacattgaagagccgattaaagctcgcgttattgatgagttacgcccgaaaacgcgtgcgccaagcgagaagcagaccggcaagccatcgaagaaagtactggcaaaacgcgccgagaagaaaaaagctaaagagaaagagaaaccgcgtgtgaaaaaacgccatcgcgacaccaaaaatattggtaagcgccgtaaaccaagcggaacgggcgtgccaccgcaaacgacagaagagtaatctcaatgccgggtttaagcctggtattaaaagtgctggcaaacgcaaaactgcctgatgcgctacgcttatcaggcctacgtggctcatgcaatatattgaatttgcacgatcttgtaggccggataaggcgttcacgccgcatccggcatgaataaagcgcactttgtcgacaagttaaatgccgggtttaatcccgacattatttttatccagccacaaaactctcttcaacacactgaataaaagtgtgcatcgccgggctaaccgcttttccagcatggtgtgcgcacatggccgtaatggtctgcgactgttcgccaaaaggcaattcaattaattctccgctctcaagctctttttccaccgcaaagcggggcaagtaactgacaccgatattcgccgcgacacaacgtttgatactttcaatgcttaacagctcaatggtgttttccaccgtgatccgccgctggcgcagcgtgctctcaaatatctgccggaagacacattgtggttcgttgataataaagctacaggcgttatgtcttcccggctcagtaaaatcgatatctgcaatttgcggtgaagccaccagcaccagcggttgttcacccaactctcgtcggttcagaacatcatcattccctacgcgataaaaaaccccgacatcggcctcatcattcagtagcgcatcacggatcacgtaacagttcagcgactgcaacgataaacgcacttttggagcgcgttgccgaaaacgctgcaacacctgcggcattcggtaagagagcaacgtttcgcctgaaacaacgcgtagttccccgtccggatccgactcttttttcgcagcctcacgaagcgtatccatcactcgggtaagttcatagatgtgcggcagcaacttttttccttcgcgggtaaggcacattcgtcgaccaattttctcaaacaattgtaccgagaactcctgctcaagctgctgaatatgaaaagtcaccgtcgattgtgtacagcacaatttttgcgaagctcgcaaaaaggaaccctcttccaccacggttttaagtgtaataaaacggcgcagatccataaccccaaacctatcgaaaatatcgaatttagaatgtaaaaacattcatttttttaaatgttccgtgtcgggtactgtctaccaaaacagaggagataacaagtgacaccgacccttttaagtgctttttggacttacaccctgattaccgccatgacgccaggaccgaacaatattctcgcccttagctctgctacgtcgcatggatttcgtcaaagtacccgcgtgctggcagggatgagtctgggatttttgattgtgatgttactgtgtgcgggcatttcattttcactggcagtgattgacccggcagcggtacaccttttgagttgggcgggggcggcatatattgtctggctggcgtggaaaatcgccaccagcccaacaaaggaagacggacttcaggcaaaaccaatcagcttttgggccagctttgctttgcagtttgtgaacgtcaaaatcattttgtacggtgttacggcactgtcgacgtttgttctgccgcaaacacaggcgctaagctgggtagttggcgtcagcgttttgctggcgatgattgggacgtttggtaatgtgtgctgggcgctggcggggcatctgtttcagcgattgtttcgccagtatggtcgccagttaaatatcgtgctcgcgctgctgctgatctattgcgcggtacgcattttctattaattaaaaaagcggaagaggtcgccctcttccgcttagtaacttgctacttaagccttacaggctttcagtaaaggtacgagcgataacgtcgcgctgctgttccggagtcagagagttaaagcgaactgcataacctgatacacggatggtcagctgcggatattttccggatgcttaactgcatcttccagagtttcacgacgcagaacgttaacgttcaggtgttgaccaccttcaacgcgaacttctggtttcacttctactggaacttcacggtattcaatgtcacccagtttgcttactgcaaccacttcatcttctgcataacctgcttttgcaacgatgcaacgcgcttcgcctttttcgctgtccagcagccagaaagagttcagcagatcgtcgttagcggctttagtaatctggatacctgtaatcatgtgatgcctccccggcaaaattatttgatttattcagcctgtcgcggccaattggtaaaaccattgttgcttgagtgtatatatactcctcaacaacccttgattccttgatttaaatcaataaaaaccacacatcgattgtggtcgtaaatggattttattgttttacatcaacttatgcgggtgtgaaattttaccaatttacatttttttgcactcgtttaagtctaaaaaatgagcatgattttgttctgtagaaagaagcagttaagctaggcggattgaagattcgcaggagagcgagatggctaacgaattaacctggcatgacgtgctggctgaagagaagcaacaaccttattttcttaatacccttcagaccgtcgccagcgagcggcagtccggcgtcactatctatccaccacaaaaagatgtctttaacgcgttccgctttaccgagttgggtgacgttaaagtggtgattctcggccaggatccttatcacggaccgggacaggcgcatggtctggcattttccgttcgtcccggcattgccattcctccgtcattattgaatatgtataaagagctggaaaatactattccgggcttcacccgccctaatcatggctatctcgaaagctgggcgcgtcagggcgttctgctgctcaatactgtgttgacggttcgcgcaggtcaggcgcattcccacgccagcctcggttgggagacgtttactgataaagtcatcagcctgattaaccagcaccgcgaaggcgtggtgtttttgttgtggggatcacatgcgcaaaagaaaggggcgattatagataagcaacgccatcatgtactgaaagcaccgcatccgtcgccgctttcggcgcatcgtggattctttggctgcaaccattttgtgctggcaaatcagtggctggaacaacgtggcgagacgccgattgactggatgccagtattaccggcagagagtgagtaaatttgcggggaaatgccggatggcagagttgccacccggctgatttatcaggctttattctgacgccaccattcaccaagcaaaacgccggttgcgacagagatattcagcccggcaacgttgcccgtaccgtcaatcttcacgcgcagatcgttcggatcgcgtgcggcatccggtaacccttcatattcctgacccagcaccagtaccattttcgctggcagactggttttgaacagcggtttaccctgctcgctggaagtggtcactacggtgtaacctgcctgacggaaatcatccagcacgttaacaatgttgtcgccagtaatcggctgaacgtgctctgcgccgccttctgcggtacggatagccgcccccgactccagcagtgccgcatcctgcaccacaacgcctttcacgccgaagtgcgcgcagctgcgcatcatgccacccaggttatgcgggttagattcgttttccagcgccagtacacaatcctgcgcgcctgcctggcttacccactgctgcacggttgtaccgttacgctttttgatcaagaagcaaacgccgccgtgatgttccgtgcctgacgcttttgtcaattccgcttcatccaccacatggtacgctttgcggtttgccgccatccagcgcaaggcttctttaaaacgtggcgttacgctctggataaaccaggcgcgaacaatcgcttccggacggctctggaacagtgcctgacatgcattttcgccgtagacgcgggtttcttccgcacgctgacgacgcaaaacttctggatcaatataacttttaccactgatgccaccgtgatcggccttttccggcgtctcatcacccggcgcgcgggaaaccgtgcgccacggcgaatcttcccacttgcggtcacggggctgactctgtttgtcatcgcgggcggggcgacggccaccgtcagcacgagattttcctggacgcccgccccctttcccggtacgcgggttgtgggtacgtttatcagaatcatcatcactgcggacatacatcactttgaccttgccgcttttacctttcatttcatcgttcatgcttttctccaccagcgctgcgcgaagcgcgcagattacccgaagtccgcgcggttcgccatgatttcgtaccaaagcctgcgactatcatacctattgaataaaacagattgttgtctggaacaatgtccccgataatatgtaacatattagaaacataccggcgtcgttgccgataagtctccttactcatcccgaggttagttatgaataccgtttgtacccattgtcaggccatcaatcgcattcccgacgatcggatcgaagatgcggcaaaatgcggacgctgcggtcacgacttgtttgacggagaggtgattaatgcgaccggtgaaacactcgacaaattgctgaaggatgatctacctgtggtgatcgacttctgggcaccgtggtgcggcccctgccgtaatttcgcaccaatttttgaagatgtcgcgcaagagcgtagcggtaaagtgcgctttgtgaaagtgaataccgaagctgaacgtgaattgagcagtcgctttggaattcgtagtataccgacgatcatgattttcaaaaacggtcaggttgtcgacatgcttaatggcgcagtaccgaaagcgccgttcgatagctggctgaacgaatctctttaatcttaccggggcgcatcttgtgccccgttttctcctctgcgacaatggcgttttttcgacgctctcttatgaccgaaaacgctgttctccagttacgcgccgagcgtattgcgcgcgcaacacgtccttttcttgcccgcggtaatcgcgttcgtcgctgccaacgctgtcttttgccagagaaattatgtctctgttcgacaattaccccagcacaagcaaaaagtcgcttctgtttgctgatgttcgacaccgagccaatgaagcccagtaataccgggcgtctgattgctgatattttgcctgataccgttgcgtttcaatggtcgcgtaccgaaccctcgcaggatttgctggatctggtacaaaacccggattatcagccaatggtggtctttcccgcctcgtatgctgatgagcaacgggaagtgatcttcacaccacctgccggtaagccaccgctgtttatcatgctcgatggtacctggccggaagctcgcaagatgtttcgtaaaagtccgtatctggataatcttcccgtcatttccgtcgatctttcccggctttctgcctatcgcctgcgtgaagcccaggctgcaggccaatattgtactgccgaggtagccatcgcactgttagatatggccggcgataccggggcggcagcagggttaggcgagcattttacccgctttaaaacacgctatctggcaggaaaaacgcaacatctgggtagcatcacagcagaacagttagaaagcgtttaaaatcattcggtcacttctgcgggagaccggtatgagtcagcgaggactggaagcactactgcgaccaaaatcgatagcggtaattggcgcgtcgatgaaacccaatcgcgcaggttacctgatgatgcgtaacctgctggcgggaggctttaacggaccggtactcccggtgacgccagcctggaaagcggtgttgggtgtgttggcctggccggatattgccagcttgccctttacacccgaccttgcggttttatgtaccaatgccagccgtaatcttgctcttctggaagagctcggcgagaaaggctgtaaaacctgcattattctttccgccccggcatcgcaacacgaagatctccgcgcctgcgccctgcgccataacatgcgcctgcttggaccaaacagtctgggtttactggctccctggcaaggtctgaatgccagcttttcgcctgtgccgattaaacgcggcaagctggcgtttatttcacaatcggcagccgtctccaacaccatcctcgactgggcgcaacagcgtgagatgggcttttcctactttattgcgctcggcgacagcctggatatcgacgttgatgaattgctcgactatctggcgcgcgacagtaaaaccagcgccatcctgctctatctcgaacagttaagcgacgcgcgacgctttgtttcggcagcccgtagtgcctcgcgtaataaaccgattctggtgattaaaagcggacgtagcccggcggcacagcgactgctcaacacgacggcaggaatggacccggcatgggatgcggctattcagcgtgccggtttgttgcgggtacaggatacccacgaactgttttcggcggtggaaacccttagccatatgcgcccgctgcgtggcgaccggttgatgattatcagcaacggtgctgcgcctgccgcgctggcgctggatgccttatggtcacgcaatggcaagctggcaacgctaagcgaagaaacctgccagaaattgcgcgatgcattgccagaacatgtggcagtctctaaccctctcgatctgcgcgatgacgccagcagcgagcattatgtcaaaacgctggacattctgctccacagccaggattttgatgcgctgatggttattcattcgcccagcgccgctgctcccgcaacagaaagcgcgcaagtattaattgaagcggtaaagcatcatccccgcagcaaatatgtctctttgctgacgaactggtgcggcgagcactcctcgcaagaggcacgacgtttattcagcgaagccgggctgccgacctaccgtaccccggaaggaaccatcactgcttttatgcatatggtggagtaccggcgtaatcagaagcaactacgcgaaacgccggcgttgcccagcaatctgacttccaataccgcagaagcgcatcttctgttgcaacaggcgattgccgaaggggctacgtcgctcgatacccatgaagttcagcccatcctgcaagcgtatggcatgaacacgctccctacctggattgccagcgatagcaccgaagcggtgcatattgccgaacagattggttatccggtggcgctgaaattgcgttcgccggatattccacataaatcggaagttcagggcgtcatgctttacctgcgtacagccaatgaagtccagcaagcggcgaacgctattttcgatcgcgtaaaaatggcctggccacaggcgcgggtccacggcctgttggtgcaaagtatggctaaccgtgctggcgctcaggagttgcgggttgtggttgagcacgatccggttttcgggccgttgatcatgctgggtgaaggcggtgtggagtggcgtcctgaagatcaagccgtcgtcgcactgccgccgctgaacatgaacctggcccgctatctggttattcaggggatcaaaagtaaaaagattcgtgcgcgcagtgcgctacgcccattggatgttgcaggcttgagccagcttctggtgcaggtttccaacttgattgtcgattgcccggaaattcagcgtctggatattcatcctttgctggcttctggcagtgaatttaccgcgctggatgtcacgctggatatctcgccgtttgaaggcgataacgagagtcggctggcagtgcgcccttatccgcatcagctggaagaatgggtagaattgaaaaacggtgaacgctgcttgttccgcccgattttgccagaagatgagccacaacttcagcaattcatttcgcgagtcaccaaagaagatctttattaccgctactttagcgagatcaacgaatttacccatgaagatttagccaacatgacacagatcgactacgatcgggaaatggcgtttgtagcggtacgacgtattgatcaaacggaagagatcctcggcgtcacgcgtgcgatttccgatcctgataacatcgatgccgaatttgctgtgctggttcgctcggatctcaaagggttaggcttaggtcgacgcttaatggaaaagttgattacctatacgcgagatcacggactacaacgtctgaatggtattacgatgccaaacaatcgtggcatggtggcgctagcccgcaagctcgggtttaacgttgatatccagctcgaagaggggatcgttgggcttacgctaaatcttgcccaacgcgaggaatcatgagtaaggtactggaaatgttgaccacttaatcgggactggtgttattattgcccgcttatgtcgtctgcattgcacagaggacccttcaatgaacagagaagaaatgcactgtgatgttgtcaaaatttaagcgtaataaacatcaacaacaccttgcccaactacccaagatttctcaatcagttgatgatgtcgatttcttttacgctcccgccgacttccgggagacgctgctggaaaaaatagccagcgcgaagcagcgcatttgcattgtcgccctgtatctcgaacaggatgacggtggcaaaggcattctgaacgcgttgtatgaagctaaaaggcagcgtccggaactggatgtgcgggtgctggtcgactggcatcgtgcacaacgtggacgcattggcgctgcggcatctaacactaacgctgactggtactgccgcatggcgcaggaaaatccgggcgtagatgttccggtttatggcgttccaatcaatacccgtgaagcccttggtgttctgcactttaaaggctttatcatcgacgatagcgtactttatagcggtgccagcctgaacgatgtttacctgcatcagcacgataaatatcgctacgaccgttatcatctgatccgtaaccgtaagatgtcagacattatgtttgaatgggttacacagaatattatgaatggccgcggcgttaatcgtctggatgatgttaatcggccaaaaagcccggaaatcaagaacgatattcgtctgttccgccaggagctgcgtgatgccgcttatcatttccagggcgatgccgacaacgatcagctttccgtaacgccgctagtggggctggggaaatcgagtctgttgaacaagaccattttccatcttatgccttgtgccgagcagaaactaaccatctgtacgccatacttcaacctgccagcaatccttgtgcgcaatattatccagttgctgcgcgaagggaaaaaggtcgaaattattgttggtgataaaaccgcgaacgacttctacattccggaagatgaacctttcaagataattggcgcattgccttatctctatgagatcaatctgcgtcgtttcctgagccgtttgcagtattacgtcaatactgaccagctagtggttcggttatggaaagatgacgacaacacctatcacctaaaagggatgtgggttgatgataagtggatgttgatcaccggtaataacctgaacccgcgcgcctggcgtctggatctggaaaacgccattttgatccacgatccacaactggagcttgcgccgcagcgggagaaagaactggagctgatccgcgagcataccaccatcgttaagcactatcgcgatctgcaaagtattgccgattatccggtgaaggttcgtaaactcatccgccgtttgcgccgtatccgcatcgaccgattaattagccgcatcctgtaatcacaaccccgtcctgtacggggtttgttttttggaggccacgttttgcgtattctttttgtctgttcgctattgttactttctggatgcagccatatggctaacgatagctggagcgggcaggataaagctcaacactttatcgcctcggcgatgctttccgccgccggaaatgaatattcacagcatcaggggatgagccgggatcgcagtgccatgtttggattgatgttctctgtcagtttgggggcgtcaaaagagctttgggatagccgccccgaagggagcggctggagctggaaggatttggcctgggatgtcgccggtgcaagcaccggctataccgtctggcaactgacccgtcactaaagacgcatccccttccctttgcgatgtagcatcaaagaaaccagaaacgccaccacggccatcaaggtcacataccagaagaaggctgtttccattcctattgatttcagcgacaacgctacgtactccgccgaaccaccaaatatagcattagcgaccgcatatgacagaccaacgcctaatgcgcgaacctgtgccgggaacatctcagccttcagtattccactgattgatgtataaaaactcactatcagcagggcacacatcaccagaccaaaagcggcataaggcgaggaaacgttttgcaatgctgagagaataggaacggtaaaaatggctgccagcgaaccgaaacataacattgaggtacggcgaccaatcttatccgacagcgcgccaatgagtggttgaataagcatgaatacaaacaatgcggcagtcataatgccactcgccacgttggcatgcattcccgcagtatttaccagatacttctgcatataagtggtgaaggtatagaaacaaagggagcccgcagcggtaaaaccgagaaccatgatgaatgcacggcgattgcgccataatcctttcagagatccagcttcttttaaagcgcgcgtttcttgttgcgaagtttcatctaactgacgacgtaaccacaacgccacaacagctaacacagctcctaacgcgaaaggaatacgccatccccactctctgagtgcagcgtcttccatggtgtgttgtaaaaccacgacaaccagtagggctagcagttgtccgccgatcaacgtcacatactgaaatgatgcgtaaaaacctttgcgcccttcaacggcaacttcactcatataggtggcgctggtgccatattctccgccaacagataatccctgaaataaacgcgcgagaagcaataatgccggagcccacgtacctatagtttcataacctgggaggcaggcgataaccagcgatccgaaacacatcatacacaccgataacagcatcgattttttgcgaccatgtttatcggctatgcggccaaatagccaaccgcctattgggcgcatcaggaatcccgcagcaaaaacacctgctgtttgtagtagttgagtcgtcgtgttcccggaagggaagaaaatgtgggcaaagtagagtgaacagaacgagtagacatagaaatcgaaccactcgaccagattacctgaagaggcccccacaatcgcccaaatgcggcgacgagtatcactacttgtcagtttgctgtctgccgttacagtactttcagccatgccattatgtctcctgccgtaatccgatgcttttgtcggtcgcttttatctatttcttttggtaaagaaaatgttatacatttgttgcgtatcattatgcaaccttaaccatgaatttagttagcaggaaaatggttattgaggagcttaaggataaatttctggtaaggaggacacgtatggaagtaggcaagttggggaaaccgcatccgttgctgaatctggcatatgtgcgagtataagacgcgcagcgtcgcatcaggcatttttttctgcgccaacgcaaaaaggccatcgtgactgatggcctttcgcttaatttgatgcctggcagttccctactctcgcatggggagaccccacactaccatcggcgctacggcgtttcacttctgagttcggcatggggtcaggtgggaccaccgcgctacggccgccaggcaaattctgttttatcagaccgcttctgcgttctgatttaatctgtatcaggctgaaaatctttctctcatccgccaaaacagcttcggcgttgtaaggttaagcctcacggttcattagtaccggttagctcaacgcatcgctgcgcttacacacccggcctatcaacgtcgtcgtcttcaacgttccttcaggacccttaaagggtcagggagaactcatctcggggcaagtttcgtgcttagatgctttcagcacttatctcttccgcatttagctaccgggcagtgccattggcatgacaacccgaacaccagtgatgcgtccactccggtcctctcgtactaggagcagcccccctcagttctccagcgcccacggcagatagggaccgaactgtctcacgacgttctaaacccagctcgcgtaccactttaaatggcgaacagccatacccttgggacctacttcagccccaggatgtgatgagccgacatcgaggtgccaaacaccgccgtcgatatgaactcttgggcggtatcagcctgttatccccggagtaccttttatccgttgagcgatggcccttccattcagaaccaccggatcactatgacctgctttcgcacctgctcgcgccgtcacgctcgcagtcaagctggcttatgccattgcactaacctcctgatgtccgaccaggattagccaaccttcgtgctcctccgttactctttaggaggagaccgccccagtcaaactacccaccagacactgtccgcaacccggattacgggtcaacgttagaacatcaaacattaaagggtggtatttcaaggtcggctccatgcagactggcgtccacacttcaaagcctcccacctatcctacacatcaaggctcaatgttcagtgtcaagctatagtaaaggttcacggggtctttccgtcttgccgcgggtacactgcatcttcacagcgagttcaatttcactgagtctcgggtggagacagcctggccatcattacgccattcgtgcaggtcggaacttacccgacaaggaatttcgctaccttaggaccgttatagttacggccgccgtttaccggggcttcgatcaagagcttcgcttgcgctaaccccatcaattaaccttccggcaccgggcaggcgtcacaccgtatacgtccactttcgtgtttgcacagtgctgtgtttttaataaacagttgcagccagctggtatcttcgactgatttcagctccatccgcgagggacttcacctacatatcagcgtgccttctcccgaagttacggcaccattttgcctagttccttcacccgagttctctcaagcgccttggtattctctacctgaccacctgtgtcggtttggggtacgatttgatgttacctgatgcttagaggctttcctggaagcagggcatttgttgcttcagcaccgtagtgcctcgtcatcacgcctcagccttgattttccggatttgcctggaaaaccagcctacacgcttaaaccgggacaaccgtcgcccggccaacatagccttctccgtccccccttcgcagtaacaccaagtacaggaatattaacctgtttcccatcgactacgcctttcggcctcgccttaggggtcgactcaccctgccccgattaacgttggacaggaacccttggtcttccggcgagcgggcttttcacccgctttatcgttacttatgtcagcattcgcacttctgatacctccagcatgcctcacagcacaccttcgcaggcttacagaacgctcccctacccaacaacgcatcagcgtcgctgccgcagcttcggtgcatggtttagccccgttacatcttccgcgcaggccgactcgaccagtgagctattacgctttctttaaatgatggctgcttctaagccaacatcctggctgtctgggccttcccacatcgtttcccacttaaccatgactttgggaccttagctggcggtctgggttgtttccctcttcacgacggacgttagcacccgccgtgtgtctcccgtgataacattctccggtattcgcagtttgcatcgggttggtaagtcgggatgacccccttgccgaaacagtgctctaccccggagatgaattcacgaggcgctacctaaatagctttcggggagaaccagctatctcccggtttgattggcctttcacccccagccacaagtcatccgctaatttttcaacattagtcggttcggtcctccagttagtgttacccaaccttcaacctgcccatggctagatcaccgggtttcgggtctataccctgcaacttaacgcccagttaagactcggtttcccttcggctcccctattcggttaaccttgctacagaatataagtcgctgacccattatacaaaaggtacgcagtcacacgcctaagcgtgctcccactgcttgtacgtacacggtttcaggttctttttcactcccctcgccggggttcttttcgcctttccctcacggtactggttcactatcggtcagtcaggagtatttagccttggaggatggtccccccatattcagacaggataccacgtgtcccgccctactcatcgagctcacaatatgtgcatttttgtgtacggggctgtcaccctgtatcgcgcgcctttccagacgcttccactaacacacacactgattcaggctctgggctgctccccgttcgctcgccgctacttggggaatctcggttgatttcttttcctcggggtacttagatgtttcagttcccccggttcgcctcattaacctatggattcggttaatgatagtgtgtcgaaacacactgggtttccccattcggaaatcgccggttataacggttcatatcaccttaccgacgcttatcgcagattagcacgtccttcatcgcctctgactgccagggcatccaccgtgtacgcttagtcgcttaacctcacaacccgaagatgtttctttcgattcatcatcgtgttgcgaaaatttgagagactcacgaacaactctcgttgttcagtgtttcaattttcagcttgatccagatttttaaagagcaaatatctcaaacatcacccgaagatgagttttgagatattaaggcaggtgactttcactcacaaaccagcaagtggcgtcccctaggggattcgaacccctgttaccgccgtgaaagggcggtgtcctgggcctctagacgaaggggacacgaaaattgcttatcacgcgttgcgtgatattttcgtgtagggtgagctttcattaatagaaagcgaacggccttattctcttcagcctcactcccaacgcgtaaacgccttgctatttacttttcatcagacaatctgtgtgagcacttcaaagaacgcttctttaaggtaaggaggtgatccaaccgcaggttcccctacggttaccttgttacgacttcaccccagtcatgaatcacaaagtggtaagcgccctcccgaaggttaagctacctacttcttttgcaacccactcccatggtgtgacgggcggtgtgtacaaggcccgggaacgtattcaccgtggcattctgatccacgattactagcgattccgacttcatggagtcgagttgcagactccaatccggactacgacgcactttatgaggtccgcttgctctcgcgaggtcgcttctctttgtatgcgccattgtagcacgtgtgtagccctggtcgtaagggccatgatgacttgacgtcatccccaccttcctccagtttatcactggcagtctcctttgagttcccggccggaccgctggcaacaaaggataagggttgcgctcgttgcgggacttaacccaacatttcacaacacgagctgacgacagccatgcagcacctgtctcacagctcccgaaggcaccaatccatctctggaaagttctgtggatgtcaagaccaggtaaggttcttcgcgttgcatcgaattaaaccacatgctccaccgcttgtgcgggcccccgtcaattcatttgagttttaaccttgcggccgtactccccaggcggtcgacttaacgcgttagctccggaagccacgcctcaagggcacaacctccaagtcgacatcgtttacggcgtggactaccagggtatctaatcctgtttgctccccacgctttcgcacctgagcgtcagtcttcgtccagggggccgccttcgccaccggtattcctccagatctctacgcatttcaccgctacacctggaattctacccccctctacgagactcaagcttgccagtatcagatgcagttcccaggttgagcccggggatttcacatctgacttaacaaaccgcctgcgtgcgctttacgcccagtaattccgattaacgcttgcaccctccgtattaccgcggctgctggcacggagttagccggtgcttcttctgcgggtaacgtcaatgagcaaaggtattaactttactcccttcctccccgctgaaatgtactttacaacccgaaggccttcgttcatacacgcggcatggctgcatcaggcttgcgcccattgtgcaatattccccactgctgcctcccgtaggagtctggaccgtgtctcagttccagtgtggctggtcatcctctcagaccagctagggatcgtcgccttggtgagccgttaccccaccaacaagctaatcccatctgggcacatccgatggcaagaggcccgaaggtccccctctttggtcttgcgacgttatgcggtattagctaccgtttccagtagttatccccctccatcaggcagtttcccagacattactcacccgtccgccactcgtcagcgaaacagcaagctgcttcctgttaccgttcgacttgcatgtgttaggcctgccgccagcgttcaatctgagccatgatcaaactcttcaatttaaaagtttgatgctcaaagaattaaacttcgtaatgaattacgtgttcactcttgagacttggtattcatttttcgtcttgcgacgttaagaatccgtatcttcgagtgcccacacagattgtctgataaattgttaaagagcagtgccgcttcgctttttctcagcggcgcggggtgtgcataatacgctttcccgctacagagtcaagcatttatttttgctttctctgccggaattctgaggagaaccccgctgacccggcggcgtgtttgccgttgttccgtgtcagtggtggcgcattatagggagttattccggcctgacaagcgaaaaatataaaaactttatcgttcgctcatttttcaggcaaaacatcttaaatatagtcttttccgtctaacttatagacaaaaacgagccccgaagggctcgttttatcatttactggacggcgacaatccggtcttcattaacttccaggcgaatcactttacccggaaccaattcaccagacagtatttgctgtgccagcgggttttcgatctgctgctggatagcacgtttcaaaggacgtgcaccatagactggatcgtaaccgttctcgctcagcagtttcagcgcctcgtcagaaatgtggatttcataaccacgttcttccagacgtttgtacagacgtttcaactgaatctgcgcaatcgaggcaatgtgctgttcacccagcggatggaagaccaccacttcatcaatacggttaatgaattccggacggaagttatggcttaccacaccgagcaccagctctttcatgtgcgcataatccagttcaccgaagcgttcctgaatcaaatcggaaccgaggttagaggtcataatgacaaccgtattacggaagtcgaccgttctcccctgcccgtcagtcagacgaccatcatccagtacctgcaacagaatgttgaagacatccggatgcgctttttccacttcatccagcaggatgacggaatacggacgacgacgcacagcttcggtcaggtagccaccttcttcataaccgacatatcccggaggcgcaccaaccagacgagacaccgagtgtttctccataaactcggacatatcgatacggaccatcgcctcgtcgctatcaaacataaagttcgccagcgccttacaaagctcagttttccccacacccgttgggccgaggaacaggaatgaaccaatcgggcgatttggatccgccaaccccgcacggctacggcgaatagcgttagataccgcatcaaccgcttcgttctgaccaatgacgcgatggtgcagttcttgttccatacgcagcagtttttcgcgctcgctttccatcatgcgagaaaccggaatccccgtccaacgcgccagcacttcagcaatttcggcatcggtcactttattacgcaacagacgcatagttttgccttcgagctgcgttgcggcttccagttgcttttccagttccgggattttgccgtattgcagttcagacatccgcgccaggtcccccacacggcgagcctgttcaatagcgattttcgcctgttccagttccgctttaatggtctgcgtaccagaaagcgatgccttctctgctttccactcttcttctaactcggagtactgacgttctttgtcgctcagttcttcgttgagcatatccaggcgttttttactggcttcatcagactctttcattaacgcctgttgttccagtttgagctggatgatacgacgatcgagtcggtcgagttcttctggttttgagtcaatctgcatacgaatgctggatgctgcttcatcgatcaggtcgatggctttatccggcagctgacggtcagcaatgtagcgatgagacaacgtcgccgctgcaacaattgccgggtcagtaatttgcacatggtggtgcaattcgtaacgttctttcaggccacgcagaatcgcaatggtatcttcaacggaaggctcggcaacaaacactttctggaaacgacgttccagcgcagcatctttttcaatgtactggcgatattcgtcaagcgtcgtggcacctacgcagtgcaattcaccacgcgccagcgccggtttcagcatgtttccggcgtccattgcgccatcggctttacccgcgccgaccatggtatgtaattcgtcgataaacaggatgacgttgccttcctgtttggcaagatcgttaagcacgccttttaaacgttcttcaaactcaccgcgatatttcgccccagccaccagcgcgcccatatccagcgccagtacgcggcggcctttcaatccttccggcacttcgccgttgataatacgctgcgccagaccttcaacgatggcagttttaccgacgccgggttcaccaatcagtaccgggttatttttagtacgacgttgcagcacctgaatggtacggcgaatttcttcatcacgaccaatcaccggatcgagtttgccctgttcggctcgttcggtaaggtcgatggtatattttttcaaagcctgacgttggtcttcagcaccttgatcgttcacgctttcacctccacgcatttgttcaatcgcttgagtaatgttggcggtggtcgcccctgctgctttcaggatgtcggccagcgtgccgcgagactcaagtgccgccagaacgaacagttctgacgagataaagttatcaccacgtttttgcgccagcttgtcgcaaagattaagaacgcgcaccagatcctgtgatggctggacatcaccaccagtaccttcaacctgcggtaaacgatttaatgcctgattgatatctgtgcgcaactggccagcattgatgccagcggatgttaataaaggactaaccgaacccccttcctgattcagcagggcgctcattaaatgaagtggttcgataaattggttgtcgtgcccgagtgcaagtgattgggcatcggcaagagcaagctggaatttattagtaagacgatccagacgcataactcctcccataacggatcaaagttgctactggagattaaatgaggtcatccctcaattattcaaggttattgaccagattaatgtgaaaagaaattcacgcgtaccggatcgtcttgattctttaggttatatcagccaaatgaaacttgccatacgaccggtggtcttgtcgcgacgataagagaagaaagtctcattttccgtatatgtacaacggtcgccgccgaaaatttgctcaacacccacgttcgccagacgctgccgggcaagctgataaatatccgccagatacttatcaccatgctgaatgaaagctgcacttgctttagcgtctactgccataaacgcctcgcgaacctccacccccacttcgaacgcgcgtggaccaattgccggccctaaccaggcgagaatattttccggattatcagcaaaacaggaaaccgtctcttccagcacgcctgcgcacagtccacgccagccagcatgagcggcggcgacttccgttcccactcgattgcaaaacagcacagggaggcagtcggcagtcatcactgcgcaaaccgtgccaggcgtattgctataagaggcatcagctcgttttgaggcataaggttcgccagtaagcttaagcacatctttgccgtgtacctgctcaagccagaccggtttagaaggcaaattgcccgcagcaaaaagtcgcttgcgattctcctcaacgtgatccgggttatcgccacaatgggcaccgaggttgagtgagtcatacgggggcaagctcacgccgccgatacgagtagagctacaggccgcaacaccttttggcagcggccactgcgggacaatcagcttactcataaccagtccacttcatccttatgctcttcgaagtcggcgcgcatcacctcaatcagctccaccatatcttgtggaataggcgcatgccattccatttcgatgccggagatcgggtgataaagacgcaacatggttgcatgtagcgcctggcggtcaaatttacgcagcgtggagataaatgcttccgaagcaccttttggcggacgcggacggccaccataaaccggatcgcccaccagcggatgagtgatatgggccatatgcacgcggatctggtgcgtacgtccagtctccagacgcaaccgcagacgcgtgtgcacacggaagtgttccatgatgcgatagtgagtgaccgccggtttgcccatgggatgcaccgccatgtgagtacgtttggtcgggtggcggctgattggttcatctactgtaccgccagcagtcatatgaccaattgccaccgcttcatactcacgagtaatttcacgcctttgcaaagattcgactaaacgcgtctgagccggaacagtttttgccacaaccatcaggccagtggtgtctttatccagacgatggacgatgcccgcacgcggtacatcggcaatgggcggatagtaatgaagcaacgcattcagtaccgtgccatccgggttacccgcgccaggatgtaccaccaggtcgcgcggtttattaatgacgatgatatcttcatcttcatagacgatatccagcgggatatcctgcggttcaaaacgcgcttcttcttcaatctcagcgttgatggcaacctgctcgccacccaatactttttctttcggcttatcacaaactttgccgtttaccagcacgcgctggtcgaggatccattcttttattcgcgaacgtgaataatccgggaacatttcggccaaagcctgatctaagcgttgaccgagttggttttcggacaccgttgcagtgagctgtactcgttgtgccatatatactgcttcttcgtttatcgttggggttttacggctttgccgtttaatatagtgtgctattgtagctggtcttaaccgggagcaggaacagagaatctcccgtattacattttgaggaaagtcaaaacgtcatgacgcgcatgaaatatctggtggcagccgccacactaagcctgtttttggcgggttgctcggggtcaaaggaagaagtacctgataatccgccaaatgaaatttacgcgactgcacaacaaaagctgcaggacggtaactggagacaggcaataacgcaactggaagcgttagataatcgctatccgtttggtccgtattcgcagcaggtgcagctggatctcatctacgcctactataaaaacgccgatttgccgttagcgcaggctgccatcgatcgttttattcgccttaacccgacccatccgaatatcgattatgtcatgtacatgcgtggcctgaccaatatggcgctggatgacagtgcgctgcaagggttctttggcgttgaccgtagcgatcgcgatcctcaacatgcacgagctgcgtttagtgacttttccaaactggtgcgcggctatccaaacagtcagtacaccaccgatgccaccaaacgtctggtattcctgaaagatcgtctggcgaaatatgaatactccgtggccgagtactatacagaacgtggcgcatgggttgccgtcgttaaccgcgtagaaggaatgttgcgcgactacccggatacccaggctacgcgtgatgcgctgccgctgatggaaaatgcataccgtcagatgcagatgaatgcgcaagctgaaaaagtagcgaaaatcatcgccgcaaacagcagcaatacataacagaaacctgaaatacaaaacggcagcccttgagctgccgtttttttattctgttagttgtgaaactgaagcgatttagtcactatcgatctcatcaaatatggctcgctttgagatattcctcaagtaaaaaaacacctcttcctgcgatttctcacaaaaaagattcgttgacaaaaagtgacaaaattatgagattcccatcacacattttgacatcaggagcggtatgctgaattcaccaagacgggaagacaagaggtaaaatttatgacaatgaacattaccagcaaacaaatggaaattactccggccatccgccaacatgtcgcagaccgtctcgccaaactggaaaaatggcaaacacatctgattaatccacatatcattctgtccaaagagccacaagggtttgttgctgacgccacaatcaatacacctaacggcgttctggttgccagtggtaaacatgaagatatgtacactgcaattaacgaattgatcaacaagctggaacggcagctcaataaactgcagcacaaaggcgaagcacgtcgtgccgcaacatcggtgaaagacgccaacttcgtcgaagaagttgaagaagagtagtcctttatattgagtgtatcgccaacgcgccttcgggcgcgttttttgttgacagcgtgaaaacagtacgggtactgtactaaagtcacttaaggaaacaaacatgaaacacacaccgtttttcttcgcattcttttttaccttcccctgaatgggaggcgtttcgtcgtgtgaaacagaatgcgaagacgaacaataaggcctcccaaatcggggggccttttttattgataacaaaaaggcaacactatgacatcggaaaacccgttactggcgctgcgagagaaaatcagcgcgctggatgaaaaattattagcattactggcagagcggcgcgaattggccgtcgaggtaggaaaagccaaactgctctcgcatcgcccggtacgagatattgatcgtgaacgcgatttactggaaagattaattacgctcggtaaagcgcaccatctggacgcccattacattactcgcctgttccagctcatcattgaagattccgtattaactcagcaggctttgctccagcaacatctcaataaaattaatccgcactcagcacgcatcgcttttctcggccccaaaggttcttattcccatcttgcggcgcgccagtatgctgcccgtcactttgagcaattcattgaaagtggctgcgccaaatttgccgatatttttaatcaggtggaaaccggccaggccgactatgccgtcgtaccgattgaaaataccagctccggtgccataaacgacgtttacgatctgctgcaacataccagcttgtcgattgttggcgagatgacgttaactatcgaccattgtttgttggtctccggcacgactgatttatccaccattaatacggtctacagccatccgcagccattccagcaatgcagcaaattccttaatcgttatcctcactggaagattgaatataccgaaagtacgtctgcggcaatggaaaaggttgcacaggcaaaatcaccgcatgttgctgcgttgggaagcgaagctggcggcactttgtacggtttgcaggtactggagcgtattgaagcgaatcagcaacaaaacttcacccgatttgtggtgttggcacgtaaagccattaacgtgtctgaccaggttccggcgaaaacgacgttgttaatggcgaccgggcaacaagccggtgcgctggttgaagcgttgctggtgctgcgcaaccacaatctgattatgacccgtctggaatcacgcccgattcacggtaatccatgggaagagatgttttatctggatattcaggccaatcttgaatcagcggaaatgcaaaaagcattgaaagagttaggggaaattacccgttcaatgaaggtattgggctgttacccaagtgagaacgtagtgcctgttgatccaacctgatgaaaaggtgccggatgatgtgaatcatccggcactggattattactggcggttgtcattcgcctgacgcaataacacgcggctttcactctgaaaacgctgtgcgtaatcgccgaaccagtgctccaccttgcggaaactgtcaataaacgcctgcttatcgccctgctccagcaactcaatcgcctcgccgaaacgcttatagtaacgtttgattaacgccagattacgctctgacgacataataatgtcggcataaagctgcggatcctgagcaaacagtcgcccgaccatcgccagctcaaggcggtaaatcggcgaagagagcgccagaagttgctcaagctgaacattttcttctgccagatgcagcccataagcaaaagtagcaaagtggcgcagagcctgaataaacgccatattctgatcgtgctcgacagcgctaatacgatgcagccgagcgccccagacctgaatttgctccagaaaccattggtatgcttccggcttacgtccatcacaccagaccacaacttgctttgccaggctaccgctgtccgggccgaacatcgggtgtaaccccagtaccgggccatcgtgcgccgccagcatggcctgtaatggtccatttttcactgatgccagatcaacaagaatacaatctttcggtaaaggcggtaatttgccgataacttgctcagtaacgtggattggcacactaacaatcaccattccggcatcggcaacaatatcagccgctcgatcccagtcatgttgctccagaatccgcacctgataacccgatagtgtcagcatcttctcgaacaggcgtcccatctgaccgccaccgccgacgataaccaccggacgcagtgacggacaaagtgttttaaatcctttgtcgttttcactggagtaagattcacgcatcatccgacgcaaaacatcctcaatcagatctggcggtacacccagagcttccgcctctgcacgacgcgaggccaacatagatgcctcgcgctccggaacataaataggcagtccaaagcggcttttcacctcgcccacttcagcaaccagttccagacgcttcgctaataaattcagcagcgctttatcgacttcatcaatttgatcgcgtaatgcggtcaattcagcaaccataataaacctcttaagccacgcgagccgtcagctgcccgttcagatcctgatgaatttcacgcagcaaggcatcggtcatttcccagctaatgcaggcatcggttacggatacaccgtatttcatttcactgcgcggttgctcggaagactgattgccctcgtggatattactttcgatcatcagaccaataattgagcgattgccatctttgatttgagcaaccacggattctgccaccgcaggctgacggcgataatctttattggaattaccgtggctgcaatctaccatcagagacgggcgcagtcccgcctgttccatctctttttcacattgcgcaacatccgcagggctatagttcggcgctttaccaccgcgcaggatgacatgcccgtccggattcccctgagtttgtagcaacgcaacctgccctgcctggttaatgccaacaaaacggtgcggctgggcggcggcgcgcatagcgttaattgctgttgccagactgccgtcggtgccgtttttaaaaccaaccggcatggaaagcccggaggccatttcacggtgagtttgcgattccgttgtacgagcaccaattgctgaccagctaaacagatcgcccaggtattgcgggctattcggatctaacgcttccgtcgccagtggcagtcccatattcaccagctcaagcagcaatttacgcgcgatctgcagcccggcttctacatcaaaagagccatccatatggggatcgttaattaaccctttccagccgacagtggtacggggtttttcaaaatagacgcgcattaccagatagaggctatcgctgacctctgcggcaagggctttaaatcgacgagcatattccagagcagtttccggatcatgaatggaacaaggaccacatactaccagcagacgaggatcgcgcccggcgataatatctgaaatggttctacgcgagtcagcaatctgggcttcttgttgcaggctcaatggaaaagcggccttcagttgttccggagtcattaaaacctgttcgtcggtaatatgtacgttattcagcgcgtctttttgcatgatggcgatcctgtttatgctcgtttgcgatagttgatcctcagcgaggatgacgtaacgataacacataaagtaaagttttcaatccatatttcgtacatttttatttacacaggcaatttagtcgcgatttcaacccttacttctgtatagataaatttacactccctttgaaaacaatccgctatgctttgaaaaaggagaaagaaatgatgaaaaagtttatcgcccccttgttggctttactggttagcggatgtcagattgatccttatactcacgcgccaaccttgaccagcaccgactggtatgatgttggtatggaagatgcgatatcgggcagcgccataaaagatgacgatgcatttagcgattcacaggcggatcgcggtctataccttaaaggatatgccgaaggacaaaagaaaacttgccagaccgattttacttatgcccggggactttccggtaaaagctttcctgccagctgcaacaatgttgaaaatgccagccaactgcatgaagtatggcaaaaaggggctgatgaaaatgccagcacaatacgattaaattaattaaaaccccacaaataaattaaacataagattttactcattgtgttttatttctcacattgatgacgatcgcatgaaaaaatgatattttaatgagcattctgaaaaaatatcgatgcatttcgagcgaagatggtggggatccctgaatgcgtttttctcaccgactgttcttacttctgattctcctgctgacgggagcaccaatactcgctcaggagccttctgacgttgcgaaaaacgtgcgtatgatggtttccggtattgtcagttacacccgctggcctgcgctatcagggccaccaaagttatgtatcttttcatcttcacgttttagtaccgccctacaagagaatgccgcgacatctttgccttatctgcctgtcatcattcacactcaacaagaggcgatgatttcaggctgcaatggtttttattttggcaacgagtcaccgacattccagatggaattaaccgaacaatatccgtcaaaggcgttattattaattgccgaacaaaataccgagtgcattattggtagcgccttttgtctgatcatccacaataatgacgtcagatttgccgtaaacctggatgccttatcgcgtagcggtgtaaaggtcaacccggatgtcttaatgctcgcacggaagaaaaatgatggataacgataattctcttaataagcgccccacgtttaaaagagcattacgcaacatcagtatgaccagcatatttatcactatgatgctgatctggttgctgctttccgtgacctcggtgctgaccctgaaacagtacgcgcaaaaaaacctggcactgacagcagcaacaatgacttacagtctggaagcagctgtcgtttttgccgatggccctgcagcaactgaaacactggcagcgctgggccagcaagggcaattttcaactgcagaagtacgtgataagcagcaaaatattctggcatcctggcattacacccgtaaggatccaggcgatactttcagcaatttcataagccactggctctttcctgcccccatcattcagccgattcgtcacaatggcgaaaccattggcgaagtacgcttaaccgctcgcgacagttcaatcagccattttatctggttttcgctcgccgtactgaccggttgtattctgctggcatcaggaatcgcaattaccctcacccgccatttgcacaatggcctggtggaagcactgaaaaatatcaccgatgtcgtacatgatgtgcgttccaaccgcaatttttcccgacgagtttcggaagaacgtatcgctgagtttcaccgcttcgctctcgacttcaacagtctgctggatgaaatggaagagtggcagcttcgtttacaggctaaaaatgcgcagcttctacgtaccgcgctacatgacccattaaccgggctggctaaccgcgcagcgtttcgtagcggcatcaacacgttgatgaacaattccgatgcccgaaaaacgtcggcgttactatttcttgatggcgataatttcaaatacatcaatgatacctggggtcatgcgacgggcgatagggtcttgattgaaatcgcaaaacggttagctgaatttggcgggctgcgacataaagcataccgcctgggcggcgatgaattcgctatggtgctctatgatgtacagtcagaatctgaagtgcagcagatatgctcagcactgacacaaatctttaatctcccgtttgatcttcataatggccatcagaccaccatgacattaagcattggttacgcgatgaccattgagcacgcctctgcggaaaaattacaagagcttgccgatcacaatatgtatcaggccaaacaccagcgtgccgaaaagctgctgagataacaaggatatatcgatatgataaagcacctggtagcacccctgattttcacctcactaatactgactggctgccagtcccctcagggaaagtttactcctgagcaagtcgccgctatgcaatcttatggatttactgaatccgccggcgactggtcgctgggcttatcagatgccattctgttcgcaaaaaatgactacaaattgctcccggaaagccagcaacagatccaaaccatggcagccaaattggcctcgacagggctaacacatgcccgtatggatggacacaccgataactatggtgaagacagttacaacgaaggcttatcattgaaacgggcgaatgtcgtggccgatgcatgggctatgggtggacaaattccacgcagcaatctcaccacacagggtttaggaaaaaaatatcccatagccagtaacaagaccgcccagggccgcgccgagaaccgccgcgtcgcagtggtgattactaccccttaaaacacgagcaaacagataaaaaaagggccagccaattggccagcccttcttaacaggatgtcgcttaagcgaaatcttagttaagacgctctttgatacgagcagccttaccagtacgctcacgcaggtagtacagtttagctttacgaacagcaccacgacgtttgacagaaatgctgtcaactaccggagagtgagtctggaagacacgctcaacgccttcgccgttggaaattttacgaacagtgaatgcagagtgcagaccgcggttacgaatagcgataaccacgccctcgaatgcctgcagacgttttttggaaccttcaacaacccatactttcacttccacggtatcacccggacggaaggaaggtacgtcctgcttcatctgctcttgttcaagttgcttaataatgttgctcataatttaatctcttatcctgggtaaactgatatctcgggggcttacgccatcccatcatgtttatgttgctgttgtgcgtgttccgttttgaactccgccagcaaccttgcttgctcttcagtcagagccaggttttccagaagttcaggtcttctaagccaggtacggcccagcgactgtttcaaacgccagcgacgtatctcggcatggttgcccgacagtaacactggcggaacttccatcccttctaacacctcaggccgcgtatagtgcgggcaatccagcaatccttcagcaaaggaatcttccgttgccgaggcttcatgtcccagtactcccggaataaaccgggaaacggagtcaatcagcgtcattgctggtaactcaccaccactgagaacgtaatcgccgattgaccattcttcgtcaatttcggtttggatcacgcgctcatctataccttcgtagcgaccgcacaccagaatcaatttttgattcgttgccagttcgctgacgcccgcttgatcaagcttgcgtccctgtggtgacagataaatcacctttgcgccttcacccgccgcggcttttgctgcatgaatggcgtcccgcaagggttgcaccatcattaacatccccggtccgccgccgtaaggacgatcgtccacggtacggtgccggtcatgcgtgaagtcgcgaggactccaactctggatgctcagcaggccatttttaactgcccggccagttaccccgtaatcggtaattgcgcggaacatttcaggaaacaggctaattatgccaatccacatagcgccgtcttttaccgtttatccggtggtttaaaaaccaggatcccaatctacttcgattgaacgagtagtgagatcgactttcttgataacctgcccatcgaggaacggtacgagacgttccttgataccaaacgcatctttcaggtttgccttaatgacgagaacgtcattagatccggtttccatcatatcgacgactttaccgagatcgtagccttcagtggttactacctggcagcccatcaggtctttccagtagtagtcaccctcttcaagctgaggcagctgcgatgaatccacgacaatttcacaattcgtcagcaggttcgccgcatcacgatcgtcaacgcctttcagcttgatgatcatgtcctgattgtggtgcttccagctttccagctggacttgctgccactgacccgccttctggataaaccagggctgatagtcaaaaatgctttcggcgtcttcggtggaagaaaacactctgagccacccacgaataccgtaagacgaacccattttccccaaaacgatgggatcaacaggtgcttgcgcggtgagttgtttgctcatcatgaccaccgtgacagattaagctgctttgtttacttctttgatcagcgcagcaacgcgatcagaaatagttgcgccctggccaacccagtgagcgatgcgatccagatccaggcgagtgccttcttctttttcgctagcgattgggttgaagaaaccaacgcgctcgatgaagcgaccgttgcgtgcattacggctgtcagcgacaacaacctggtagaacggacgctttttagcgccgtgacgtgctaaacgaatagttaccataacatcctcttgtgtgaataaaacaaccggaccccatcgaggaacggagtccggtgtcatattaaaagcccgaaaattttactgatttctggagaaaatgcaatcagcagttaataactctgtcgcataaggtcatttagcgaccaggaaatcccggcggcatcatccccttcatgcttctcatcatcttcgccattccgcctttcttcattttcttcatcatgcgctgcatgtcgtcgaactgcttcagaaggcggttcacgtcctgcacctgcataccgcaaccggcagcgatacgacgcttacgcgaacctttgatgatttctggcttagcgcgctctttcatcgtcatcgagttgatgatggcttccatacgcaccagcactttatcgtccatctgcgacttaacattatccgggatctgccccatgcccggcagcttgcccatcaggctagccatgccgcccatatttttcatctggcgcagttgctcaagaaaatcgttgagatcgaagccgtcgccttttttcagcttgctggctaatttctctgcctgcgcgcggtcaactttgctttcgatatcttcgatcagcgacagtacgtcgcccatgccgagaatacgcgacgcgatgcggtccggatggaacggctccagcgcctcagttttctcgccaacaccgagaaacttgatcggtttgccagtgatgtgacgaatagagagcgccgcaccgccgcgggcatcgccgtccactttggtcaacactacgccggtaagcggtaacgcttcattgaatgcttttgccgtattggccgcatcctgaccggtcatggcgtcaaccacaaacagggtttcaaccgggttaatcgacgcatggacttgtttgatctcgtccatcatcgcttcgtcaacgtgcagacgaccagcggtatccaccagcagcacgtcgtagaatttcagtttggcttctttcagcgccgcgttaacgatatctaccggcttctgaccaacatcagaagggaagaaatcaacgcccacctgctctgccagcgtctcaagctgtttgattgccgccgggcgataaacgtcggcagaaaccaccagcactttcttcttgtgcttctcgcgcaggaacttaccgagtttaccaacgctggttgttttaccggcaccttgcaggcccgccatcagtacgaccgcaggcggttgcgcagccaggttcagggtctggttctcttcgcccatcgccgcaaccagttcgttacggactattttgacgaactcctgccccggcgtcaggctcttattaactcatgaccaaccgctttctcttttacgcgattgataaactcacgcactaccggcagagcgacgtccgcctccagcagcgccatgcgcacttcgcgcagcgtatcttttacgttgtcttcagtgaggcgtccacggccactgatattgcgcagcgtgcgcgacaaacgatcggttaaattatcaaacattgtctctcgcctggggtggaaacggttggccgcaatcgcgacacatcatcagtattttgccgcagtataacatgaaggcgtctttgttgttatgcaacggttggagcagcgttcacctgacgctatactgcttctctttcttattgctcaaactgtcgacattactatgcccgtttttgctctgctcgcgcttgtcgcctactccgtcagtcttgcgctgattgttcccggtctgctgcaaaaaaacggcggctggcggcgcatggctattatttctgcggtcattgcgctggtctgccacgcaatcgctctggaagcccgcatcctgcccgacggtgatagcggacaaaacctcagcctgctgaacgttggttcattggtcagtttgatgatctgtacggtaatgaccattgtggcttctcgcaatcgtggctggttgctgctacccattgtctatgcctttgcgcttatcaacctggcgctggcgaccttcatgcccaatgaatacatcacccatctggaagcaacgcctgggatgctggtgcacattggcttatcgctcttttcctatgccacgctaattatcgccgccctgtacgcgctgcaactggcgtggattgattaccaactgaagaacaagaagctggcatttaaccaggaaatgccgccattgatgagtatcgagcgtaaaatgttccacatcacgcagattggcgtggtgctgctaacgctcacgctttgcactggcctgttctacatgcacaacctatttagcatggaaaatatcgacaaggctgtgctctctatcgtggcgtggtttgtctatattgtgctgctgtggggacattaccatgaaggatggcgtggacgccgcgtcgtctggtttaacgttgcgggcgcggtaattctgacactggcctacttcggcagccgaattgtccagcagttaatcagctaaacccagaaaaggagtttcccctggaacacatttctactactacgttgatcattattctgatcatcatggtggtcatttcagcctatttttccgggtccgaaaccggaatgatgaccctcaaccgctatcgtctgcgacatatggcgaaacagggtaatcgctcggccaaacgcgtcgaaaaattgctgcgtaagccagaccgcctgataagcctggtgttaatcggcaataacctggtcaatattcttgcctccgcgctcggcactattgttgggatgcgtttgtacggcgatgcgggcgtggcaattgcgactggtgtgctgacctttgtggtgctggtttttgccgaagtgttgccgaaaactatcgctgcgctatacccggaaaaagtcgcttatccgagtagtattctgttagcaccgctgcaaattttgatgatgccgctggtctggttgctgaacgctatcacccgcatgttaatgcgcatgatgggcatcaaaaccgatatcgtggtcagcggctctttgagcaaagaagagttgcgcactatcgtgcatgaatcgcgctcacaaatttcccgtcgcaatcaggatatgctgctgtcggtgctcgatctggaaaaaatgaccgttgatgacatcatggtgccgcgcagtgaaattatcggtattgatatcaacgatgactggaaatcgattctgcgccaactctcccactcacctcacgggcgcatcgtgctctaccgtgattcgctggacgacgccatcagtatgctgcgagtacgtgaagcctggcggttgatgtcggagaaaaaagagttcaccaaagaaaccatgctgcgcgccgcggacgagatctattttgtgccggaaggtacgccgctcagcacgcagttggtgaagtttcagcgcaacaaaaagaaagtcggcctggtcgtcaacgagtatggagacattcaggggctggtgacggttgaagatattctggaagagattgtcggcgatttcactacgtcgatgtcgccaacacttgccgaagaagtcacgccgcaaaacgacggttcggtgattattgatggcactgccaacgtgcgggaaatcaacaaagcctttaactggcatctaccggaagatgatgcccgcacggttaatggcgtcattcttgaggcactggaagagatccctgtcgcaggcacccgcgtgcgtattggcgagtacgatatagatattctcgacgtacaggacaatatgattaagcaggtaaaagtttttcctgtgaaaccgctgcgcgagagtgtggcggagtaacgaaaacggccctgcattcgcatgcagggccgtgaattattacgaaaacagaaattacgcttttgctttcgctacagttaccatcgccgcacgaatcgtacgaccattcagcgtataacccttctgcataatgcccagtacgttacctggcgcaacgtcatcagattccaccattgcgatagcctgatgcacattcgggtccagcggcacgttagtttcggcgatcacttcaacaccaaacttacgcacaacatccagcatcgacttcagcgtcagctcaatgccttcaaccatcgcagacatatccgggttagctttatcagccacttccagcgcacgatccaggctatcaatcaccggcagcaattcgttgatgaatttctccagcgcgaatttgtgggctttttcaatatccagttcagtacgtcgacgcaggttttccatttcggcttttacacgcaaaatgccgtcacgttcacgggtctgggcttcagccagctgagcttcgagattcgcaattttttcatcgcgcggatccacctgctcagcagaagcttctggctcaactgcctcaatctcttcgtgctgatccatgataatttcttccggggcttgcccctcaggcgttttctgttctttactactcatgaatttctccgcgtttttttcgcattcatctcgctaacttcgcttattatggggatcagtttcagggtttcaagggaagcactcacattgtcatcaatcttcgcaacaaggacctcggaaaaatgaataatcatttcaagtgtattggcattgtgggacacccacggcaccccactgcactgacaacacatgaaatgctctaccgctggctgtgcacaaaaggttacgaggtcatcgttgagcaacaaatcgctcacgaactgcaactgaagaatgtgaaaactggcacgctcgcggagattgggcaactagctgatctcgcggtagtcgttggtggcgacggtaatatgctgggcgcggcacgcacactcgcccgttacgatattaaagttattggaatcaaccgtggcaacctgggtttcctgactgaccttgaccccgataacgcccagcaacagttagccgatgtgctggaaggccactacatcagcgagaaacgttttttgctggaagcgcaagtctgtcagcaagattgccagaaacgcatcagcaccgcgataaatgaagtggtgcttcatccaggcaaagtggcgcatatgattgagttcgaagtgtatatcgacgagatctttgcgttttctcagcgatctgatggactaattatttcgacgccaacaggctccaccgcctattccctctctgcaggcggtcctattctgaccccctctctggatgcgattaccctggtgcccatgttcccgcatacgttgtcagcacgaccactggtcataaacagcagcagcacgatccgtctgcgtttttcgcatcgccgtaacgacctggaaatcagttgcgacagccagatagcactgccgattcaggaaggtgaagatgtcctgattcgtcgctgtgattaccatctgaatctgattcatccgaaagattacagttatttcaacacattaagcaccaagctcggctggtcaaaaaaattattctaattttacgccagcctctttactgtatataaaaccagtttatactgtacacaataacagtaatggtttttcatacaggaaaacgactatgttggcacaactgaccatcagcaactttgctatcgttcgtgagcttgagattgattttcatagcggcatgaccgtaataactggcgagaccggcgcgggtaaatctattgcaatagatgccctcggtctttgtctcggtggtcgcgctgaagccgacatggtgcgtaccggcgctgctcgcgctgacctgtgcgcccgtttttctctgaaagatacgccagcggctctgcgctggctggaagaaaatcagcttgaagacgggcatgaatgtttgcttcgtcgagtgatcagcagcgatggtcgctcccgtggtttcatcaacggtacagctgttcctctgtcacaactgcgcgaactgggtcagttgctgattcagatccatggtcagcacgctcatcaattactcaccaaacctgagcaccaaaaattcctgcttgatggctatgccaatgaaacctctctactgcaggaaatgaccgcacgttatcagttgtggcatcaaagctgccgtgacctcgcgcatcatcaacagttaagtcaggaacgcgccgcccgtgcggaactgctgcaataccaattaaaagaacttaacgaatttaatccgcagcccggagagtttgaacaaatcgacgaagagtacaaacgtctggcgaacagcggtcaattgctgaccaccagccagaatgcattggcattaatggccgacggtgaagacgcaaacctgcaaagtcagctttacacggctaaacaactggtgagcgaattgattggcatggacagcaaactgtccggcgtacttgatatgctggaagaagctaccatccagattgctgaagccagcgatgaactgcgccactactgcgatcgtctggatctcgatcccaaccgactatttgaacttgaacagcgcatctcaaaacagatttcgctggcacgtaaacatcacgtcagccctgaggcattgccacagtattaccagtcgctactggaagaacagcagcaactggacgatcaggccgactcacaagaaacgcttgcgctggcggtaacgaaacatcatcagcaggcactggaaatcgcgcgcgcattacaccaacaacgccagcaatatgcagaagaacttgcacagctgatcaccgacagtatgcatgcgctctcaatgccgcatgggcagtttacgatcgatgttaaatttgacgagcatcacctgggcgctgacggtgccgatcgtattgagtttcgggtaaccaccaacccaggtcagccaatgcagcctattgccaaagtcgcatccggtggtgaattgtcccgcatcgcactggcaatccaggtcatcacggcgcgtaaaatggaaaccccggcactgatttttgatgaagtggatgtaggtattagcggtccaacagcggcagttgtcggcaaactgctgcgtcaactcggcgaatcaactcaggtgatgtgtgttacccacctgccacaagtcgcgggatgtggtcatcaacactattttgtcagcaaagaaaccgatggtgcgatgacagaaacgcatatgcaatccctgaataaaaaagcgcggttacaagagctggcgcgcctgcttggtggcagtgaagtcacacgtaatacactggcgaatgcgaaagaactgcttgcagcgtaaacttttttcctgcttcacggtcagagtaaacagcaaaacgccgtaagaccggaaagcaaaaggttttaaagtgatgaaaggtctattatcatcggcatattacagatgagccacgtactgctcgggcccgaaaaggaatcaaatcactatgcgctgtaaaacgctgactgctgcagcagcagtactattgatgttgaccgcaggctgttccactctggagcgagtggtttaccgtcctgacatcaaccaggggaactatctgaccgctaacgacgtatccaaaatacgtgttggcatgacgcaacaacaagttgcgtacgcattgggtacaccgctgatgtccgatccatttggtacgaatacctggttctatgtcttccgccagcaaccaggtcatgaaggtgtaacgcagcaaacgctgacgctgacctttaacagtagcggtgtgttgaccaatattgataacaaacctgcgctgagtggtaactaataataaagttgctctcaaagacgttaaaaaaggtgctcaatgagcaccttttttctgtctgttatttattcgctgatttttctgctcgttgcctgcgaagctctttcggatcggcaatgagagggcgataaatctccacccgatcgccatcatgcacactatcgcttagttttgccggacggctgtaaatgccgactttgtttttagttaaatcgatatcggtacgcaattccagcaagccactggcgcgaatagcttcttcaaccgtcgcgccctcctgcagcgtcacgcgctgcaggtactgcttctcaggtagcgcataagccacctcaacggcaattttacctggcactgtaaacctctttcgcacgaaccgtaaaagcctggaccatattagacgccagctctttaaacacgcgaccaaaggcgagttcaatcaacttattggtaaactcaaagtcgagatgaaactcgatacgacacgcctcctggctcagcggcgtaaacttccatccaccaatcaatttcttgaacggcccatccaccagattcataagaatactttggttactggtcaactggttgcgggtagtaaacgttttgctgatcccagccttagagacatctaccgccgcagtcatctgcccaggagtggactccagaatccgacttccggtacaacccggcaaaaactgaggataagactgaacgtcattcactaactgatacatttgctccgcgctgtagggtaccagtgcggtccggctaatctgaggcataacaatttccatcaacaaaaatccaacaaataatatcatttatcctgctgtaaaaaaacgctatcccggcgctgggtaacatcgggttcatgctaagatagagccttgtcccccgcaggattgatatggggtgttttcgatttcagattaccgatgattcacgacgcttatgacgaagaaaaaagcacataaacctggttcagcgaccatcgcgcttaacaagcgcgcccgtcacgaatactttatcgaagaagagttcgaagcgggacttgccctgcaaggctgggaggttaaatccctgcgcgcaggaaaagccaatatcagcgacagctacgtccttctgcgtgacggagaggcatttctgtttggcgctaacatcacgccaatggccgtggcctccacgcatgtggtgtgcgatcctacccgtacccgcaagttacttctcaaccaacgcgaactggactcattgtacggtcgcgtcaatcgagaaggctataccgtagtggcgctctccctgtactggaaaaatgcctggtgcaaagtgaaaatcggcgtcgccaaaggtaaaaaacagcacgataaacgttcagatatcaaagaacgcgaatggcaggtggataaagcacgtatcatgaaaaacgcccaccgttaaacctgcactccaattattgaccagttcctcaccgcgcctccctctccggcggcgcgaatgaacatcttattggctatcacatccgacacaaatgttgccatcccattgcttaatcgaataaaaatcaggctacatgggtgctaaatctttaacgataacgccattgaggctggtcatggcgctcataaatctggtatacttacctttacacattggggctgattctggattcgacgggatttgcgaaacccaaggtgcatgccgaggggcggttggcctcgtaaaaagccgcaaaaaatagtcgcaaacgacgaaaactacgctttagcagcttaataacctgcttagagccctctctccctagcctccgctcttaggacggggatcaagagaggtcaaacccaaaagagatcgcgtggaagccctgcctggggttgaagcgttaaaacttaatcaggctagtttgttagtggcgtgtccgtccgcagctggcaagcgaatgtaaagactgactaagcatgtagtaccgaggatgtaggaatttcggacgcgggttcaactcccgccagctccaccaaaattctccatcggtgattaccagagtcatccgatgaagtcctaagagcccgcacggcgcaagccctgcgggcttttttgtgccctcaatttgtcccgcgaagtccgaagaaaactaattaaatccgatccttttaggcaccttgttaggcacctcataaagctttattgttttttgaggtgcctaaaactatggaaacccggcaatggcaagacaaaccaaacctctatccgttaaagaaatagaatcagccaaacccaaggaggcggactacgttctctatgatggcgatggccttgagctactcattaaatccagcgggagtaaaatctggcagtttcgctacattcgccctgtcaccaagaaacgagcaaagaagagcataggctcctacccgtcagttacccttgccgatgccagaaactaccgtgcagagtcccgctcactactggctaaacagatcgatccgcaggaacatcagcaagaacaattgcgcagttcgctggaagccaaaaccaacactttccaactcgtagctgaacgttggtggaatgtgaagaaagccagtgtgacagaggactatgcggaagatatctggcgctctcttgaaagagacgtctttcctgcgattggcgacgttagcgttacagatattaaagctcatacactggttcaggccgtacaaccggttcaggccagaggagcactggaaactgttcgtcgcctgtgccaacgtattaatgaggtcatgatctatgcccagaacacagggctgattgatgctgttcccagcgttaatatcggtaaagccttcgagaagcctcagaaaaagaacatgcccagcattcgaccggatcagctacctcagttaatgcagacgatgcgaacagccagcattagcctttccacacgctgcctgttcatgtggcaacttcttactattacccgccctgccgaagcggctgaagctctctgggaagaggtagacatagaagcgcgagagtggaagattcctgcagcacgcatgaaaatgaaccgcgaccatactgttccattgtcagatgaagcaattgcgatactagagatgatgaagccgttaagtggaaatcgagaatttatctttcccagccgcatcaagccaaaccagccgatgaacagtcagaccgtaaacgcatcgctaaaacgcgcaggttttggtggggtgctcgtttcacacggcctgcgatctatcgccagtacagcccttaatgagcagggatttccacctgatgttattgaggctgcacttgctcatgtggataagaatgaggttcgtcgtgcgtataaccgtagtgattatcttgagcagcgacggcctatgatgcagtggtgggctgattttgtgatggctgcagatcacggtagtatgattgaaggagggataaaggcaatgcggttagttggatgacatgtcgtagctaaaacccgttctgtttttgggtagattaacctgaaggtctgcaattttaaatgacgctgaaagaagttaaaccctgctcttaagcaggtttttatgatttattctaattttggttttgaatctttctattttaaatcagcctttgcggctcgaatatctgcgttttttgctgagtattcccattcgtcagcgattctaaatagcattgcagaagtacggacgcagtggggcattgaatttgcccattctcggtactgctcagctaatatcctttcttggtttccaccttcgtaacgcatacgagcaaataccccccttttattgtacctaccaatttgtataccttgctctaactcatcagaagataatatttcaatgatgtgccgaattgcttcatgtggccaggaattatctactgagctattaggggcatgtgccagaatttttcctattacatgatcagtgatttcttggcgatgatgcaattttgctaaatggcgtacattctcacaccaatcttcaagtttatcttgatcaatttcattgtctatctgccctggtagtattcgtaatttttcaagtaatctgtatatagaagtagctcttttaacttccaactccgatggttctgtttgttcatcttcgtcactacgatatacaatacatattgcttctataaaaacctctggctttttcatcattagacgatgcaggataagtggctcatcgctacccggaaaacaaggcaagtaggtcatttctttaaatgccaaatctgtttcagaaacatcgttacgttgtttgagttcatcaaaaactttttttacatagtacgatagcattgtatcaaattggatatcctggctatttatttctttaacgactatatctagaagatataaaagtgttgtagatggaatctcagaaaggcgttgatttgctgatataatagcagcaagaccccggcccctttctatatatttatccataagaacaaataaatccgaagttttacccatcattgcaatgggttgtttttgcaaccaatatttttcgttgatgttatcttcaaacccttcaataatgctccatatctcttgtgagtctcttaacgatgctaagattttcccagccctatcaggggtaattttaaactgtttaaaatacacttttattttattaagccattcagcaccaaagcattcaacaccatattgcattaacaacccacaaacttcatcaatattttttttgttgttaataagcattacaaacaaatcatttaatttttcttcatccaacgagagtgctgatatatgccttgctgcaataaaaacattattaacttgttgaaaaaggtctttcaccccagacaaacctaaagtaaagtatatttccctaagtttttcacttcgcatttcttcgacagaagaaaaaattccgccagcattttcaattgactcttcaatatcagaatcccaatcattgaaaatccataaactggctctaaccatgtcaattggtttataattatcaagtattttcgctattttttccatagactcaaatttaaatgcccagttcgcatctgaatattttttatggcgagaatactcatgacgcaaagcctcccatacgatgaactgatcctcttcagtttgttgagaaaggcaaagttcaagatgagaaagtgtttcatctattgcattctcagggaatgagcttaaatgagagattaggatttcccatcttgttgggagtatacctgcaagtttaattgcttcttggataataaagatttgcccctcccaaacaacgccccacgttagtttttctacatctttatccgactctctgaacttcattttttggttttgatcagaggtatcatgggagcgaggaaggagattttgtaacaaactccacccaatactaggaacaatagtgataattttttttataattgcatttctaacttttactggtgcccatgtattaggagaccatgccagaaaaatggttcttaaactattaagagggcgatctgagtaagttcctccgggatctattacagcgagttttgcaagacagattgcagcgcgtaatagatatgtttgttcccaagccaaggcttccaatgcccattttaatccatgataatgacttcgaggagttaacagccctttatcttcattgaatattggagcaatcatttccccattgcccttaagcaattgctcaagggcatcaaggaaagggccaggggcagcttctgccagcagcggaagttgatctcgcaaactaacaaatagtcgatggtcgttagcaagtcccggaatactctgaactattttgttaacaaaatcttggggtgtcataccagtaacccggaattcggcctgttcatgtaatattgccatatgtagcaaaactgttgtcattccattacgtaaccacgagctataagacgttttaataccattgtcaggtacaaacagatcttcggcctttggtggttcaggaatataggaaaaaacctctcttacggccttctcaaaacgctccaggtgttcttcacccagcaaatagcctaaatgtacaaaagcatctaccgacgaacgcaatgaccaaatatcatctactcggtcaattggagaatcgcggcgctttgttaatagccttaatggattttcaacttgagaatagtctgtatagccagctagttgcttgagaattaacttatctttctctgaacatgtactccatgcaccagctaataaagcagggagcaactcagggctgtctttccattcaggtgattcagccgtgctacttgatatctggcgagccaaaacagacaaacttcggccacactgccgcgctatttgataacttttatctgaatcaaaccccatagattcaagagccttacctaaagatatactatctgggcggatcagaagttcgtgatcagttcgtgtttcatcggctccggcacttactactgtgatagatgcttgctgtaataaaccggctaaagctcttgctcgatcacgtggtaagaagatcattcctctttttccagaaagctgtcttgcagcatcatccgtatcaataattagtgctcgactttgaaaggaatgtcgaagttccgcttcagtggttctgatagctgcaatcgcaaaagcaataacctcatccggagaatctgcagctaaagatatttttcgaccattttctcgtaactcattcagaaaacgctctttttgcttttctctccccgccagcaagactgcttcagttaaagggggattaaatttagtggaaaattcatcccaaaactccttaatgcttctaacaccaacctgtggcattagctcaagatggtagcgagcgtagtaagcagctacagcagggcaaacaccgagccaatcttcaagcatagaaccatcaattaatttgatgtctttccacttaccactattgcgtttctcttgtagccagtcttcaagctttaccttaggattatcccatgttcttaatgaagcgaaaacaaaagtagtctttagacgtatctctggagcaacttcgcgtgttcttttttcgtaatcaaagttagctttatcaagcaatttttcattaacaccaaattcccagaatgagtcgccatcaggaacatagggggccaccccctcggctttaagtacaccgtcataacctctaacctgtcccttatcaccattaggaaatctaatttcagtaatactgttagccgttgcacgtataagatcagcgattagtgctggaaaaataacttttgcaggaatagaatctgcccattgctgaaggttaagtgcttttatccatttcatattggtactccacccaataaaattttaaacaaccaaatctaaaaaaaactaatattaaaaattcatttttaatgtacacaaaatgctaacaaaattgctaaagagtaaaaaatcaggacttatttattgatcttaaacattagccaaatttttaaactcgcactaaaccacctcaagaataaaaaatcatcaagttagtggaactttttgcacctagaatgctcgttaacctcacagtcatataaagcatgagcctgtcctttgttcatactagaccttagtttcatacatactgatagctctacgtaaaagtaggtatgatcgacatcacagttctgagtcagaacatcttaaccaattgaagtggatggttttaattgtaaatgttcagcggacatctcttccctcattggttagactaagagcaactttttctatggtcgcaatatcttttatagggtttaaaagtggcaatctttgacattgaaaaggacgaattacttcggctctccgatatccagctggaagagctgatcgctcggctagcagaagctgaagtggcaatgcacggccatagcccagcatgtgtaaattggtctggttcaattacagcccctgacggaggaattgacatccatgttcaggttccaattgatcaactgaaagcaggctttcttgtaagacctgatacggtctttcaggcaaagaaacataagatgcctaagtctgcaattgagagggaaattggcaccggcaaagcactttctcccatcatttctgaacaagccagaaagcaaggcagttacatcattgtcagcctgggtgatgattgctcgccgtcaggaaagaaggatcgtctcaaagcgatgagggatgcagtaaaagatgatcctaacgaaagttatcttcatcttgatttctacgaccgctccaaactcatccaatggttgcgccaacatccatcagtcatgctgtgggtaaaagcaaagcttgggcaagggtattccggttggcaaccctacggagcctggagcaatccaccacaaggtgttatagacactttaatctcagccccaggcgtaaccattactttaccatcgggaaaggggcaaaaactcaaaattgatgaagcaattaacccaatgcgagcactgatccgttcgacaaacaaggctgttcgtattacaggattgtctggtgttgggaagactcgaatcgttcaggcgctctttgatgaaactgttggaacagatgcgcttgaccgaacagtagctatttatgttgatactggctatgagccagtaccgtcggctacagcaatgcttgataacctgctcgctgaaggccggcgagcaattatgatccttgataattgcccatcagaactccatgcttcgcttgccagcaaagtatcagccgcagggaaagaagtaagtctcatcacgatcgagtacgacattagggatgacaaaccacagacaactgaggtcatccacattgagacagatggtccagacgtggcagagcaacttcttatccgtcgcttcccttctattggtcagaataatgcccgtcggattgcagagttcgcagatgggaatgcaagagtggctttggctatagcggaaagagtggaagaaggtgagagtttagccctactttcagatgcgcagttgtttaatcgcttgtttgaacaacgtaatcatcccgacggccatttacgggagcaagctgaaatattgtcactggtgtattcgttctcgatatctagtccagatgcagctaccgatgaactggaaatattgggtgtgctctctgggtatcccaaaatccagttattcaaagctgttacgaagttgatggaacgtcacattgttcagaaaagatcccactggagagccatccttccccatgccattgctaacaagttggcagcatctgcacttaatagtattccgattgatcaacttagaacgacctttgaagctccggatcggcaacgattattgatgtcgttcgcgcacaggttgggactattgcatagccatgctgtggctaaagagattgttgaagcttggttacagcccgaagggctgcttggaaaaataatagacctagatgatgtatcgacacgcattctaaattatatcgctccagttgccccaggagctttgcttgagaggattgaagaaacgcttgttacgtctaattttgagcattttaaatcacgctacaacccacaacgaacagcaattatcaaattgttgcagttacttgcatatgaatcgaaatactttgaacgatgcattaagctcttaatccgtatcgcagaccaggaaagcgcgagcaataattatgattcggctcgaaataagataaagaggtttttccaaccttatctatccggtacccatgcctctttagaacaacgtgttgcgatcatgaatgaatgcattgattcaagtatggccgaacgtagaaggatggggatcgaaatgcttgaaactgctctcggcggacctccgtggacaggattcggaattaatgagtttggtgctaggccaagagattatggatttcgacccagttacgatgaacttgttgcgtggctattcgccttcatcgatattttggtgagattaggaacctcaggagtgcccgagcttgaagatgatgccaggcggatcttggctgataaatttcgctggatttggcgtcatggaggaataaggtcaaaattaattgatgcggctcgtaagttacatgcccatcgcccttggggtgaaggctggaaagctgtccgctcaacaatctactttttccatacaaaaagaaaagataacgaagacgtagaaccattgccggaaatacttgtgacattggaacgagaattagaacctaaagacttggtttcggcaatcatggcttatgtactcagtaataggcgcgatttttgggctctagatgctgattatgagcaccaaggaactaataaattcagtgaaatcaggaaaatactttgtgccaaagctttcaagttggggcacgaatttgcagtatcttcccatggacttgatgagttgtgccctaatctttttttgcgggatggaatgccgtatcgcgtcgaatttggtaaaggcttagctaacggggctcctgacctacgaatttattggcaacaactagtcattcaattggatctacaacacaaatctcaacgtgatgtttcggtcattcgaggtttcattgaagagactcattctatcgattcagcattagcgcaggaactgctcgatcagtgtgcacaacattccgaacttcgattcgaattagtcaaccttcatccttggcaggagtttactgaaatcgatctggatcgttgcatgtcgcttctggatgactctgacatacagccccatatgtatggggcaattctgtggggtgagcaattctctaatttgccagaaagcagggtcctcgagctagctcaaaggctgctgagtaaaccgaatggtgatgaagtagtattggaagcactgagtatgaaactagctgataaaggagatgctacggatacactaggtcttgcgctacgaacaatcggaatatccgctgcaatccagaggttccaaagagatcacaacgatctcggcggatatctggattatgcaatggaacgtgttatcgatgccacattgcgcttcgatggcaacgaggctgaaaagctagaatggctgaatacaatcttcgctgttgttgatgagcattttggctacatttattctttcgaagacgctatcggtatcaccgctgcatggatgccaaaagaatttctcagtcgcatttttgatggtacggaggatcaacaacagaggcggctgcatttcatcaatcatgatgattcacatcagtctcctattgcgaaaatcgatgtagatattttgattgaatggtgcaggaccactaaagaccctcaggtttgggcttcagtcgcttcaggtattaatctatggtcaaaagacggggagcaaagtcctatttgcttgcaggatgatgctctgagatttctagaagcctcacccgagccacgagccgtccttgagatctttgccgaacacgtagcaccttcatcatggttcggtagtcgtgcgaacgtgatgcaacctagggttgaagcgataggccagttggtcacccacgagcgtgcagacatttctaagtcggctagagctgtttatgaaaaactgactgactgggttgaaaaggaaaaagaacgtgagcgattggaagatgaggcattggaacaacggtttgaataaaggctagttgccgtcttcacaggaattctgtttaaaggagaaatcatggaatctgcacgtaataaatataccagtgagattattgaggcagaagatctttggttacttgatgttgtagatacgaacggttacgtatgctggggatgtgggattgagatgtatccttccgcttggcaaaaaggaagtaagaaaagaccgtcgtttaataaaatgcctggaaaagagcatattaactgtgatgcagatgctgaaagcacagtggttaagcagggacagaaaaaaagcgtccgcaacatgctagacagcgcaccgggtttgatgcccgcagggttaaaattgattgaacaacgacccgttgttgatcctggcactactggtagcgacaacaacaccaatccaatacgttctacatcgtcagcatccagcgggggaaatgctccagcgcggcaatcccgccgcccggttaatgctattcgccagatttgtagggcatttattcgcttcccgtatgaccgtggtatgtcattaaatatcccaggtattaatgccgatacttacatgaccgtgtttaaaaaactaaaagacccggttcaaccctaccctgagcgccgagttttttattcgcagttgttatggcagaaatttgagcaagacgaaaaccgaattgtcattccgctctcgggagaatgggcaaaagacgaatctggtaagtttaagccctcgcgtagctataaactacacattgagtggggagactggtcaaaagccaaaaaagactatgcttttgaatgagcttgaaactgtgcaggaagaagcaaaagaagcagtaaataaaaaagctaaagagagagctcaagtcttctttatcggtgaacaaagcactgagaatccggaaatcttctacgtgagtgattaccggttaatctgtgcgattatgggatatataatttacccctgacgtaaatgggccttcttgcaaaatgcaggcccatttacataattattttcgactaccactaaggctacttcaaacctataaatttcattcaatttctcgtgtagacacaattacaacagtcatcataacaatagtcatattaacaatgattggttttccaatagatttatgtggggtattttcatagcgatgtaatttcaaacccatcaagactgatcgtatagtagccctcctgatagacataaaaatatcaaaaccataataatattaattgttagtattgttctttaggactttatcaatctctacttttagatcacctgtagaccatttattaagtctgcggcggatagtttcctctctatcgcctgtatcatttatccatttatctggattgacctttttatcattattacaaatatatggcattaaatattcaagaagttgacgtttatttttccagtcgctatgtgaaggaatatcttcaagtaagataacaactgtatctttaatatattcaagttctgcaagtttatttttccctccagcgcttgagcgcgctcttctgcatactttatcaaaaccacttcttaatcgataaaaactcggtaagtctcggttatcatctcgcgaaatacagacattcatataagaataagcatcaagaagaaacttacaactttcttttttattgcccaatgaatattggaactgcgcccagtaaaaatcttctaaagccatagatagatatatatattcataatgtgcatcatatagtcttgctaatcctgtcagtttatacccgtccatttttcctcgaatttcaatccgatattctgcatatgtttccttataaataaaaggtttctcaaccattattccatcaacatttataaactcttgtgagtagcgtatattgtcgctattagtcatatctacaaaatattgacattgtatttttgaatactcaataattttaaattcttcaattttatcataggctctttgcctgtaagtgcgcagaacatcctggttgctctcctttttttcgacttcaagtttccattccagctcaagaagtttgtcctcacaagcggtacaaacttgcagatagaaatcatcaaaaaaattcgcactcacatccttcatgaaaagtaaatccctaaagtgattttattttaatgttacttccagtgtatgacagccccagcgtggttggcaatatggacccacctgaacaaactcatactaaggaagcctagatgttacagaaccctccctccttacatacatccagttacgcaaatattcctgattcaccgaggatcttgaggctaaaagatgtcatgaaaaaatgggaatttcacgctcaaccatatacgactggcttaatccaaaatcgccacgctacgatggaacatttccaaaacaaaaacgcttgggaaggcaatccgttggctggctggagtcagaactgaatgaatgggtaatgcgacgttagatatcatttcaccgtatcagtgaaccggggcaatgcccccggtttgctccacaaaatcacattcctccccggaattcgaatgcaaaaaaaaacagacctgtattaccgcaatgaatacattgcagcgaagttgctgtatcgaatttttttcattccggaggctacatgtctgattcctttgaacggggcattaatgtcctgaagcaacctttatccattcttcctgaacatatctccgatttggttctggagcatatacgccagagtattcattacgaacccgtgattggcatcatgggcaaaacaggtgccggaaaatcctcgctttgcaatgcccttttgaacatcctctcagcccagtcagccatgcagaaggctgcacacgtaaacctttgcattttaccctgaacgctggaggacgcagcctgacgctggtcgatctgccgggtgtagtggcacactaaatttggccacctgatgaaaggtgatattctcaccacaacacaaaacaggtgacttaatgaacaagaaaaccaaacgaaccttcacccctgagttcaggctggaatgtgcacagctgattgttgataagggctactcatatcgacaggccagtgaagcgatgaatgtcggttcaaccacgcttgagagctgggtacgccagctcaggcgagagcgccagggtattacgccctctgccacacccattactccagaccagcaacgtatccgcgagctggaaaagcaagttcgccgtctggaggaacaaaatacgatattaaaaaaggctaccgcgctcttaatgtccgactcgctgaacggttcacgatagccgccagactaagtgacagccacacggttgtcagcctgtgttctgctctggaaatacaccgcagcagttaccggtactggcgaaaacgacgcgatacggttaatccggcacgagtcaggttgtgcagcgaaatacgccgggcgtggaaccaaagtcggggctctgcgggcgcgcgcactctggctgaaatgctgactcaaaacggcgtcccgatgagccgttaccgtgccggacgtctgatgaaatatctgaacctgagcagttgtcagcccggaaaacatcagtataaaaatgcccgtcaggagcataccagcctgccgaatctgcttgagcgtcagttcgcagtaccggagccagaccgggtatggtgtggagatattacgtatctctgggcaggaaatcgctggtgctatctggcggttgttatggatctttttgcccgcagggttatcggctggagtctgtcagcgcatgccgataccgcactgataagcagtgccctgcggatggcctatgagacgcgtggccaaccccgggatgtcgtgttccatagcgaccagggaagccagtatacaggccttaaatatcaacaacttctctggcgttgcagaataaatcaaagcgtcagtcggcggggaaactgctgggataacagccccatggaacgcttcttccgcagtctgaaaacagaatgggtgccaacgaatggttacgcaggcaaggacgaggcccggcagcaaattaatgattacatattgaactactacaacagcgtcagacctcaccattataacggtgggctgacgccggaagagtcagagaacagataccatttttactgtaaaaccgtggccaatattacttgaccactacagtgtgaattaccacccttaattgtcgttccattgctgataccacctgtataaacgtcctgattgccactgtcgattatcgtaccggtggaaatgcccccgtcatgaattgtctgtcttcctccgttaatggttgtattattagcctgccccacaaaattgttatgacttcctacatcttgatatccacccgattcaataagacttccattagataccccgccatgaacattctgctggccatggttgataatatgagtgttatttgttgtacctcgttcatctactctttggctgccatctacagtctcatcgtttaccacaccaataacatcaggagtgaaggccgtcatcccaggcggggcatatatcaaggcagatatcaataaggaaagtactgagcggcgacaataatagggactggtcctgttcataaatttcatcctctgaaaagtgaatactgagtagcgtttaagcgaccttagctttgctgcaacatcagcccacaggcaccagaccaggggattcatcctgaagagacagcgcaagtgtattgtgttcaccgctcatcaaagacatcatgatgaaatgatgatattccgcataagaatgaggcattttttaaacgcagtgcgctgaagtgtggttggataaaaaagtcaatccattcaggaaatacgggcgtattcttttctttcgacaatgaggccgttggcaaaataaaatgatttacataatcgtttctgatgaatatcttctgctcacataaaaatcacacaataactttgagatcgcagattgttttacttttacagcattcgtccccccattgttgggcaaatatagattgggccagagcacgaaagttaataccacgtttgcacagctcctccaacagcacgacaagatgccacatactgcgccccagtcggttcggtttacagactacccgtgcgtccaccgccgataatgtcctgaccagttttttcagtccggacctcctgccacggttttacgttgaagtggtaaccctgagcacgcagttcttcagtcaggcgtggtgcaccgtaacgctgttattgctgggtaagatcaaaaaactttcaggcagctaaggaaagttgaaccagacattagatgaaatatttcaaccaattacagcaccaattcagtcactgccagcccaccaaataaatcaaggggttacatgaaaacgtagcccctttttctttggtagtgacactaaaatggatgtagtgtgaagaataatcccgtttactcaatcaataatacatattgtttcaatctacgttattatctctttgtaaaaattgccatttattaatcattgaaaactgcttttagaacttgatacaacgggactagtcacaacaggactattctcaacgggatcatcctcagaggaactatcatcaaagtcatcatccataaataaaatatcatcgaatggtgccacgcccgtgatgagttttattttattattacgatcagtcaatactccacttaaaccgttttcgctcacaggttttaatgatttttcattactcttgttgtaagcaggcgcattaaaaatacacggagtatcaacatcaaacaatgacgttccccagttcacatattgaatatcatagttactgaagttctgtccagaaaagaagcaccccttaaaatccaatccacgtaaattatataaaccaccctcttctttttggagagtaatgttaattttggctatctcccggacatcatcgccatttttgtatttgaataccgtttcaagatgttctccagacagcttgacttcaggaaataatttgaaatcaaagcctatattattatgtgtcaacgtagatgaacaaaaaatggaaaaagcttgcagtgctgaattatagctatcgattttatcttgaggctgagctcttggtaaaaacttatagcaacactcataaaaattaaacagaagctctgaagaccttgtatttttatcaaataatacccccttgaactcattcacaaacgcatctttttttcttgaatatctatggggtgttcctttgactctgacaaagatgaaatctcatctattttgttttcatatgaattacgtgattccatacagacatttggcggcgtttctaaaataacactacgcgtactacttggcttaagtaaaccaacatgaaaatcactttttcttatattatcgaaaaggttctattcatttctcttagcgcattcaaaaaactgatcggcattatttttattcgataattttttagtttcagaaaacacattttcattgttttccagctttagtttaatgagaagattttcccagacctgcttgcttaaacatattacgtcaggctcaccagaactaactaactcgtgattattattaaagtgtacgttgaatacctttaagttattttcaccaacttcatatttaatacgttttaattgttctccagctcccataatgacaaaggcgttgccttcttgatatatacattcagacatcattttttgtaaagtttcaagagcaccgcgatacgtctctgatgcagcttccttacaaattaattttaaaatactatgagctagtagctccatgtgtttagaagatttattttcattataacttccactacccaaaactgcgctagcgttaaatccgttgcttttactaactaacattgtctattcctcaattaatgtctacatggctatttttaatgttattactgtttgtcactataaaaaaacgctcatttgagaaaattactgatattaactgcttcacttgctacgcatggaacttttaattaaattagcacaggaatgttaaatttaataaacaaaaggttatttcgctgtatgataaaaaaaaccgttataatttattagtgaaaatcgtttttcaagtgttagaaatttatatctcaatagcgttggttaatgagcatagccacgctcctgtaacgctcacaaaactcatctgcctgcggcgggtgttctggtcagtagtagatgtttaaggcgtggcagagacatttcatccttactctacggcattgttctacatacattggttgtggtactcactcatcatcagtgagcgaacagagaatagttcagtgatttgagtaattaacctgattaaattaaggggtataataaatgataatactctggctttatcgttaattacttaattccacatgtaagcaatttgcccgcttggcatagcaggcattttttccaggtacttttgaatgagtactgatggataaatacattgcagtggcgtgccacgtaccaaaacaccagccctcattcgaaaccacccaccgcacttcttccttgaaatggcgttagtcatgaaatatagaccgccatcgagtaccccttgtacccttaactcttcctgatacgtaaataatgatttggtggcccttgctggacttgaaccagcgaccaagcgattatgagtcgcctgctctaaccactgagctaaagggccttgagtgtgcaataacaatacttataaaccacgcaataaacatgatgatcatatgatgtaaataacagatttttatgcgttctcattcatccttgctcgtcattacacgcgacataaaacccgacaccgcttccattcgcaaagtcgatactcgcagtcaacaagcaaatgttaataattagcactatctatagttatcatcgattcaatgatactttgtaatgattttgtatctaataatataagtttattacattaactgaagagttttcgcatcattatgatatctgttacttttcactccataaaaataaacttcgtatagcaatatattctttcatagatcttattctgctaatcattagtttcgtatgagcgattttgacagttgcctctccagaccacatcgataattaataaaacagatttaagcattatccttttccatataaatattggataaaagtaggacatctgtttgcaattactttcacaacaattaaacatttttatgtttccgtatacatcatattactctaccattagaggaactttattatgttttctataaaaccaggacccagaaatttacctatcgacaaccccacattgttatcatggaacattactgacggggatctaaattccaaattaaatacattagaatatctaaactgtataacaaatattattaattcttgtggagtttaccctcaaggattaaaagacagagaaattatatcaacttttcacgcagaaaaagttattaatgatctgttaaaaaacgattataaaatttccctttctccagatacaacttatcgtgagttgaataaagcagcacagcgtagcattacagcgccagacaggataggagaaggaaaatcatgggtttatcaaagagatacaatgattgaaagaggtgataacagcggtgttcatcagtatggtcctgctgaacatttcacccacattatatctgacaaaccgtccccaaaagatgagtatattgcatatgctattaacattcctgactatgagctggcagccgatgtatataatattaacgtgacgtcaccttccgaacagcaagaaacatttaaaatactaatcaatccagaacatctacggcaaacacttgagcgtaaatctcttactgctgttcagaaatcacaatgtgaaatcataacccccaaaaaacctggcgaagcgattcttcatgcttttaatgccacctaccagcaaatcagggaaaatatgtctgagtttgcacgttgccattatgggtatatacaaatccctccagtgacaactttccgcgccgacggaccagaaactcccgaagaagaaaagggttactggtttcatgcttatcaacccgaagatctttgtaccatccataatccaatgggagatttgcaggattttatcgcattggttaaagatgctaaaaaatttggtatcgatatcattcctgattatacctttaactttatgggaattgggggtagtggtaaaaatgacctggattatccctctgctgatatacgagcgaagatcagtaaagatatagaaggtggtatccctggctattggcaaggtcaggttttgattccattcattaaagatccagtaacaaaagaacgtaaacaaatccatccagaagatatacatctcactgcaaaagacttcgaagcaagtaaagataacatatctaaggatgaatgggaaaacctccatgcattaaaagaaaagcgtttaaatggaatgcctaaaacaacacccaaaagtgaccaggttattatgttgcaaaatcaatacgttcgtgaaatgcgaaaatatggcgtacgaggtttacgttacgatgcagcaaaacactcaaaacatgaacaaatagaaagatcaataactccaccgcttaaaaattataatgagcggttacacaatactaatttatttaacccaaaatatcaaaaaaagccgttatgaattacatggaatacctggtaacttgtcagttggatgaacaacaaatgtcatcgctgctttatgaaagagatgatttaagcgccattgatttttcattgctcatgaaaacgataaaagccttttcatttgatggcgatctccaaacccttgcatcaaaaccgggttccacaatctcaagtatcccatcagaaagacggatattgattaatcattaaccacgattttccaaacaatggcaatcttttcaatgactttctatttaaccatcaacaagatgaacaattagcaatggcatatatagccgctctgccgttcagcaggcctttagtttactgggatggccaagtattaaaatcaacgactgaaattaaaaattatgatgggtccacgcgtgtcggcggtgaggcgtagcttaataaaggttgctctacctatcagcagctctacaatgaattccacgcattatatatagataaagcaggaatatggagcgcatttgagggtgtatctgcaactaaaaacgttctggcctttagtcgtggggattctgtgaacattaatcactctcctcatgatggactagttataataaataaaggaaacgaagaagttgaaggtacctggcctaacaaattgcaacctggaatatacaaaaacatggggagtaatagcgttaacattattattaataatacccgaaaaattatcccccctggtaaagtatttacgcttagaggcggaactctaaatatcaatattcctgggcgtagcgctcttcttttagggaaaacaggagaaccgccgaactatctctatttataatttaatgttatatctgccccgataaaacggggcagataatatgtttagtttactaacggtcattttgcagtgaagccatttactgttttttatcgaccagataatctgttctctaatgttaactccccctaacctgttgctttagttattcatttcctgtctcactttgccttaataccctacgttaaatgttactaatttgttgcttttgatcacaataagaaaacaatatgtcgcttttgtgcgcatttttcagaaatgtagatatttttagattatggctacgaaatgagcatcgccatgtcaccctacatctcataagaggatcgcttctgatgaatgcactgaccgccgtacacaataacgctgtcgattcaggccaggactatagcggattcactctcatcccgtcggcgcaatccccgcgtctgctggaactcaccttcaccgaacagacgaccaaacagtttctcgaacaggttgccgaatggcccgtgcaggcgctggagtacaaatcgtttctgcgttttcgggtaggcaaaattcttgacgatctgtgtgcgaatcagctgcaaccattgctgttgaagaccctgctaaaccgtgctgaaggtgcgctgttgatcaatgcggtgggtatcgatgatgtggcgcaggcagatgagatggtgaagctggcaacggcggtagcgcatctgattggtcgctcaaatttcgatgcgatgagcggtcagtattacgcgcgtttcgtggtgaaaaatgtcgataactcagacagctatctgcgtcagccgcaccgcgtgatggaactgcacaacgacggcacgtatgtcgaagagatcaccgattacgtgctgatgatgaaaatcgatgagcaaaacatgcagggtggaaattcgttgctgctgcatctcgatgactgggaacatctggaccactatttccgccatccactggcgcgtcgcccgatgcgctttgccgcgccgccgagcaaaaacgtcagcaaagatgttttccatccagtgttcgacgttgatcaacagggtcgcccggtgatgcgctatatcgaccagttcgtccagccaaaagattttgaagaaggcgtgtggttgagcgagctttccgatgccattgaaaccagcaaaggcattctttctgtacccgttcccgttggcaaattcctgttgataaacaacctgttctggctgcacggtcgcgaccgctttactccgcacccggatctgcgccgtgaactgatgcgtcagcgtggctatttcgcttacgccactcaccactaccagacgcatcagtaagcgcaaaggaattgagcggatgtatgattttgtgattattggcggcggcatcatcggcatgtcgaccgccatgcaactgattgatgtttatccggatgcccgcattgcgttgctggaaaaagagtccggcccggcctgtcaccagacgggccacaacagcggcgtgatccatgccggggtctattacacgcccggcagcctgaaggcgcagttttgcctggcgggaaaccgcgccaccaaagccttttgcgatcaaaacgacattcgctatgacaactgcggcaagatgctggtcgccacgtccgatctcgaaatggaacggatgcgcgcgttgtgggaacgcacggcggcgaacggtatcgagcgcgagtggttaaacgccgaggaactgcgcgagcgcgaaccgaatatcaccgggctcggcggcatttttgtgccgtccagcggcattgtcagctaccgcgaagtaacggcggcgatggcaaaaattttccaggccagaggcggcgagattatctataacgccgaagtcagcggccttagtgagcataaaagcggcgtggtgatacgtacccgtcagggcggcgactatgaagcatcgacgctgattagctgttccgggctgatggctgaccggctggtgaaaatgctcggcctcgaaccgggctttatcatctgcccgttccgcggcgagtatttccgcctggcgccggagcataaccagattgttaaccatctgatttaccccattcccgacccggcaatgccgtttttgggcgtgcatctcatccgaatgatcgatggcagcgtcaccgtcgggccaaacgcggtgctggctttcaaacgcgaaggctatcgcaagcgcgacttctcatttagcgacacgctggagattttgggctcgtcggggattcgccgggtgctgcaaaaccatctacgctcaggactgggcgagatgaaaaactcgctgtgcaaaagcggctatctgcgcctggtgcaaaagtattgtccccggctttcgttaagcgatctccagccctggcccgccggtgtgcgggcgcaggcagtatcgccggacggcaagctgattgacgattttctgtttgtcaccaccccacgcacgatccacacctgcaatgcgccctccccggcagcgacatcagcaattcctattggtgcgcatattgtcagcaaggtacaaacgctgttggcaagccagagtaaccccggacgcacgctgcgtgcggcacgtagtgtggatgccttacacgccgcatttaatcaataacctttgaaaacaggacgtaacaatgaaacttaacgccagtaacttattccgccagcaggcattgattaacggggaatggctggacgccaacaatggcgaggtcatcgacgtcaccaatccggcgaacggcgacaagctgggtagcgtacccaaaatgggcgctgatgaaacccgcgcggctatcgacgccgccaaccgcgccctgcccgcctggcgcgcgctcaccgccaaagaacgcgccaccattctgcgcaactggttcaatttgatgatggagcatcaggacgatttagcgcgcctgatgaccctcgaacagggtaaaccgctggctgaagcgaaaggcgaaatcagctacgccgcctcctttattgagtggtttgctgaagaaggcaaacgtatttatggcgacaccattcccggtcatcaggccgataaacgcctgattgttatcaagcagccgattggcgtcactgctgctatcacgccgtggaactttccggcggcgatgattacccgtaaagccggtccggcgctggcggcaggttgcaccatggtgctgaagcccgccagtcagacgccgttctctgcgctggcgctggcagagctggcgatccgcgcgggcattccggctggcgtgtttaacgtggtcaccggttcggcgggcgcggtgggtaatgaactgaccagcaacccgctggtacgcaaactgtcgtttaccggctcgaccgaaattggccgccagttaatggaacagtgcgcgaaagacatcaaaaaagtgtcgctggagctgggcggcaacgcgccgtttatcgtctttgacgatgccgatctcgataaagccgtggaaggcgcgctggcctcgaaattccgcaacgccgggcaaacctgcgtctgcgccaaccgtttatacgtgcaggacggcgtgtatgaccgctttgccgaaaaactacagcaggcggtgagcaaactgcacatcggcgacgggctggataaaggcgtcaccatcgggccgctgatcgatgaaaaagcggtagcaaaagtggaagagcatattgccgatgcgctggagaaaggtgcgcgtgtggtttgcggcggtaaagcggatgaacgcggcggcaacttcttccagccgaccattctggtggacgtgccggccaacgccaaagtgtcgaaagaagagacgttcggccccctcgccccgctgttccgctttaaagatgaagccgatgtgattgcgcaagccaatgacaccgagtttggccttgccgcctatttctacgcccgtgatttaagccgcgtcttccgcgtgggcgaagcgctggagtacggcatcgtcggcatcaataccggcattatttccaatgaagtggccccgttcggcggcatcaaagcctcgggtctgggtcgtgaaggttcgaagtatggcatcgaagattacttagaaatcaaatatatgtgcatcggtctttaactggagaacgcgaatgagcagcaataaagagttaatgcagcgccgcagtcaggcgattccccgtggcgttgggcaaattcacccgattttcgctgaccgcgcggaaaactgccgggtgtgggacgttgaaggccgtgagtatcttgatttcgcgggcgggattgcggtgctcaataccgggcacctgcatccgaaggtggtggccgcggtggaagcgcagttgaaaaaactgtcgcacacctgcttccaggtgctggcttacgagccgtatctggagctgtgcgagattatgaatcagaaggtgccgggcgatttcgccaagaaaacgctgctggttacgaccggttccgaagcggtggaaaacgcggtaaaaatcgcccgcgccgccaccaaacgtagcggcaccatcgcttttagcggcgcgtatcacgggcgcacgcattacacgctggcgctgaccggcaaggtgaatccgtactctgcgggcatggggctgatgccgggtcatgtttatcgcgcgctttatccttgcccgctgcacggcataagcgaggatgacgctatcgccagcatccaccggatcttcaaaaatgatgccgcgccggaagatatcgccgccatcgtgattgagccggttcagggcgaaggcggtttctacgccgcgtcgccagcctttatgcagcgtttacgcgcgctgtgtgacgagcacgggatcatgctgattgccgatgaagtgcagagcggcgcggggcgtaccggcacgctgtttgcgatggagcagatgggcgttgcgccggatctcactacctttgcgaaatcgatcgcgggcggcttcccgctggcgggcgtcaccgggcgcgcggaagtgatggatgcccgtcgctccaggcggtctgggcggcacctatgccggtaacccgattgcctgcgtggcggcgctggaagtgttgaaggtgtttgagcaggaaaatctgctgcaaaagccaacgatctggggcagaagctaaaagacggattgttggcgatagccgaaaaacacccggagatcggcgacgtacgcgggctgggagcgatgattgccatcgagctgtttgaagatggcgatcacagcaaaccggacgcaaaactcaccgccgagatcgtggcacgcgcccgcgataagggcctgattcttctctcctgcggcccgtattacaacgtgctgcgcatccttgtaccgctcaccattgaagacgctcagatccgtcagggtctggagatcatcagccagtgttttgctgaggcgaagcagtagctatgtccgtttgtaagagttaaacgttgctaagggaatgataacgatgcagtaaaaaataataacgatgaggcgatcgacaaagttaaaaacgactgcggactgtcccctcgctcctctggggagagggttagggtgaggggtaatcacgcggctacaccctcaccccggccctctccctaagggagagggagaaaactctcccgctttcgtttttaagattttgttgaccgtctcaattaaacgcgtgacccgacgcgggaaatgtcggggcgctctcccaagtgacacactttcgagaggattcaggatggggcaatcatcgcaaccacatgagttaggcggcgggctgaagtcacgccacgtcaccatgttgtctattgccggtgttatcggcgcaagtctgtttgtcggttccagcgtcgccatcgccgaagcgggcccggcggtattactggcctatctgttcgccggattactggtggttatgattatgcgaatgctggcggaaatggcggttgccacgcccgataccggttcgttttccacctatgccgataaagccattggccgctgggcgggttataccatcggctggctgtactggtggttttgggtactggttatcccgctggaagccaacatcgccgctatgatcctgcactcgtgggttccaggcattcccatctggttattttccctcgtcattaccctcgccttaactggcagtaatttattaagcgttaaaaactacggcgaatttgagttctggctggcgctgtgcaaagtcatcgctatcctggcctttattttccttggtgcagtcgcaattagcggtttttacccttatgccgaagtgagcgggatctcaagattgtgggatagcggcggctttatgcccaacggcttcggtgcggtattaagcgcgatgttgatcaccatgttctcgtttatgggcgcagaaattgtcaccattgccgccgcggaatccgacacgccggaaaaacatattgtccgcgctaccaactcggttatctggcgtatttctatcttctatttgtgctctatttttgtcgtagtggcgttaataccgtggaatatgccggggctgaaagccgttggttcttatcgctcggttctggaattgctcaatattccccatgcgaaattaatcatggactgcgtgatattactttccgtaaccagctgtctgaactcggcgctgtataccgcgtcaaggatgctctactccttaagccgtcgcggtgatgcgcccgcgctaatgggcaaaatcaaccgcagtaaaaccccgtatgtggcggtgttactctccaccggagcggcatttttaacggtggtggtgaactattacgcacctgcgaaagtgtttaaattcctgatagacagctccggcgctatcgccctgctggtttatttagtcatcgccgtttcacagttgcggatgcgcaaaattctgcgagcagaaggaagcgaaattcgcttgcgcatgtggctttatccctggctcacctggctggtcatcggctttattacctttgtgttggtagtgatgctattccgtccggcgcaacagttagaagtgatctccaccggcttattagcgatagggattatctgtaccgtgccaattatggctcgctggaaaaagctggtattgtggcaaaaaacacccgttcataatacgcgctgataatgatcaggagtcacaccatgaccattacgtctctggatggctatcgctggctgaagaacgatattattcgcggtaattttcaaccggatgaaaaattacggatgagtttgctgacatcgcgttatgcacttggcgttgggccgttgcgggaagcactttctcaactggtggcggaacggctggtcacggtggtgaatcaaaaagggtatcgggtggcgtctatgtcagagcaggagctgctcgatattttcgacgcccgcgccaatatggaagcgatgctggtcagtctggcgattgcccgcggtggcgatgaatgggaggcagacgttctcgcaaaagcgcatctgctcagtaagctggaagcctgtgacgccagcgagaaaatgcttgatgagtgggatctgcgtcatcaggcgtttcatacagcaattgtggcgggctgtggttctcactatttgctgcaaatgcgtgaacggttgtttgatctggcggcgcgctatcgatttatctggctgcggcgaacggtgctttcggtagaaatgctggaggataaacacgatcagcaccagaccctgactgcggcggtactggcgcgagataccgcgcgcgccagtgagttaatgcgccagcatttactgacgccaattcccattatccagcaggcgatggctggcaattaactactcttccggaatacgcaacacttgccccggataaattttatccgggctttttagcatcggtttattcgcttcgaagattttattgtacagattagcgttaccgtagacctgtttggaaatggcactcagagtgtcgccagacttaacggtataaaactggctggcagtggctggtgtcgccgttttcacctgatcatcgacactggcaataccggaaatattcccaaccgcaacaaggattttctccttcgcctcctgactcaggccgtcaccagtgaccgtcgctttgccgtcggcaatttgaatgttcactttatcggcatcaggtataccggttttgctcagatgctcctgcaccttcttcgcctgatcgtctttatcgtgctgacctgtaaccgcgtcccagagtttttctccggcatctttcacaaaattgaacagacccatagctacctcattcgttaacggaaacactcagaaagtgtagcagaggaacgcggcgcgttaacgccgcgggggtgagcacaggtttaatcgcgggtttgcacccagaacgcgtgaatcaaaccggggatatacccaagcagtgtcagcagaatattaataatgaacgcccaaccgaaccctttaccgagcagcacgccgagcggcggcagaatgatggtgatgacgattctccagaaacccatatgtactccctataagaaaattactcattgtttaaaaagagattttatctcttaagcgtagtaattttagcggagcctgccagtttcagcttacgcttttactctcatttacgctgctgaggctggtatatgttgcatttttagtttagagtttacttaatttagaaaatacttaaataaatatgactgaactcgcgcaattacaggccagtgccgaacaggcagcggccttattgaaagcaatgagccatcctaaacgattgctgattctgtgcatgcttagcggttcccccggcaccagcgcgggagagctgacgcgcattaccggactgagtgcctctgcgacatcacagcatctcgctcgtatgcgggacgaagggcttatcgacagccaacgggatgcccaacgcattctatattccattaaaaatgaggcggtaaatgccattatcgccaccctgaaaaatgtctattgtccgtaaggagtcactatggctttgacaaccatttcgccgcatgatgcacaagaattaatcgcacgcggcgcaaagttaatcgatattcgtgacgctgatgaatatcttcgtgaacatattcctgaagcagatctggctccattatccgtgctggaacagtcaggtcttccacctaaattacgtcgcgagcaaattatattccactgccaggcaggtaaacgcaccagtaataacgccgataaattagcagcgattgccgcccccgcagaaatatttttactcgaagatgggattgatggctggaaaagagctggattgccagtagcggtaaataaatctcaacccttgccgttaatgcgccaggtgcagatcgctgcgggtggtttaatattaatcggcgttgtactgggttataccgtaaatagcggtttcttcttattaagtggctttgttggtgccgggttactgtttgcaggaatcagcggtttttgtggaatggcaaggttgttagataagatgccgtggaaccaacgaacttgagaagcgacgccggacgcgccctagcagcgacatccggcctcagtaattagatcaggaaatcgtcgagagatttaccttctgccagcgcctgagcaattggcttcggtgtacggccctgaccggtccaggttttagtttcaccgttaacatcggtgaatttatatttcgccggacgcggctggcgtttttaccagcgcgtggtgcagcagcagagctattacctaataactcttccgggttaattccgtcagccttcatcagctccagccaggtgctaattttttcctgacgctcagccagttcacgctgctgctgttcttcttcttcacgtctttctttagtgacaaccctgaatttttcgagcatttcttcaagaacgtcaatggagaattcgcgagccatcgcacggagagtgcgaatgttatttaaactttgtaacattacggacataataaagaaaaccttttaacgccaaaacaaaaaagtatttcgtcgcgtagtgtaagcgatcacttattatatttccacaaaatttaatctatttacagtcctgcgcgagattatttcagctgttattttctgaaactctcagaataatttcaagattatatattagccattttgatgagtaatttagattattggtgaacagaacggcgctctctgctcgctaattccgcaagcctgacaaaaccgaagtgaataaaaatgcaatataacagaataaaagaaaacacccctcactggtgctttctgctgttaatgtacattttctggcataaaaaatactgtaaatgacacggtcacgacatacaccgaattctctacgcttatagcgttacctcacccccaaactttcattagtgaaattaaaggaaatgtcatatctaattgatttaattgaaaataaatcatatcggcatgtaaaaatccacaatgtacaaaaaacgagccgttacggaatattttatctacaaaaactgactaaataaaaatttttcactaattgattagtcatagccagcgatatacgctatgcgaaaatgcagatggcaatgagatccactgttttcatctccattaacatcccattacgcttttattaaggagcattagcatgttctcaccgcagtcacgcttgcgtcatgcagttgcagatacgttcgcgatggttgtttactgttctgtcgtgaacatgtgtattgaagttttcctctccggaatgagcttcgaacagtctttttattccagattggtagcgattccggtgaacatcttaattgcatggccatacggtatgtaccgtgatctgtttatgcgcgcggcacgcaaagttagcccgtcgggctggataaaaaatctggctgatatcctggcttatgtgacgttccagtcaccggtgtatgtggcgatcttgttagtggtgggcgcagacttgcatcagattatggcggcggtcagttcaaacatcgttgtttcgatgttgatgggggcggtttatggctacttcctcgattattgccgccgactgtttaaagtcagccgttaccagcaggtaaaagcctgactcttcttttcgcgactggcatcgccagtcgcgtctttaactggcttcgccaaataaaccattcaaataacgttcaagcgcaacacgcgaactgaagccatgcgggataccgtaatgctcgtgtcgctcgcctgctaaatagagcggaaattgctggtaatgatcgcaagttttaatatcggaagcgggttcagccagtgttgaactgcgttcttttaatgttggatgaattaccagagcggtacgtcccattcgcgcttcgcgattaacatagacataattttccccacggcggtaaccatacgctttctgggttaccacatcgacagtaaaaccgactttttcaagtacgcgcgccacctcgtctggtcgtaaatacatatttgatcctcgttattatcaaccgcgggcctaccttacctgattgcgcattcacaacgctttcagaaaagtccataaagccgcgatgaacctcagttaagaaaattatggtctacactgaaaattacatcgaattctaatgggggatcatatgtttaaccgaccgaaccgcaacgacgttgatgatggcgtgcaggatatccagaatgatgtcaatcaattagctgacagcctcgaatctgtattaaagtcctggggcagcgacgccaaaggggaagctgaagccgcacgcagtaaagctcaggcattgctgaaagaaaccagggcgcgaatgcatggtcgtactcgcgtccagcaagccgcacgcgatgccgttggctgcgcggattcttttgttcgtgaaagaccctggtgtagcgtgggtacagcagctgcggtaggtatttttatcggcgcactgttaagcatgcgcaaatcgtagtgcaaaaatgataataaatacgcgtctttgaccccgaagcctgtcttcggggtttctttttgcctggtgaatcacaaaaattcccctaccccgtcacgctcatatccagggtaatttcgaccactatttgctatatattgtgtggttgaatcttttttcaactacatctagtatctctgtatcaacagtgagacaacccgacgcgtatcatcgcgccgtatcttcattttaaacgtaaatacgaatcatgagcattactatttacactcgtaacgattgcgttcagtgccacgccaccaaacgggcgatggaaaaccggggctttgattttgaaatgattaatgtcgatcgcgttcctgaagcggcagaagcgttgcgtgctcagggctttcgtcagttgccggtagtgattgctggcgatcttagctggtctggtttccgtccggacatgattaaccgtctgcatccagcgccacacgcggccagtgcatgagccagctcgtctacttctccagcagctccgaaaatacgcagcgttttatcgaacgtttaggactgcccgcggtgcgcatcccgctcaatgagcgggaacggattcaggtagacgagccttacatcctgatcgtgccctcttacggcggcggcggtacggctggcgcggtgccacgacaggtaattcgctttttaaacgacgagcacaaccgggcgttgcttcgcggcgttattgcttcgggtaatcgcaactttggtgaggcgtatggccgtgccggagatgtgattgctcagaaatgcggcgtgccgtggctgtaccgttttgaactcatgggtacgcaaagcgatatcgaaaacgttcgtaaaggagtaaccgaattttggcaacgacaaccgcagaatgcctgacgcaggaaacgatggattaccacgcgctgaatgcgatgcttaatctttacgatagcgcaggtcgcattcagttcgataaagaccgccaggccgttgacgcctttattgcgacgcatgtgcgtccgaacagtgtgaccttcagtagccagcagcagcgcctgaactggctggtcaacgaaggttactatgatgaaagcgttcttaatcgctactctcgcgactttgtcattacgctgtttgcccacgcacacaccagcggttttcgtttccagacattcctcggggcatggaagttttacaccagctatacgttgaagacattcgacggtaaacgttatctggaagattttgccgatcgagtcacgatggtggcgctgacgctggcacaaggcgatgagacgctggcgttgcaactgaccgatgaaatgctgtcaggacgctttcagccagccacgccgacattcctcaactgcggtaagcagcagcgcggcgaactggtttcctgttttttgctgcgtattgaagacaatatggagtcgattggtcgggcggtaaattccgcactgcaactgtcgaaacgcggcggcggcgtagcatttttgctgtcgaatctgcgggaagcgggcgcgccaattaaacgtattgaaaatcaatcttctggcgtaattccggtgatgaaaatgctggaagacgcattttcctatgccaaccaactcggcgctcgtcagggggctggtgcagtctatttacatgctcatcatcccgatattctgcgttttctcgacacgaaacgggaaaatgccgacgaaaaaatccgcattaaaacactgtcgcttggcgtggtgatcccggatatcactttccatctggccaaagagaatgcgcagatggcgctgttttcgccctatgacgttgagcgagtttatggcaagccgtttgccgatatcgccattagcgaacactatgacgaactggttgccgatgaacgcatccgcaaaaaatacctcaacgcccgtgatttcttccagcgactggcagaaatccagtttgagtccggctatccctacatcatgtatgaagacacggtaaaccgtgctaaccctatcgccgggcgcataaatatgagtaatctatgctcagaaattttgcaggttaatagcgcctcagagtatgacgagaatctcgactatgcccgtacaggccatgatatttcctgcaatttaggttcgttgaatattgcccacaccatggattcccccaactttgcccgcacggtagagactgccgtacgcggtttaacggcggtgtcagatatgagtcatatccgcagcgtgccgtccatcgaagccggaaatgccgcctcacacgccatcgggctggggcagatgaatttacacggttatctggcgcgagaaggcatcgcttatggttcgccggaagcactggatttcaccaatctctatttctataccatcacctggcacgcactgcgtacctcgatgttgctggcacgcgaacgcggtgaaaccttcgccgggttcaaacagtcacgctatgccagtagtgaatatttcagccaatatctgcaagggaactggcagccgaaaacgacgaaagttggcgaactgtttgcccgtagcggtattacgttacctacccgtgagatgtgggcgcaactgcgcgacgacgtgatgcgctacggcatttataaccagaatcttcaggcggtgccgccaaccggttctatctcttatatcaaccatgctacgtcgagtattcatccgattgtggcgaaagtagagatacgcaaagagggcaaaacaggacgcgtttactaccctgccccgtttatgactaacgagaatctggcgctgtatcaggatgcttacgaaatcggcgcagaaaagatcatcgacacctacgcggaagcgactcgccatgtcgatcagggtttgtcgctgacgctgtttttccccgataccgccaccactcgcgatatcaacaaagcgcagatttacgcctggcgcaaaggtatcaaaacgctctattacattcgcctgcgtcagatggcgctggaaggcactgaaattgaaggctgcgtctcctgtgcactttaaggaatatctatgaaactctcacgtatcagcgccatcaactggaacaagatatctgacgataaagatctggaggtgtggaatcgcctgaccagcaatttctggctaccagaaaaggtgccgctgtcgaacgatattcctgcctggcagacattaactgtcgtagaacaacaactgacgatgcgcgtttttactggcctgacgctgctcgacacgctgcaaaatgttatcggcgcgccttcgctgatgcccgatgcactcacgcctcatgaagaagcggtattatcgaatatcagctttatggaagcggttcatgcccgctcttacagttcgattttctcgacgctgtgtcagaccaaagatgtcgatgccgcctacgcctggagtgaagaaaacgcaccgttgcagcgaaaagctcagattattcagcaacattatcgcggtgatgatccgctgaaaaagaaaatcgccagtgtgtttcttgaatcttttttgttctattccggtttctggctgccgatgtatttttccagccgcggaaagctgaccaataccgcagatctgatccgtctgattatccgcgatgaagcagtccacggttactacataggctataaatatcagaaaaacatggaaaagatatctctgggacaacgtgaagagttgaagagtttcgccttcgatttgttgctggaactctacgacaacgagttgcaatacaccgatgagctgtacgccgaaaccccgtgggctgacgatgtgaaagcgtttctctgttacaacgccaataaggctttgatgaatctgggctacgaaccgttatttcccgcagaaatggcggaagtgaatccggcaatcctcgccgcgctttcgccgaatgccgatgaaaatcacgatttcttttccggttcaggctcctcttatgtgatggggaaagcggttgaaacagaagatgaagactggaatttctgagggtgttattttcaaaaatatcactacccgcagcagggaaataattcccgccaaatagctttttatcacgcaaatattctgtagtgatctacactgatactctgttgcattattcgcctgaaactacaatattcaggcgttttttcgctatctatgacaaaaaatatcaacttttctcgatttgctctcagcccttatatcacgggaaattccggcgatttgctcgcatcaatattcatgccacatttgccctcaggggttgcctcagattctcagtatgttagggtagaaaaaagtgactatttccattgggtaatatatcgacataaacaaataaaggaatctttctattgcatggcaattaaattagaaattaaaaatctttataaaatatttggcgagcatccacagcgagcgttcaaatatatcgaacaaggactttcgaaagaacaaattctggaaaaaactgggctatcgcttggcgtaaaagacgccagtctggccattgaagaaggcgagatatttgtcatcatgggattatccggctcgggtaaatccacaatggtacgccttctcaatcgcctgattgaacccacccgcgggcaagtgctgattgatggtgtggatattgccaaaatatccgatgccgaactccgtgaggtgcgcagaaaaaagattgcgatggtcttccagtcctttgccttaatgccgcatatgaccgtgctggacaatactgcgttcggtatggaattggccggaattaatgccgaagaacgccgggaaaaagcccttgatgcactgcgtcaggtcgggctggaaaattatgcccacagctacccggatgaactctctggcgggatgcgtcaacgtgtgggattagcccgcgcgttagcgattaatccggatatattattaatggacgaagccttctcggcgctcgatccattaattcgcaccgagatgcaggatgagctggtaaaattacaggcgaaacatcagcgcaccattgtctttatttcccacgatctcgatgaggctatgcgtattggcgaccgaattgccattatgcaaaatggtgaagtggtacaggtcggcacaccggatgaaattctcaataatccggcgaatgattatgtccgtaccttcttccgtggcgttgatattagtcaggtattcagtgcgaaagatattgcccgccggacaccgaatggcttaattcgtaaaacccctggcttcggcccacgttcggcactgaaattattgcaggatgaagatcgcgaatatggctacgttatcgaacgcggtaataagtttgtcggcgcagtttccatcgattcgcttaaaaccgcgttaacgcagcagcaaggtcttgatgcggcgctgattgatgcgccgttagcagtcgatgcacaaacgcctcttagcgagttgctctctcatgtcggacaggcaccctgtgcggtgcccgtggtcgacgaggaccaacagtatgtcggcatcatttcgaaaggaatgctgctgcgcgctttagatcgtgagggggtaaataatggctgatcaaaataatccgtgggataccacgccagcggcggacagtgccgtgcaatccgcagacgcctggggtacaccggcgactgcaccgactgacggcggtggtgctgactggctgaccagtacgcctgcgccaaacgtcgagcattttaatattctcgatccgttccataaaacgctgatcccgctcgacagttgggtcactgaagggatcgactgggttgttacccatttccgtcccgtcttccagggcgtgcgcgttccggttgattacattctcaacggtttccagcaattgctgctgggtatgcccgcaccggtggcgattatcgttttcgctctcatcgcctggcagatttccggggtcggaatgggcgtggcgacgctggtttcgctgattgccatcggcgcaatcggtgcctggtcgcaggccatggttaccctggcgctggtgttaaccgccctgctgttctgtatcgtcattggtttgccgctggggatctggctggcgagaagtccgcgagcggcgaaaattattcgtccactgcttgatgccatgcagaccacgccagcgtttgtttatctggtgccaatcgtcatgctatttggtatcggtaacgtgccgggcgtggtggtgacgatcatctttgctctgccgccgattatccgtctgaccattctggggattaaccaggttccggcggatctgattgaagcctcgcgctcattcggtgccagcccgcgccagatgctgttcaaagttcagttaccgctggcgatgccgaccattatggcgggcgttaaccagacgctgatgctggccctttctatggtggtcattgcctcgatgattgccgtcggcgggctgggtcagatggtacttcgcggtatcggtcgtctggatatggggcttgccaccgttggcggcgtcgggattgtgatcctcgccattatcctcgaccgcctgacgcaggccgttgggcgcgactcacgcagtcgcggcaaccgtcgctggtacaccactggccctgtcggtctgctgacccgcccattcattaagtaactctgcacttgcccggtaacgccgggcatatcaccctgccaaaaaaaggaataacaatgcgacatagcgtactttttgcgacagcgtttgccacgcttatctctacacaaacttttgctgccgacctgccgggcaaaggcattacagttaatccagttcaaagcaccatcaccgaagaaaccttccagacactgctggtcagtcgtgcgctggagaaattaggttataccgtcaataaacccagcgaagtagattacaacgttggctacacctcgcttgcttccggcgatgcaaccttcaccgccgtgaactggacgccgctgcatgacaacatgtacgaagctgccggtggcgataagaaattttatcgtgaaggggtatttgttaacggcgcggcacagggttacctgatcgataagaaaaccgccgaccagtacaaaatcaccaacatcgcacaactgaaagatccgaagatcgccaaactgttcgataccaacggcgacggaaaagcggatttaaccggttgtaaccctggctggggctgcgaaggtgcgatcaaccaccagcttgccgcgtatgaactgacccataccgtgacgcataatcaggggaactacgcggcgatgatggccgacaccatcagtcgctacaaagagggcaaaccggtgttttactacacctggacgccgtactgggtgagtaatgagctgaagccagggaaagatgtggtctggttgcaggtgccgttctccgcactgccgggcgataaaaacgccgataccaaactgccgaatggtgcgaattatggcttcccggtcagcaccatgcatatcgttgccaacaaagcctgggccgagaaaaacccggcagcagcgaaactgtttgccattatgcagttgccagtggcagatattaacgcccagaacgccattatgcatgacggcaaagcctcagaaggcgatattcagggccatgttgatggctggatcaaagcccaccagcagcagttcgatggctgggtgaatgaggcgctggcagcgcagaagtaatttttattcgggcggataaggcgtttttgcctcatccgccgctctgtacacaatgcctgatgcgacgctgacgcgtcttatcatgcctacaaaccacatcgcacatttcaacaagctatctttcatcccatattcatcaacatccgctattattgatttccagcttaatcatcacctgatgaacaaaaataatgactaaacctaatcatgagcttagcccggcgctgatcgtgctgatgtctatcgccaccggtctggcggtcgccagtaactattacgcccagccgctactcgacaccatcgcgcgtaacttttccctttccgccagttcggcaggctttattgttaccgccgcgcaattgggctatgcagcaggtctgctgttttttgttcccctcggtgatatgtttgaacgccgccgcctgattgtctcgatgaccttactggcagcgggcggtatgttgattaccgccagcagtcagtcgctggcgatgatgctcctcggtacggcattaaccggtttattctctgtcgtggcacaaattctggttccgctggcagcgacgctggcttcaccggataaacgcggcaaagtggttggcaccattatgagcggtctgctgttggggatattgctggcacgaaccgttgccgggttactggcaaacctcggcggctggcgcaccgtcttttgggttgcctcggtgttaatggctctgatggcgctagcattatggcgtggtctgccacaaatgaaatcagaaacccacctcaactacccacagttgttgggttccgttttcagcatgtttatcaacgataagatcctgcgcacccgcgcattgcttggctgcctgacctttgccaacttcagcattctctggacctcaatggcctttttgcttgccgctccaccttttaactacagcgatggtgtcattggtctgtttggacttgcgggagctgccggcgcgttgggcgctcgtccggcgggcggttttgccgataagggtaaatcgcaccacaccacaactttcggtctgctgctgctattactttcatggctggcgatctggtttggtcacacttccgtactggcgttgattatcggaatcctggtgctggatctcaccgtacagggcgtgcatatcactaaccagacggtaatttatcgaatacaccctgatgcgcgtaatcgcctgaccgcaggttacatgaccagctactttattggcggtgccgccggttcgctaatttcagcctcagcctggcaacatggcggttgggctggcgtttgtctggctggcgcgacgattgccctggttaacttactggtctggtggcgaggttttcatcgtcaggaagccgcaaattaagcaatcagcaaccgttttcgtggctttacacttataagggtgttaagaagcccatcagtctgataaggttaagatattcattcagtctatttataatattaacaatcgttaagcgtacactctatggaaagccctactccacagcctgctcctggttcggcgaccttcatggaaggatgcaaagacagtttaccgattgttattagttatattccggtggcctttgcgttcggtctgaatgcgacccgtctgggattctctcctctcgaaagcgtttttttctcctgcatcatttatgcaggcgcgagccagttcgtcattaccgcgatgctggcagccgggagtagtttgtgggttgctgcactgaccgtcatggcaatggatgttcgccatgtgttgtatggcccgtcactgcgtagccgtattattcagcgtctgcaaaaatcgaaaaccgccctgtgggcatttggcctgacggatgaggtttttgccgccgcaaccgcaaaactggtacgcaataatcgccgctggagcgagaactggatgatcggcattgccttcagttcatggtcatcgtgggtatttggtacggtaataggggcattctccggcagcggcttgctgcaaggttatcccgccgttgaagctgcattaggttttatgcttccggcactctttatgagtttcctgctcgcctctttccagcgcaaacaatctctttgcgttaccgcagcgttagttggtgcccttgcaggcgtaacgctattttctattcccgtcgccattctggcaggcattgtctgtggctgcctcactgcgttaatccaggcattctggcaaggagcgcccgatgagctatgaggttctgctgcttgggttactggttggcgtggcgaattattgcttccgctatttgccgctgcgcctgcgtgtgggtaatgcccgcccaaccaaacgtggcgcggtaggtattttgctcgacaccattggcatcgcctcgatatgcgctctgctggttgtctctaccgcaccagaagtgatgcacgatacacgccgtttcgtgcccacgctggtcggcttcgcggtactgggtgccagtttctataaaacacgcagcattatcatcccaacactgcttagtgcgctggcctatgggctcgcctggaaagtgatggcgattatataacccacaagaatcatttttctaaaacaatacatttactttatttgtcactgtcgttactatatcggctgaaattaatgaggtcatacccaaatggatagttcgtttacgcccattgaacaaatgctaaaatttcgcgccagccgccacgaagattttccttatcaggagatccttctgactcgtctttgcatgcacatgcaaagcaagctgctggagaaccgcaataaaatgctgaaggctcaggggattaacgagacgttgtttatggcgttgattacgctggagtctcaggaaaaccacagtattcagccttctgaattaagttgtgctcttggatcatcccgtaccaacgcgacgcgtattgccgatgaactggaaaaacgcggttggatcgaacgtcgtgaaagcgataacgatcgccgctgcctgcatctgcaattaacggaaaaaggtcacgagtttttgcgcgaggttttaccaccgcagcataactgcctgcatcaactctggtccgcgctcagcacaacagaaaaagatcagctcgagcaaatcacccgcaaattgctctcccgtctcgaccagatggaacaagacggtgtggttctcgaagcgatgagctaacgcgtcatctcgctcaaaaatccagatttataaaagaaaaaatgaccggccagcatcgcaacatgctggcctttttggcaagcaggtcggctcagccgatgagttaagaagatcgtggagaacaatatgagcgcaaatgcggagactcaaaccccgcagcaaccggtaaagaagagcggcaaacgtaagcgtctgctcctccttctcaccttgctctttataattattgccgtagcgatagggatttattggtttttggtactgcgtcatttcgaagaaaccgatgacgcatacgtggcagggaatcagattcaaattatgtctcaggtgtctggcagcgtgacgaaagtctgggccgataacaccgattttgtaaaagaaggcgatgttctggtcactctcgacccgacagatgctcgccaggcgtttgaaaaagccaaaactgcactggcttccagcgttcgccaaacccaccagctgatgattaacagcaaacagttgcaggcgaatattgaggtgcaaaaaatcgccctcgcgaaagcacaaagcgactacaaccgccgtgtgccgctgggcaatgccaacctgattggtcgcgaagagctgcaacacgcccgcgacgccgtcaccagtgcccaggcgcaactggacgtcgctattcaacaatacaatgccaatcaggcgatgattctggggactaaactggaagatcagcctgccgtgcaacaggctgccaccgaagtacgtaacgcctggctggcgctggagcgtacccgtattgtcagtccgatgaccggttatgtctcccgccgcgcggtacagcctggggcgcaaattagcccaacgacgccgctgatggcggtcgttccagccaccaatatgtgggtggatgccaactttaaagagacgcagattgccaatatgcgtatcggtcagccggtcactatcaccacggatatttacggcgatgatgtgaaatacaccggtaaagtggttggtctggatatgggcacaggtagcgcattctcactgcttccggcgcaaaatgcgaccggtaactggatcaaagtcgttcagcgtctacctgtgcgtatcgaactggaccagaaacagctggagcaatacccgctgcgcattggtttgtccacgctggtgagcgtcaataccactaaccgtgacggtcaggtactggcaaataaagtacgttcaacaccggtcgcggtaagtaccgcgcgtgaaatcagcctggcacctgtcaataaactgatcgacgatatcgtaaaagctaacgctggctaatccagaggtgcgtgtgatgcaacagcaaaaaccgctggaaggcgcgcaactggtcattatgacgattgcgctgtcactggcgacattcatgcaggtgctggactccaccattgctaacgtggcgatccccactatcgccgggaatctgggctcatcgctcagccagggaacgtgggtaatcacttctttcggggtggcgaatgccatctcgatcccgcttaccggctggctggcaaagcgcgtcggggaagtgaaactgttcctttggtccaccatcgcctttgctattgcgtcgtgggcgtgtggtgtctccagcagcctgaatatgctgatcttcttccgcgtgattcaggggattgtcgccgggccgttgatcccgctttcgcaaagtctattgctgaataactacccgccagccaaacgctcgatcgcgctggcgttgtggtcgatgacggtgattgtcgcgccaatttgcggcccgatcctcggcggttatatcagcgataattaccactggggctggatattcttcatcaacgtgccgattggcgtggcggtggtgttgatgacactgcaaactctgcgcggacgtgaaacccgcaccgaacggcggcggattgatgccgtggggctggcactgctggttattggtatcggcagcctgcagattatgctcgaccgcggtaaagagctggactggttctcatcacaggaaattatcattcttaccgtggtggcagtggtggctatctgcttcctaattgtctgggagctgaccgacgataacccgatagtcgatctgtcgttgtttaagtcgcgcaacttcaccatcggctgcttgtgtatcagcctcgcgtatatgctctacttcggcgcgattgttctgctgccgcagttgttgcaggaggtctacggttacacggcaacgtgggcaggtctggcctctgcgccggtagggattattccggtgatcctgtcgccgattatcggccgcttcgcgcataaactggatatgcggcggctggtaaccttcagctttattatgtatgccgtctgcttctactggcgtgcctatacctttgaaccaggtatggattttggcgcgtcggcctggccgcagtttatccaggggtttgcggtggcctgcttctttatgccgctgaccaccattacgctgtctggtttgccaccggaacgactggcggcggcatcgagcctctccaactttacgcgtacgctggcggggtctatcggcacgtccatcaccaccaccatgtggaccaaccgcgagtcgatgcaccacgcacagttaaccgagtcggtaaacccgtttaacccaaacgcccaggcgatgtacagtcaactggaagggcttgggatgacgcaacagcaggcctccggctggattgcccagcagatcaccaaccaggggctgattatttccgccaatgagatcttctggatgtcagccgggatattcctcgtcctgctggggctggtgtggtttgctaaaccgccatttggcgcaggtggcggcggaggcggtgcgcactaagtacaactaagccagttcatttgaactggcttttttcaattaattgtgaagatagtttactgactaaatgtgcagttcctgcaacttctcttccggcagcgccagttcttcgttgctgttgatgcgcacgtcacgttccagaatgctacgcgcaatatcctgcgcttcctgcaacgagtgcatctggtaagtgccacactggtagacgttcagttccgggatctgattctgatcctgcactttcagcacgtcttccattgccgctttccaggcatcagcaacacgctgctcatctggcgtaccaatcagactcatataaaaaccggtgcggcagcccattggcgagatatcgataatctctacaccattaccgttaagatggttacgcataaaaccagcaaacaggtgctccagggtatggatccctctttctggcatcacttctttgttcggcacgcagaagcgcagatcgaacacggtgattgcgtcgccatgcggggtgttcattgttttcgccacccgaactgcaggcgcttccatccgggtatgatcgactgtgaagctatctaacaacggcatttagccacctccggtaatttttttaaaaattttctgaactctttcttcccaggcgagtctgagtatatgaaagacgcgcatttgttatcatcatccctgaattcagagatgaaattttggccactcacgagtggcctttttcttttctgtcaggcgtgtttttccagccacaccgcaaacggttcggtatctgcggcttccatttcctgctgacggcgttcagatgcctcgcgctcggctacaaaatcctcttcgcgcagaatttccagcggctcttcacgcagcagattacggtacgcttcagcaaacgctttgcctgttccgccaataccagtatcaatcatagaccttaagatacgggcagagaaagtcagatcgggattatcgaagcaggcaaccagttcatcacacactttctgatacgcttcgccgccgttaatgctatccagcgtttgcgcgacgcgtttcagatcgcggaacagatctttacccacctgcagtaacgggaactgcgcggtttcgcagccgatacccagcgtcaggcccggtttgcgaccttcaaggatcacccggttccagttaacgcgcgtacaggcaagttcgctactgctcatttccggtgcatcagccagcgcacaccagaccataaacaggtcgaggaatcgcacctgctgttcatctacaccaatcggcgagaacgggttgatgtccagcgaacgcacttcaatatattcaatgccgccacgtaacagcgcatcagaaggtgactcgccgctgcgggtaacgcgttttggacgaatcggcgcatacagttcgttttcaatctgcagcacgttgctattgatttgcagcctcttaccgtctttctcaataccaatcttcgcgtactcttccgatggcgttttgattgcctgtttaaggcccgctacgtactcgtaaagatcgttgaaggtaataccaagattgctttgcgatttattggtatagccgagatcgctcaaacgaagagaggtcgcatacggcaggtaatacataccgcactcggttttctcaaacggcagcgacgttggttttccttgcaggaaagaagaacaaatcgccggagatgcaccaaacagataaggaatgacccaaccgaaacgatagtaattgcggataacgcggaaatagcccgcagaaattttctctttggcatcagcgcccgagatatcaccgcacttcgcttgccagaatgccattggcaaagagaaattgtagtgcacgccggaaatggtttgcatcagcgcgccgtagcgatttttcagcccttcacgatacagcgttttaaagcgtccggtgttagaagtgccgtactgtgccagttcgatgtcctgaccttctgcgatgtagcatggcatacttaacggccacatccgctcatcacccatattgcgcgccgtataacgatgcagatcgcgcataaaggtcagcatatgttcaatatcaccatccactggtgtaatgaattccagcaatgcttccgcaaaatcggtagtaatccatttgtgcgtcagtgcggaacctaatgcttcaggatgacctgttgttgccagtgtgccatcagcattaacacgcaaagtttcgcgctccagcccacgctgtatcccctttaacgcctgaggatgtttttccagccaggccagcgcctgtgatacgtccgggatcaaattgacctcccgcctgtcaaaatcgttttaattagcataactgtaatggtgaccatatgtgcaggcctacaattagtgccaccacatcatgccctgaacggtcgctgctgcaactgcaacatagcgtaacgctttaccaaggcacaaaaaaaagattactggcccccaggagatgcgcatccatcccgctaacagacacagtaaatcgccaaccacgggcatccagcttaataatagcgtgactgcaccatagcgtttcagccagccggtagctttctcttgccagcgcgatgttttacgcaatggaaagaaacgcccaaggataacgttagttaaccctccaaggctattacccattgttgctgttaaaactaaaacccagggataactgatcccggaaagcaacattgccaccagcacgacttcggagttgccgggtaatagtgtagcgctgagaaaactactggcaaacaacgagaaaagcgataacgcttcactcacagcaagcgaacatccacggcgtccatgcctgctgcacgggccgcctgaataccgaaatcggcatcttcaaagaccacacactgcgtcggttgcacgcccatacgctgcgcgcacaacaaaaatgtgtctggcgcgggtttatggtgtttgacgtgatcagcagcgacgacggcgtcaaaataacggcgtaatcccaggtgcgccagcaatgcctcagcgatggcgctttcactccccgttcctacagccattgggcgacgaccatgccaacttttcaccacttcaacaagaggaagcggctcgacactatccagcagcatacttcttactgcttctgttttttcacgcgctaacgcatgcgggtcgagatcggcctgattcagctcaataattgcctgagcaatacgccaggtgggcgatccattaagcgcaatcattgcctgaacatcgtactgaagaccgtagtgccctaatacttcgcgccacgctttacggtgcgtaggctccgtatccaggattgtgccatccatatcaaaaattaaacctgcataacgctcgtacatggtcttctcgcaagtcgaaaaatatgacgctactttagcgtaattgcttgattttgtcgctgatggcgaaggagaagaaaattcaggaaatggataaagtagttatttagaaatgagatatttttgaaggaaatttttgggagaagatggtgcatccgggaggattactcactggcgttcgcccttcgggccgttgctgacgcaacgttatcctccctggtgcctgcggttaataccgctatctcttcgataccttcattgctgaaggttacggagaatatggtgcatccgggaggattcgaacctccgaccgctcggttcgtagccgagtactctatccagctgagctacggatgcatcgggaaaatttattttactgctgatattgatatcgctactaaagccatatcaagtaagagatggtgcatccgggaggattactcgccttgcggctcgcccttcgggccgttgctaaagcaacgttatcatccctggtgcctgcggttaattccgctacctcttcgataccttcattgctgaagatttcggagaatatggtgcatccgggaggattcgaacctccgaccgctcggttcgtagccgagtactctatccagctgagctacggatgcatcgggaaaatttattttactgctgatattgataccgctactaaagccatatcaagtaagagatggtgcatccgggaggattactcgccttgcggctcgcccttcgggccgttgctaaagcaacgttatcctccctggtgcttgcggttagtaccgccacctcttcgataccttcatcgctgaagattacggagaatatggtgcatccgggaggattcgaacctccgaccgctcggttcgtagccgagtactctatccagctgagctacggatgcatcgggaaacttactttactgcagattttttgataccgctactaaagccgtatcaagtaagagatggtgcatccgggaggattactcgccttgcggctcgcccttcgggccgttgctaaagcaacgttatcctccctggtgcctgcggttataccgccacctcttccataccttcatcgctgaaagtacgtagaatatggtgcatccgggaggattcgaacctccgaccgctcggttcgtagccgagtactctatccagctgagctacggatgcaaatggcggtgaggcggggattcgaaccccggatgcagcttttgaccgcatactcccttagcaggggagcgccttcagcctctcggccacctcaccacacgcctcttacgagtgcttcgaagaacttgtttatcgctcatcgtcgctgcgtggcgcacatattactttctgagacttataagtcaaacaatttttcctacacttttatcgtttgcacacttcacgttcaattagtctgtaaaaacgtcaaaaagagtgttttatcaacagaaaaatggaggtctgacagatagtagtaatgcaaaaaatggagacttaagttgaatgaacgggagtaaagcgaaaagactatagagtgaaggagaaattttgagggtgcgtctcaccgataaagatgagacgcggaaagattagtaactggactgctgggatttttcagcctggatacgctggtagatctcttcacggtgaacagaaacttccttcggggcatttacgccaatacgtacctggttgccctttacccctaaaactgtcacggtgacctcatccccaatcatgagggtctcaccaactcgacgagtcagaatcagcattctttgctccttgaaagattaaaagagtcgggtctctctgtatcccggcattatccatcatataacgccaaaaagtaagcaatgacaaacacattacatgtaagcagtcatggcattacattctgttaaacctaagtttagccgatatacacaacttcaacctgactttatcgttgtcgatagcgttaatgcgaatgccgtgaagcgagtccacggcattgcctgacgcttatattattgcaatttcgcgctgacccagcctttcacactggctaacgctgcaggtaaggccgcagcatccgtaccaccggcttgcgccatgtcaggacgtccaccacccttgccgcccacctgctgagcgaccataccaatcacttcccctgctttcacacgatctgtgacgtccttagatacgcctgcaatcagagaaaccttaccttcggctaccgttgccagcacgataattgtcgaccccagctgattttttaaatcgtcaaccatggtacgcaacattttcggctcaacaccgctaagctcgctaaccaacagcttaacaccattaacatcaattgccttactggaaagatttgcgctctcctgtgcggcagcttgttctttaagctgttgtagttctttttctaactgacgcgtacgttccagtactgagcgcactttatccgccagattattgctatcgcctttcagcagatgcgcgacttcgcttaagcgatcgctgtctgcatgaacggtggtgatagcgccttctccggttaccgcttcgatacgacgaacgcctgcagcagtacccgattcagagatgatgcggaacagaccaatatcaccagtgcggctggcgtgagtaccgccacacagctcggtggagaaatcgcccatgctcagcacgcgtacacgctcatcatacttctcgccgaacagcgccatcgcacctttcgctttcgccgcttcgagatccatgatgttggtttcgatcggcaaattgcgacgaatctgtgcgttcaccaggtcttcgaccgcacgaatctcttccggtttcatcgcttcgttgtgtgagaagtcgaagcgcagcaccttgtcgttaaccagtgaacctttctgcgatacatgagtccccagaacctggcgcagcgcagcgtgcatcaggtgcgttgcggagtgattcagacgaatacgggcgcgacgagcctcatcaacatcagcctgcacagcgtcgcccactttcagagaacccgcagcaagtttaccgatgtgaccaatcgcctggccgtatttctgcgtatcttccaccgcgaaggagaagttagcgcctttcagttcgcctttatcaccaacctgaccgccggattccgcatagaatggtgtttgatccagcacgaccacagcttcctggcctgcattgatggcatcaaccgctttaccatcaacaaacagcgcggtcactttgccgttcagttccagatggtcatagcctttaaattcagatgcactatcaacacggatcattgcgttgtaatcggcaccaaagccgctggcttcgcgcgcacgacgacgctgctcttccattgctgcttcaaaaccagcttcgtcaactttgatgttgcgctcacgacaaacatcagccgtcaggtcaaccgggaagccataggtgtcgtacagacggaaagccgtttcaccatccagcgtatcaccagaaagttttgccagctcttcatccagcaacgccagaccgcgctccagagtacgggcaaactgctcttcttcagtcttcagcacctgctcaacctgcgcctgctggcgtttcaggtcttcacccgcagagcccataacgtcgatcagcggaccaaccagtttgtagaagaaggtttctttcgcgccgagcatattgccgtgacgcactgcgcgacgaatgatacgacgcagtacataaccacggttttcattggacggcattacgccatccgcgatcaggaacgcacaagaacgaatgtggtcagcgattacgcgcagcgatttattgctcagatcggtcgcgccagtgactttcgctaccgcctggatcaacgtgcggaacaggtcgatgtcatagttagagttaacgtgttgcagcaccgcagcaatacgctccagacccataccggtatctacagacggcttcggcagcggttccatcgtgccatctgcctggcggttgaactgcatgaagacgatgttccagatctcaatgtagcggtcgccgtcttcttccggacttcccggagggccaccccaaatgtggtcgccgtgatcgtagaagatttcggtgcacgggccgcacggaccagtgtcacccatctgccagaagttgtcagatgcgtatggcgcacctttgttatcgccgatgcgaataatacgttcgcgcgggatccctacttctttttcccagatttcgtaggcttcgtcgtcgctttcatagacggtaacccacagacgctctttcggcagggcaaaccatttttcgctggtcagcagttcccatgcaaactgaatggcatcgtgtttgaaatagtcgccgaagctgaagttgcccagcatttcgaagaaggtatggtgacgcgcggtgtaaccgacgttttccaggtcgttgtgtttaccacccgcacgcacgcagcgttgggaagtggtagcgcgggaataattacgcttgtcgagcccaaggaacacatccttgaactggttcatcccggcgttggtaaacaacaaagttgggtcgttatggggtaccagggagctgctggcaactacctgatgtcccttactatggaaaaagtcgagaaacgcctgacggatctcagcggtgctcttgctcataattatcctgaaatcaagctaacgaaatatcgccaccagctccagcgtgtcttaaccgccgggctggtaactgaaaagtgggaataagataagttttcttgactgggaagtaaaataccgtatgcgttcagtcggcaaaatttcgccaaatatcctggatatcttccatcagatagccacgatagagcagaaaacgctggatcttaactttttctgaaaagacagttggcaaaggttcaccatattttcgcgtcgcctgatcgcgcgccagtgcgcaccagtcgatgtcacattcacgcatcgctttttctgtcgcttcgcgggaaatacctttctgattcagttcctgacgaatacgtgcaggtccataacctttgcggctacggctggcgataaagcgcgcaacaaatcggctgtcatcgagatagccatgttcatggcaccaggcaataacgcgctcgtaatcttctgccgtagcatcaatctcttctgggccatttttgcccataatcggtgccgcgagtttacgtcgcagttcttgctcactgtgatcgcgcaccgccagaatgcgtaccgcacgatccaacaggcgagcatatgccgggcgacgggacgttgattctgtcatggcatatccttacaacttaaaaaagcaaaagggccgcagatgcgacccaggttttgctgataaacagatttaatagtcaatgagtgtgcagaatgttcccgcaggcccaattcgttagaggatcgaggtgagagtaatttttcacgccagtgctggcctgttcccctcaccctaaccctctccccaaaggggcgaggggaccgtccgtgcacacattatctattatcatcaataacgaacgattaaaaatcttcgttagtttctgctacgccttcgctgtcatctacagagaaatccggcgttgagttcgggttgctcagcagcaactcacgtactttcttctcgatctctttcgcggtttccgggttatctttcagccaggcagttgcattcgctttaccctgaccgatcttctcacctttgtagctgtaccacgcgcctgctttctcgatcagcttctcttttacgcccaggtcaaccagttcgccgtagaagttgataccttcgccgtagaggatctgaaattcagcctgtttaaacggtgcagcgattttgttcttcaccactttcacgcgggtttcgctacccaccacgttttcgccctctttcaccgcgccgatacgacggatgtcgagacgaacagaggcgtagaatttcagcgcgttaccaccggtagtggtttccgggttaccgaacatcacaccaattttcatacggatctggttgatgaagatcagcagcgtgttggactgcttcaggttacccgccagcttacgcatcgcctggctcatcatacgtgccgcaaggcccatgtgagagtcgccgatttcgccttcgatttccgctttcggcgtcagtgccgccacggagtcaacgacgataacgtctactgcgccagaacgcgccagggcgtcacagatttccagtgcctgctcgccggtgtccggctgggagcacagcaggttatcgatatcgacgcccagtttacgtgcgtagattgggtccagcgcgtgttcagcatcgataaacgcacaggttttaccttcacgctgcgctgcggcgatcacctgcagcgtcagcgtggttttaccggaagattccggtccgtagatttcgacgatacggcccatcggcagaccacctgccccaagcgcgatatccagtgaaagcgaaccggtagagatggtttccacatccatggaacggtcttcacccaggcgcatgatggagcctttaccaaattgtttctcaatctggcccagtgctgccgccaacgctttctgtttgttttcgtcgatagccatttttactcctgtcatgccgggtaataccggatagtcaatatgttctgttgaagcaattatactgtatgctcatacagtatcaagtgttttgtagaaattgttgccacaaggtctgcaatgcatacgcagtagcctgacgacgcaccgcatcacggtcgccgctgaagcattcccgccgggtaatgccttcaccgcgggcagtggcaaaagcaaaccagacggtgccgacaggcttctcttcactgccgccatccggcccggcgataccactaatagacacggcataatcagcacgagccgctttcagtgcgcctatcgccatttccaccacgacgggttcactcaccgcgccatgctgcgccagcgtctcttcgcgtacgccgatcatctgcgctttggcttcgttactgtaggtgacaaatccgcgttcaaaccaggcggagctaccggcaatatcggtaatcactttcgctacccaaccaccggtacaagactcggcagttgttacggttgcgccacgggctttcagcgcctgcccaacctgttcacttaactgcatcagttcactgtcagtcatcacaacctctgtcagtcaaaaatttatgccggacaagatagcactttcgtcaggaagatggtgttggcgttgcaattttacgaggaggattcagaaaaaagctgattagccagagggaagctcacgcccccctcttgcaaatagttactgcacgcgcgccagcgccacggcttgtcctaactgccagaccgccattgcgtaatgggtgctgtggttataacgggtaatggtgtagaagttcggcagaccgtaccagtactggtaaccggtaccgacatccagacgcagcaggctggcttgttgatggttgcccagcggctgctgtggcgttaaacctgccgtggcaagctgcgaaatgctgtacctggttttgaagccatttggcaagcctggagcctgaccgtttgccattaccgcgacctgatcgcctttcacccagccgtgcgctttgaaatagttcgccacgctaccgatcgcatcaaccggatcccacaggttgatatgcccgtcgccgctgaaatctaccgcatattgtttgtaagacgacggcataaactgtccgtagcccatcgccccggcaaaggaacctttcagattgagcggatcgtcctgctcgtcgcgcgccatcaacaggaaggtttccagctcgccagagaaatactccgcgcggcgtgggtagttaaatgacagcgttgccagcgcatcgaggatgcgagttttccccatcacgcgcccccagcgggtttcaacgccgataatcccgacgataatttccggcggtacgccatacacctgccacgcgcgattcaacgcatcttcatactgattccagaaaaccacaccgttctgcacgttgtccggcgtaataaattttttgcgataacggagccatgcgccgttcggacctgatggcggtttcaccgatgtggttggtgcctggttatccatcagccgcagtaccgaatccagacgattcgcctgggagagaatttcctgcaactgctgacgatcgaaaccgtgtttgttcaccattttgtcgatgaactgctgggcattcgggttattagcgaaatcgccgcccatctgcatcacattgtgctgcggctcaagcaggaagccgccagacggcgttcccggtgtgtcgtttgcagtctcagtaggttttggcttgctgctacaggcggcaagcaacacaaaaaggggaagcaatgttacataacgacgcttgaacatgaggggtccatttaacagattcaaccaggggcaagtatggtaaagcatcacgccccacacaaggaagcggtagtcactgcccgatacggactttacataactcaactcattcccctcgctatccttttactcaaactttcaaattaaaatatttatctttcattttgagatcaaaataacacttttaaatctttcaatctgattagattaggttgccgtttggtaataaaacaataaatcctgaaggagagaacaatgatagaaaccattactcatggtgcagagtggtttatcgggctgttccaaaagggcggagaggtgtttaccgggatggtgaccggcattcttccgctgttgattagcctgctggttatcatgaacgcactgattaattttatcggtcagcatcgtattgaacgttttgctcaacgttgcgccggtaaccctgtttcccgttacctactgttaccgtgcattggcacgtttgtcttttgcaatccgatgaccttaagcctgggtcgctttatgccggaaaagtacaaacccagctactacgcggcggcctcttatagctgccactcaatgaatggcctcttccccccatatcaaccctggcgaactgtttgtttatcttggcattgccagcggtctgacaacgctgaacctgccacttggcccactggcggtgagttatctgctggttggtctggtcaccaatttcttccgcggctgggtgaccgatctgaccaccgccatttttgagaaaaagatgggcattcaacttgaacaaaaagttcacctggcaggagcaacatcatgacgcatattcggatcgaaaaaggaacgggtggctggggcggcccgcttgagctgaaagccacgccgggaaaaaaaatcgtctatatcaccgccggtacccggcctgcgattgttgacaaactggcacagcttactggctggcaggctattgacggatttaaagaaggtgaacccgcggaggcggaaattggtgtcgcggtaatcgactgtggcggcacattacgctgcggcatctatccgaaacgacgtattcccaccattaatatccactcgacgggcaagtccggtccgctggcgcagtacattgtggaagatatttatgtctctggcgtaaaagaagaaaatatcactgtagtgggtgatgcgacaccacaaccctcttccgtgggccgtgactatgacaccagtaagaaaatcaccgaacaaagcgatggtttactggcgaaggtgggaatgggcatggggtccgccgttgcggtgctgtttcaatctggtcgtgacaccatcgacactgtattaaaaaccattctgccgtttatggcattcgtctcggcgctcattggcatcattatggcttctggccttggtgactggattgcccacggtcttgctccgctggcgagccatccactgggtctggtcatgctggcgctcatctgctccttcccactgctttcacctttcctcggcccaggcgcagttatcgcacaggttatcggcgtattgattggcgtgcagattggtctcggcaatattccgccgcatctggctttaccggcactgtttgccatcaacgcgcaggcggcctgcgacttcatcccggtcggtttgtcgctggcggaagcccgtcaggacacggttcgcgtcggtgtcccttctgtactggtgagccgctttttaaccggcgcaccgactgtactgatcgcctggtttgtctccggttttatctatcaatagaggctgaaacatgaccgttatttatcagaccaccatcacccgtatcggcgcgagtgccactgacgccctcagcgaccagatgctcatcacctttcgtgaaggcgcgccagcggacctcgaagagtattgcttcattcattgccacggcgagttgaaaggtgcactccatcccggtttgcaatttacgctcgggcagcatcgctatccggtgaccgctgttggcagcgtggcggaagacaaccttcgcgaactgggtcatgtcaccctgcgcttcgatggtttaaacgaagcggaatttccgggcactgtccatgtggcaggccctgtacccgacgatatcgcgccgggatcggttttgaagtttgaatctgttaaggagtaaaaaatgaatcaggttgccgttgtcatcggtggtgggcaaaccttaggcgcgttcctgtgccacggtctggctgccgaggggtatcgcgtcgcggttgtcgatattcagagcgacaaagccgcaaatgtggcacaagaaattaacgccgaatatggtgaaagtatggcgtacggttttggtgctgacgccactagcgagcaaagcgttctggcgctctctcgtggggtagatgaaatctttggtcgcgtggatttgctggtctatagcgccggaatagcaaaagcagcctttatcagcgacttccagctcggcgattttgaccgttcgctacaagtgaatctggtgggttatttcctgtgtgcccgtgaattttcgcgtttgatgatccgcgacgggattcagggtcgcattattcagatcaactcgaaatccggcaaagtgggcagcaaacacaactctggctacagcgcagcgaaatttggtggcgtcgggctgactcaatcactggcgctggatctggcggagtacggcattacggtgcattcactgatgctcggtaacctgctgaaatcgccgatgttccagtcactgttgccacaatacgcgaccaagctgggtatcaaaccggatcaagtcgagcagtattacatcgacaaagtaccgctcaaacgcggctgcgattatcaagatgtgctgaatatgctgctgttctacgccagtcctaaggcgtcgtactgcaccggacagtcgatcaatgtcaccggcggtcaggtgatgttctgatcaacagcggagatccattaaggatctccgtgagactatagaatgcctgatgcgctacgctcatcaggcatacaggacttccgccactacattaaggaaaagttatggtatccgcactcatcaccgtcgccgttatcgcctggtgtgcgcaactggccttaggcggctggcaaatttctcgttttaaccgtgccttcgacacactatgccagcaagggcgggttggcgtgggccgttccagcgggcgctttaaaccgcgggtcgtggtcgccatcgcgctggacgatcagcagcgcatcgtcgacaccttgtttatgaaaggactgaccgtcttcgcccgaccgcaaaaaattcccgcaattaccggcatgcatgcgggtgatttacagcccgatgtgatctttccccatgatccactatcacagaatgctctatcattggcgcttaaactgaaacgtggataatttcgttgtgaatgttacttgcttgcgaagttatcattttgaaacctaaatcaggtaatcacgcccatgaaacctcgtcagcgtcaggccgccattctggagtatctgcaaaagcagggtaaatgctcggttgaagaattggcgcaatactttgacaccacaggcacaaccattcgcaaagatctggtcattctggaacatgccggaaccgtcattcgtacttatggcggagtggtgttgaataaagaggaatccgatccgcctatcgatcataaaacactcatcaacacccacaagaaagagctgattgcagaagctgccgttagttttatccatgatggcgattcgatcattcttgatgctggcagtaccgttttgcagatggttcccctgctctcgcgctttaataacatcacggtgatgaccaacagcctgcatatcgtcaatgcgctatccgaactggataacgaacaaactatcctgatgccaggcggaacgtttcgtaaaaaatcggcctcatttcacggacagctggcagagaatgccttcgaacatttcagtttcgataaattgtttatgggcaccgacggcatcgatctcaatgcgggcgtaaccaccttcaacgaggtttataccgtcagtaaggcaatgtgcaatgccgcgcgcgaagtgattttgatggcggactcatcaaagtttggccgtaaaagccccaacgtagtttgcagtcttgaaagcgtcgataagctgattaccgacgcaggtatcgatccggcgtttcgtcaggcgctggaagagaaagggatcgatgtgatcataaccggagagagcaatgagtgaagcactacagaacgcgggacgtcagacgttaatgctggagttgcaggaagcaagccgtttaccggaacgtctgggcgatgattttgttcgcgccgccaatatcatcctgcactgcgaaggcaaagtggtggtttcgggaattggcaaatcgggccacattggtaagaaaatcgccgcaacacttgccagtaccggcacaccggcttttttgtccatccggcagaagcactgcacggcgatctggggatgattgaaagccgcgatgtgatgctgtttatctcttactccggtggcgcgaaggaactggatctgattattccgcgtctggaagataaatctatcgcgctgctggcgatgaccggcaaaccgacgtcaccgctgggcctggcggcaaaagcggtgctggatatctccgtagaacgcgaagcctgcccgatgcaccttgcgccgacctccagcaccgtcaataccctgatgatgggtgacgcgctggcgatggcggtcatgcaggcgcgcggatttaatgaagaagattttgcccgctcccacccagccggggcactgggcgctcgcttgctgaataaagtgcatcatctgatgcgccgtgacgatgccatcccacaggtggcgttaaccgccagcgtgatggatgcgatgctggaactcagccgcaccggtctggggctggtggcggtatgtgacgctcaacaacaggtacaaggcgtctttaccgacggcgatttacgtcgctggctggttggcggcggcgcactcaccacgccagttaatgaagcgatgacggtcggcggcaccacgttgcaatcgcaaagtcgcgccatcgacgccaaagagatcctgatgaagcgcaaaatcactgccgcaccggtggtagatgaaaacggcaaactcaccggcgcaattaacctgcaggatttctatcaggccgggattatttaatccttcattcccagacgtttcgccagccgatgcaggttggcgacgtcggtttccagcatccgcgcgcaggcagcccagttgtgatgattttgtgccagcgcctgacgaatagtttcacgctggaacgcttctgtcgcttcacgcaggttttgcttaacaacgggcaccgccgccgcttctggcggcggcaacgtcacctcaggaaaagcaaaatgttgcgcctcaagaatcacttcatcgccgttgcgggtggctctcgacagcactaccgcccgatgaatagcatgttccagttcgcgcacgttccccggaaaacgatagtgttgcagtaaatttcgcgctccggcacttaataccacgcgggagagccccagccgcaaacgacactgctcgcagaaataccccgccagcagaatgacatcatcgccccgctcacgcagcggcggcaccgaaagtggaaacacgctcaggcgatgaaacaagtcagcgcgaaatcgccctgccagcacctcttcgcgtaagtcgcggttagtcgccgccagcacgcgcacatcgacccgcaaactgcggtcatcgccaacgcgctgaatatcgccatactgcaacaccctcagcagcttggcctgcaatgccaacgacaactcgccgatctcatccagaaacagagtgccgttatccgccatttcaaacttcccgctgcggttactgatagcgccagtaaacgctcctttcacatgcccgaacagttcactttccgccacactttccggcagtgcggcacagttgagatagaccagcggattcaccgcccgtggcgaggcttcatgaatcgctttcgccaccagctccttaccggttcccgtctcaccgctgatcaggacgttgagatcggacgccgccacaatctcaatctcttttttcagttgcgtcatgccaggggacaagccaatcatctgcgtctgtttcaccgcttcaaacggcgtggcatcgcctggcatcatattctggctttccagttgttcaatcagcaacgcattgcttaacgctcccgccgccagcgcagcaatcagccgtagctcttcgtcgctgaaaacatcgaactgatcgggctgcatcccgtcgagcgtcagtgcgccgatcaggttttgcccggcaaacaatggcagaccaacgcaggcgtgaaccttcagactctcctgcccaggaatcaaaccgtcatagggatcgggcaattcgctgtctgcgggaaagcgcaccacatccccggcgcgggcaatcgcttccagccgtggatgcccttccagcgcaaagcgtctaccgagtacatcctttgccagaccgtcgatggcaagcggaataaactgccgcgaatcgtaacgtagcaacgcagacgcatcgcactccagcacctgacgtagcgtggtgatcaggcgctgaaaacgatcctgatgaccaatcccacgctgcaattcgatggcgatattcgccagcacatcaacggaaaaactcatctttgcctcactgtcaatttgactatagatattgtcatattgaccatttgattgatagtcattttgactactcattaatgagcataattttatttatagagtaaaaacaatcagataaaaaactggcacgcaatctgcaattagcaagacatctttttagaacacgctgaataaattgaggttgctatgtctattgtggtgaaaaataacattcattgggtgggtcaacgtgactgggaagtgcgtgattttcacggcacggaatataaaacgctgcgcggcagcagctacaacagctacctcatccgcgaagaaaaaaacgtgctgatcgacaccgtcgaccataaattcagccgcgaatttgtgcagaacctgcgtaatgaaatcgatctggcggatatcgattacatcgtgattaaccatgcagaagaggaccacgctggggcgctgaccgaactgatggcgcaaattcccgatacgccgatctactgtactgccaacgctatcgactcgataaatggtcatcaccatcatccggagtggaattttaatgtggtgaaaactggcgacacgctggatatcggcaacggcaaacagctcatttttgtcgaaacaccaatgctgcactggccggacagcatgatgacttacctgacaggcgacgcggtgctgttcagtaacgatgctttcggtcagcactactgcgacgagcatctgttcaacgatgaagtggatcagacggagcttttcgagcagtgccagcgttactacgccaatatcctgacgccgttcagccgcctggtaacgccgaaaattaccgagatcctgggctttaacttaccagtcgatatgatagcgacctcccacggcgtggtctggcgcgataacccgacgcaaattgtcgagctgtacctgaagtgggccgctgattatcaggaagacagaatcaccattttctacgacaccatgtcgaataacacccgcatgatggctgacgctatcgcccagggaattgcggaaaccgacccacgcgtggcggtgaaaattttcaacgtcgcccgaagcgataaaaacgaaatcctgaaccaatgtcttccgctcaaaaggcgtgctggtcggcacttcgacgatgaataacgtgatgatgccgaaaatcgccgggctggtggaggagatgactggtttacgcttccgtaacaaacgcgccagtgctttcggctctcacggctggagcggcggtgcggtggatcgtctttccacgcgcctgcaggatgcgggtttcgaaatgtcgcttagcctgaaagccaaatggcgaccagaccaggacgctctggagttatgtcgtgaacacggtcgcgaaatcgcccgtcagtgggcgctcgcgccgctgccgcagagcacggtgaatacggtggttaaagaagaaacctctgccaccacgacggctgacctcggcccacggatgcagtgcagcgtctgccagtggatttacgatccggcaaaaggcgagccaatgcaggacgttgcgctaggaacgccgtggagtgaagtcccggataacttcctctgcccggaatgctccctcggcaaagacgtctttgaagaactggcatcggaggcaaaatgagtaacggcattgtgatcatcggttcgggcttcgccgcccgccaactggtgaaaaatattcgcaaacaggacgccactattccattaaccctgattgccgccgacagcatggatgagtacaacaaacctgacctcagccatgttatcagtcaggggcaacgtgccgatgaccttacccgccagacggcggtgaatttgccgagcagtttaatctgcacctgtttccacaaacctgggtgacggatatcgatgccgaagcccgtgtggtgaaaagccagaataatcagtggcaatacgacaagctagtactggcaaccggtgccagtgcctttgtcccgcctgtgcctgggcgtgagttaatgctgacgttaaatagtcagcaagagtatcgcgcctgtgaaacgcaactgcgggatgcccgacgcgtgttgattgttggcggtggtttgattggtagcgaactggcgatggatttttgtcgtgcaggcaaagcggtcacgctaatcgacaacgctgccagtattctggcgtcattaatgccaccggaagtaagcagccgcttgcagcatcggttgacggagatgggcgttcatctgttgttgaaatctcagttgcaggggctggaaaaaacagattctggcattctggcaacgctggaccgccagcgcagtatcgaagtggatgcggtaattgccgccaccggactgcgcccggaaaccgccctggcacgacgcgccgggctgacgattaatcgcggcgtttgcgtcgatagttatctgcaaaccagtaatgccgatatttacgcgctgggcgattgcgcggaaattaacggtcaggtattgccgttcctccagccgattcaacttagcgcgatggtgctggcaaaaaatcttctcggcaataacacgccactgaaactaccggcgatgctggtgaaaatcaaaacgccggaattaccgctgcatctggcaggcgaaacccagcgtcaggatttacgctggcaaattaataccgaacgccagggaatggtggcgcgcggcgttgacgatgctgaccagcttcgcgcctttgtggtcagtgaggatcggatgaaagaggcatttggattgttgaaaacattgccgatgtaggtgggctactgtgcctaaaatgtcggatgcgacgctggcgcgtcttatccaacctacggggagcgcatgtgttggtcacatactgcgttcatgtcgcatccacctactgtgcccaaaatgtcggatgcgacgctggcgcgtcttatccgacctacggggacgcatgtgtaggccggataaggcgtttacgccgcatccggcaatggtgtccaaatgcaacacgttttatccgttctggacttcacccgctaaccaacgcgccgcagcaataaccccctgccccagagacaaaccgccatcacccgccggtaaactctgtggaaagagcaatgtgaaatcagcgagataatgcgccagacgtgcacgcagcaaacggttatgaataaccccgccgctaaataccagcgtagtgataccacgcatcgtggcctgctcacgcatcaacgcggcaaaaccctgcgccagcgcatcatgaaacgcccacgcgcgttgattaaccggtgcctgccagttcagccactgctgccagaaagtggcgagatccagttgattgtccaccagcggcattgtcaccggatgcgtcactccgtggcacgaagctgcgagtgcctccagagcacaagccgcttcaccttcataacttaacgtggctggcgcacagcccagtgccgccgccacggcatcgaacaaccgcccacacgatgacgccagcggcgcgttaattccacgctcaatggcccgcgccagcacgctccagttttgctgttgcacacttgctgtttcagaataattctgccactccggcacaaagcgcaggcactgcgccagcaggtttcgccacggctgcttcgccgccaaatcgccacccggaagcgccactgcaggcaagccgcccaggtgctcacattcgcgatagttcacccgcagacactcgccgccccacaaagcgccgttctcccccataccgataccatcgagcgtcaaagcaatgacatcaccgccatccagcggccactgatgctctgccagacacgccgctgcgtgggcatgatgatgcagcaccgtttgcgtcggcatattcatttcgctcgcccactggctggagacatagcccggatgcacgtcatgcacaacgtattgcggagtgaaatcgtagatgttttgcatcaggcgtaacgcttcgcgccactgcatctggatgccatcgtcacttaaatcgcccagatgctgactcaacaccgcttgttcaccgcgcaccaggcagaaggtgtttttcagatccgcgccaagacacagcacaggcggaacatttttaaagcccggaggcaaaaccagcgcatccggcacatacccgcgtgaacggcgcagcatttcgccgctttcgcgcaccaccgaatcatccatccgctgcacgatgtcgcggttatgtatcaagaatccgtcggcaatgccctgcaaatcctccagcgcctgttcgttgctgatagccggtggtttaccgctcaggttgccggaggtcatcaccagcgggcattgcagttcctgtaacagcaaatgctggagcgggttcgcaggcaacattaccccgacttcgttaaggtcaggggcgatatcatcacaaagctcaggaacgtattttttatccaccagcacaatcggcgcggcgggcgtggtaagcaactggcgcgcagcgtctggtaaaccgtcagccactggcaacatgaccgccagcggtttcgccgggcgatgtttgcgcgcccgcagtgtcgccaccgcgttactgttacgtgcatcgcaggcaagatgaaatccgccaatccctttgatggcgacaatgttgcccatttttaactgtgcgatagccgcctgtaatgccgcctcttgttctgcatgttcaccatgacttacccattcaagatgtgggccacactccgggcaggccaccggctgggcgtggaagcgacgatcgagcgggtcgcggtactctttgtcacaagccggacacaacggaaacgccgccatcacggtaaacgggcggtcgtaaggcatggcgcgaataatggtgaaacgcgggccgcagtgggtacagttgataaacggataacgataacgccgttcgcctggggtattcatttcggcaagacaggcagggcaagtagcggcatcgggaacaatttgcgtattcatggtgccgcctgtgctctggcgtatagtgaactcggtgggcagttgtgaccagatgtacggctcacgctcgacgctatcaatacgcgccagtggcgggcagtgctgatgcaattgaacaagaaacgtttccgggtcttccagcagccggacttctacgccatcgccgtcattacagacatcgccgtgaagatttaattgctgtgccagctgccagacaaacggacgaaaaccgacgccctgcactttgcctcgaatacgcagttggacaccgcaagatgtgttttttgccattgagttattcccgccatcatgaattgcgtaacccgccctgccggacacgactgcgtcgtatccggcagtctcaggtcggcgataccgccagctccgtattctacgaatatttccgggaattcctttgatgccagaacagttctataagatttttagaacatcagcgccgtacggcgacgtttttctgcgctcagttgttcaagtttattacgatcgacacaaatcagcgcatgggtcgggcaagccgccatacacgccgggccgtcttcgcgatggttgcacaggtcgcatttattggcttcagctttgtcagcccgtacattcagccccgcgccgctgttgcggatcaccggacgtaccaccacttccatcgcgccatacgggcaagccaccacgcaggttttgcaaccaatgcaacgttcctgcatcacatgaacaaaccctttatcacggctgatagcaccattcgggcagacgttagcgcacggtgcatcttcacactgacggcagactgtcgccgtggaaatgttcacacctttaatgacatggattcgcggtaaaaaggtttccggggtcagcgatgcacagtcctgattttcctgatgagaaaccacgcacgccacttcacaggtacggcaaccaatacatttactcgcgtcagcaatgatgaaacggttcatcaaattctccagcaatgacagttaatgcgccgatacattcacaaatcatgccagtttttaattcactgttatttaaggaaattaatttctgtaatgcaggaaaaagatgtcatcgacactagtgacgatgacatgtgatgacaatgtttatcgcgaaagagcaatgagtgagtcgcggcggatcagttttccgctgaaggttttcggcggtgagaaatccccgccatcgagcataaaaatcagccgtccaataatttcctgaatcatctcagtcaccggaatttttacgctggagagcgccggaacgatatagggggcaattgcgatatcatcgaatccgataactgacacctgctctggcaccgctacgccgcgctcgtgcaacgctttcatcgcacctatcgccatatcgtcgttactggcaactaacgcgctaaatttagccccacgttcgagcaacgtttctaccccttcggccccgctggcgggcgtccatttaccgttagcgataagtttttcattgagcgcaataccatgctgcgccagcgcgtctttatacccagcaagacgttcaatgctggtgggggaatccatcgagccggtaaggaaagcaatctcctgatgtccggcgtttatcaactctgccacggcattaaagctggtctgtttatgatcgcaccagacgctatggctgctatttttgcgcaggcggcgattaagcaccattatcggctgactgtgcgcgtcaataatgtcatcgatctcatccacgcttaaaaaacgcgggtaaatcataatggcgtcgcagcgcaaatccagcagatactgaatcgcctggcgctcttcttcggcgctgtgtttaccatctgccaatagcaactgccgccctttctcttccgccattcgcgcggcatgaaagagtaattcactaaaataaatgccgtggtaaagcgtgttggtcactaccagccccagcgtctgagtactcttcgccgacagattgcgcgccagcaagtttgggcggtaaccgctctcttctaccgcctgaaacacgcgatctttagtctcctggctgacgtagccattacctgaaagcacgcgggaaacggtcgcttttgaaaccccggcgcgcttcgccacttccagcatcgtcgtcatcattttcatccctttacacgcaatcaacgcagtgtactgcaccgtttgccgattgtccttgcgcaatcggcgggaaaaatattcaggtgaccggtttcacaaatataaaaaatgaacaattaaccctcttgcttatttagtgacaactattaatgattttgtgaaaccggtttcctaattccgtttcagcatcggcatttttccgtcacgtcgactgataacaactacatctaccctactgataacaggataaaatccgatggccaaaaattatgcggcgctggcacgctcggtgatagcggcactgggcggcgttgataacatctcggcagtcacgcactgtatgacgcgtttgcgctttgttatcaaagatgaccagcttatcgacagcccgacgttaaaaaccatccccggcgtgctcggcgtggtacgtagtgacaaccagtgtcaggtgattatcggcaataccgtttcacaagcctttcaggaagtcgtcagcctgctgccgggagatatgcagcccgcacagcccgtaggtaaacccaaactcacgctacgtcgcattggtgcggggatcctcgatgcgctgatcggcaccatgtcaccgctgatcccggcgattatcggcggatcgatggtcaaactgctggcgatgatcctcgagatgagcggcgtgctgacaaaaggatcgccgaccttaactattctgaatgtgattggtgacggtgctttcttcttcctgccgctgatggtcgcggcttcggccgccatcaaatttaaaaccaatatgtcgctggcgattgccatcgcgggtgtgctggtacatccgagctttattgaactgatggcgaaagcggcccagggtgaacatgtcgaatttgccctgatcccggtcaccgcggtgaaatacacctacacagtgatcccggcgctggtgatgacctggtgcctgtcatatatcgaacgctgggtggatcgcattacaccggcggtgaccaaaaacttcctcaaaccaatgctgattgtgttgattgccgcaccgctggcaatcctgctgattggcccgattggtatctggatcggtagcgccatttcggcgctggtttacaccattcatggttatctgggctggctttcagtcgccattatgggcgcgctgtggcctctgctggtaatgaccgggatgcaccgcgtctttacgccaaccatcattcagaccattgccgaaaccggcaaagaagggatggtcatgccgtcagagatcggcgctaacctgtcgctgggcggttcatcactggcggtggcgtggaaaacgaaaaacccggaactgcgccagacggcgctggctgcggcggcatcagccattatggcggggatttccgaaccggcgttatacggcgtggcgatccgcctgaaacgtccgcttatcgccagtcttatcagcggttttatttgcggtgcggttgccggtatggcggggcttgccagccactcaatggcagcgccggggctatttaccagcgtgcagttcttcgatccggcgaatccaatgagcatcgtctgggtgttcgcggtcatggcgctggcggtcgtgctgtcgtttatcctcacactgttgctcggctttgaggatattcctgttgaggaagcggctgccgaggcgcgaaagcatcagagcgtacaaccgaccgtcgccaaagaagtaagtcttaattgaggatgaaaatgtcagtatttccagaaggttttttatggggcggcgcgcttgccgccaaccagtctgaaggtgcgttccgtgaaggtggcaaaggactgacaacggtcgatatgatcccacacggcgagcatcgaatggcggtgaaactggggctggaaaaacgttttcagttgcgcgatgacgagttttatcccagccatgaggcgacggatttttatcatcgttataaagaagatatcgccctgatggcagagatgggattcaaagtgttccgtacctcaattgcctggagccgcctcttcccgcagggcgatgaactgacgcccaaccagcagggcattgctttttaccgttctgtctttgaagagtgtaaaaagtatggtatcgaaccgctggtcacgttgtgccacttcgatgtgccgatgcatctggtcaccgaatatggctcctggcgtaaccgcaagctggtggagcttttcagccgctacgcccggacctgctttgaagcatttgatggtctggtgaaatactggctaaccttcaatgaaatcaacattatgttgcatagcccgttctccggcgcgggtctggtgtttgaagaaggtgaaaatcaggatcaggtgaaatatcaggccgcgcatcaccagctggttgccagtgcgctagccaccaaaatcgcccatgaggttaacccgcaaaatcaggtgggctgtatgctggcgggcggtaacttctacccttacagttgcaagccggaagatgtctgggcggcgctggagaaagatcgggaaaacctgttttttatcgatgtgcaggcgcgcggcgcgtatccggcttactctgcccgcgtatttcgcgaaaaaggggtaaccatcaacaaagcaccgggcgatgatgaaatcctgaaaaacaccgtcgattttgtctctttcagctattacgcctcgcgctgcgcctcggcggagatgaacgccaacaacagcagtgcggcgaacgtggtgaaatcgctgcgtaatccgtatctacaggtgagcgactggggctggggaattgatccactcggtctgcgtatcaccatgaatatgatgtacgatcgttatcagaagccgctgtttctggtggaaaacggcctcggcgcaaaagatgaacttgctgccaatggcgagattaacgatgactatcgcatcagctatttacgcgaacatatccgcgcaatgggcgaagcgattgcagatggcattccgctgatgggctacaccacctggggctgtattgatttagtttccgcctctacgggtgaaatgagcaaacgctacggttttgtctacgtagaccgtgacgacgcaggcaacggcacgctgacgcgcacgcgtaagaaatcgttctggtggtataaaaaagtaattgccagtaatggggaagatttagagtaagtaaccgtgccggatgcggcgtgaacgccttatccggcctacatagttcgtgcgacatgtagatactgttatggcctgcaagttttttcctggtccggtttcccggattgcaggcatgccagacacagcgccgtcaggcgctgttttttcatcccttccgcgatttttacgccgctaccggattatgccgtgacgcatcgaacggcacgcctgacttcagcactccatacgccacctgtgccagcttgcgcatcatcgcgccgagaatcacctttcctttcttgccattagccgccagacggtcgcggaacgcccgtccccactcagtcttactggtggctaccattgcgggcatatacaacgccctgcgaagcgacacatgtccggccttactcatccggctcgcccctctcacactgctacctgattcataacgccgtggtgtcagacccgcaaaagcggcgaactgtctggcatgggcgaagcggtccttcagaccgatataagccagcaataccgcagatgttttctctccgatacccgggatgctttccagcagtttcctgcggtgtttcatatccggatcatcgtctgtcaggtcttttatctgcttctcaagacgcttcagctctgcttcaagccacagaaggtgagcatcaatgctcggtctctggacttcccgcgccgtttcagtgcgattcagttcctgcgtgtgcatatctgtcagcgcctggtggcggactaccagggcacgcaacgcgcgttcaagcgggtgaggcgcttcccaggctgcagggcgcttctgacgacagaactctgccagcatgcgcgcatccacggtatcagtcttgttacgcagtccttcactctgagcgaaagctttacccagcgcaggattaatgactgacactatgtagccagcatcgtaaaggcactcagcgacaggttccatataggtgccggtcgcttcgatgcagatatgcgcatggtcaatcttgtgacctttcagccagctcaccagctcatcgtgccctttagtggtgttagcgaattttttggtgcgatgacgaccatcaggacgcaacacatcgacatccagtttctctttagcggtgtcgataccgatataatgaagttcatgttccatagtgaaaccaaccttgcaaatacggattaccgggaaaaccggtccatgatactgtccggtttatcactttgggagaaaggcagtccgctgcataaatctacgcaacaggttagaacccaaggcccgatacggcatgcggactgcaggcagagaaaactggccgattttctctgcactggagggataatacaaggcccgataagcgcagcgcatcgggcaatctggggtttggcatcagtcaaaatcaaagaaaccattccggcttaacgccaaatcgggctgaaagtgccttaatgtgggatattgtcagggatcgttgtccagacaaaatctgactgaccagggatttagagccgatttcgttcttcaaatccgcataggtcagattatgttgatcaatcaacgtgcgaagtaacgccacgccaaccggcattgccgcaacggctttgtcgaactctgcaaacttttcgttgttgttttcatactctgcaatgcggctcgccagaaagtcgataagtggattggtgtcatcttcttcaatcaaatattcgaccagttccagtgcttcacgataatcatcttctgagtcactgcctcccagaaaggggactgcattgaccagttctcttgttgctttaacagcgcgtgcagcattagcagtcattctttgttctctctgtagtaacgtgacgtctgtctgcacgtaatccccctcatagccactctgcaaaaagtcagttctggttcaccccataaagcacatccccctttatcaagcaacgctgcgtctgcgccagatcttccgtttgcgggtcgcgcccggcgatgggtttgaggacgagtttacggttgggggtataagtaaaacgcgtgagcgcgggatagcttaacttgccaaaccagccgtgaacacgctgccatttggcgtcttttacctgatacagactggttatccagtaaccggaatcaaactgcatatccagcaattgcgtgtggccattcctttgtaaatccagcaaatcatcaatgccagtttcacttgcggtataaaaaccatcggactgaaaaacacacgggcgaccttgctgattaaaggtcatcagaatcaaaaacgcgttaggtgccagaccatttcctgaaataccccgccagataaccagatcctgaatgccgttacgatcaagatcggcacggtaaagttgcgcattacccgccatattttgcagcacccccacaggcacagaccaggatttaccggcgcgatctttaccgttcaattgccattcactatcatcatttggcatcttttcaagcgtcacgccagcaacgccgacttttctaaaatgccagttttgctcggcatcataaggcatggtcaggagaggtttcagcgcccgcttttgcgcgtattcgctgtcactcatcggcagatattcggtaaagctggtggcctgtgcaggcagcactaagctcaataaaaaagcgcacatccctgttctgatgttcaattccctgaattccttaatgaaaaactactctacttccaccgctaactgcgcaaatccaccatttccttcccagccttccagtcgttgataaacggtttcaaccgcatctttaatcggctgggtcatcgggtagtaaaagccgacgatatccggctggatgccgaggaaaatcacttcgccaatatcttctttcaactggtcgataaggtagttcaacggcatgttatgggtagtcatcataaacatctcggcgatatcatccgggtcgatgatgcggatctcgccggggtttagccccatatcagtggcgtcgacaatcagcagtcgcgtagggcgcagttcacggatggcgacgatgtcgttttccggtgcactaccgccgtcaatcaccacccagttacctttcggcgcggcggcgcacttttccgccagcagcgggcctgcgccatcatcgcccatcatgctattgccaacacagagtaaaacgtcagtcacgcagtctcctcaccatcaaatagatggcgttttcctgatgaatatcatgcagcatacttagcagcattgtactccattcctgctgttgcgaagtttgcgctgcccgggctttatcgaatgcgttggccagcatcggcacatggttaatgtcgatgacgatctcaccatatttcggcacgccttccattttgcggcgggcttcgctgcccgcctccagagtggcaatccatgccagatattcatcccacgggcaggtgagcgccgcttccaggcaatcgataaccccaaggtggtgaccaatcgccaggctgtaatagaccacctgctgcgcctcggcgggcgtggcatcgttctcatcaataaatttacggctcagttgactgaacaccaccttttcactcatcggatacgcgcctcttctacaacatgattcagatggctgacaatctcgttcagacgcggatcgttttccgcttccagccagcgtgcaacctgttcttcgccctgccctaactgtgtcaggaagtcatcggcaatctgacgaccgtaacgataacctgccaggcggcgtgcttcgcgatccactttcacacgcagcggctgcaccatatcgccatgcaggatttccgccggttgttcatcctgctcacccgggccacgggcgtgaattttctgctccagcaggccgagcgccattgcaaagccgtacagcgtggcggcaggcgttggcgggcaaccagggatgtagacatctaccgggacgattttatccgtaccgccccacacgcagtagagatcgtggaagatcccgccactgttaccgcaggcaccgtaggagatacagattttcgggtccggcgcggactgccacgcacgcagcgcaggggatcgcattgcacgggtgaccgcgccggtaaacagtaaaatatccgcatgacgcggtgaaggaacgactttaatgccgaagcgttctgcatcaaacagcggcgaaagcgtggcgaaaatttcgatttcgcagccgttgcagccgccgcagtccacgcggtaaacgtaggcagaacgtttgatttttttcagtaacgacgccttcatgctggcgatggattcatccaccgtcatcgggaccggaatgccgttggcgtcacgggggcctaataaattgctcatcagatggcctctttcatatggcgagtcagttcaatacggtcggacggcaccaggcatttctggcgcttacattccgggcaagtctcaaagctttcgcggtggttttccgcgcggctgtcaccattgtgcttaagcagcgcaatggcgtagtcgatctctttctggacggcgaaaggacgattgcagacgcgacagctgcacagcacaaaacgggactgttgcaggaaatcttctttcttccacaccgccagttcgtactcttgcgacagtttgatcgctgccgtcgggcagacttcttcgcagcgtccacagaagatgcagcgcccgagattaaactcccacgcaagctctcctgtggcgaggtcagtttcaaccgttaaggcgtttgacgggcaggcattgacgcaggccgcgcagccgatgcactgctgcgggttctgctctggcttaccacggaagtttttatcaaccgcaatcggctccagcggataagacgaggtcgccgtgccggttttgatgacttttttgataaaggtaaacatggcgattccttatttcagcggcgagtttttacgctcaatgctgtaacgctcgagttctttgtacggcaccactttgctctttttcttacgcacatcgaccacggtcatgcggtcggtacaggagtagcaagggtccaggctaccgataatcagcggcgcatcggaaacggtgttaccgcgcagcatgtagcgcagggtcggccagttcgcgtaggtcgcggcacggcagcgccagcggtacagcttctggttgtcgccggtcatgctccagtggatatcgtcgccgcgcggcgcttcggcaaagcccagcgcgaaacggtgcggaatgtaggtaaagccttccaccatcagcggaccgcccggcaggttatccagaccgtagtcgatcatgttcagcgcggtataaacttcgttgatacgcactttcagacgggaaataacgtcgcagccctgctcgctgtggacttccattggcagcaggccataaccgacaaacgggtgatcggcgcgagtatcgcgggcgtgaccgctggcgcgaaccatcgggccaacgttactgaaatcgcgggcgatttccgggtcaagacgaccaatgccaacagtgcgctgttccatgttcggtgtgctcaacagcacatccaccagctcctgcacttcacgacgcatctgttgcgccagctggcgggtctggatcatgtcatctttcaacagatcgcgacgaatcccgccgatcaggttcaggccgtaggttttacgcgcaccggtgaggatctctgccattttcatggaggtttcacgcacgcggaagaactgcataaagccggagtcaaagccggtaaagtggcaggcgagaccgaggttgagcagatgcgagtgcaggcgttccacctccagcagaatggcgcggatcatctgcgcacgttctggcacctgaatacccatcgcgttttctaccgacgtggtgtaggcggtgctgtgggcaaagccgcagatcccgcacacacggtcagagaggaaggtcacttcgttgtaacccatacgggtttccgccagtttttccatgccgcgatgaacgtagaacagacggtagtcggcgtcgataatgttttcgccatcgacgaacagacggaagtggcccggttcgtcagaagtgacgtgcagcggaccaatcggcacgacgttgtttttcttgtcgcccagttcgttgatgaactcgtaggtttcagcatcggtagtcggtgccggacgctgacgataatccatgctgtctttacgcagcggataaagttcatccggccagtcatccggcagcaccagacgacgttcatccggcagaccaaccggaatcaaaccgtacatatcgcgcacttcgcgctcgccccacaccgccgccggaacgcgcggcgtcacggacggatactccggtttgttggcgtcaacttcgacgcgaaccgttacccaacacttggtgcccttctccatcgacagcacgtaataaacggcgtaatgaccattcagtttgcgttcgtcgttaccaaacagcaccgacagccagccaccctgcttgtagtagagaaactccaccacttccggcaggtagttcaccttcacggtcacggtcagctgatctttggtctgccaggcgtggtccagcacgacgcccggaaatgcctcattcagcgcggcgagataatgttgacctaatttttcttcagacatgctcaaactctctttaatcacgccgccagcaaggagacgaacgctaaaaatgcaaagccaaacccagcccaggtaatgcgcggagtaatatcaagacgcagacgggccatgctgttttcgaacagcgcgataaccaggacgccgaccaccagtttgacgatggcaatcaccagcgccagcagcagtccaccggcggtgaaggtttccatttgtccccacggaataaacaccccgacgaacatctgcaacaccaccagctgtttcaggctgataccccatttcatgacgccaaagccgctaccgctgtattcggagagcggaccttcctgcaactcctgctcggcttccgccaggtcgaacggcagtttgcccatttcgataaaagtggcgaacgcacaggcacaaagcgccagcaccagcgggatgctctggctcagcggccagtgataaacggtgtcggtgatgttgctgatgttggtggaaccggcaacctgtgcggcaacccacagaccaagcagcagcatcggttcgaccagcacgccaagcatcgcttcacggctcgcgccgatagcagtaaacgggctaccggtatccagaccggaaatagcaaagaagaaacgcgcgatggcaaagagatacagtaaggtgatcaaatcgcccagttgcggcagcggagaaccaacggtcaccaccggcagcgcagtagcgatagtcagcattacgcccaccatcacatacggcgtcaggcggaacacccagccggaggcatccgggccaacgctctggcggcccagcagttttataatgtcacgatactcctgcaacacacccggcccacgacggttatgtaagcgggctcgagccacgcgggtaataccggagagcagcggcgcaacggcaaatagcaccagcgcctgaattaacggatataaaacactcattctcaggctcctcgtgaaacaataatcaccaccagcaccgccagttcaaccagcgccatccggcggaacagcaacgcactcccctcgcactgccagcccggcaccagagacaccggattcagccatttgcgtagtttcagcaccggcgcaaacgcctgtttcaccggcatggcaaaaccgtgagcggtaatcaccattgatttttcgtggtcgtagccgcacacccaggccgcgccgcgggaacgcgatggcaaacgatcgcctttgcaaatcgccataatgatgaatggcagcagcgggcaggcaatcagcagcaatgtgatcattggttgagaaacggtggtgttagcaggctccagcggcagaggtacagcagcagagagcatcggcagcagccacggcgcagcaacaccgccaattacgcagcaaatcgccagtgccactacgcttacgctcatcaggagcggcgcacaggtggcgttttcggcttctttggtacgcggcgcgccgaggaacgtgacgccatagactttcgccatacacatcaccgccagcgcaccggtaattgccagacccacagcgagcagcggccccagcagacgggcaacaaacgcgccactattgctcagtttgaagaaggattgatagataacccattccccggcaaacccgttcagcggcggcagcgcagccattgccattaacccgactaacatggcgatggagataaccggcattttcttgccaataccaccgagtttctcgatatcgcgatgaccggtacggaaccagacgctccccgccccgaggaacagtacgcttttgaacaggctatggttaagcagatggtacagaccaccgaccaggccaagagcaatcagcgccggttgttcgagcgcgatacccgttacgccagcgcccagccccagcaggataatgccgatattttccagggtgtggtaagccagcaggcgctggatgttgtgttccatcaacgcatacagaccaccgacgaacgcggtgatcatgccgagcaccagcagcgcgatcccccaccacagcggcgcgttaccacccagcagcgacagggttaaaatgcccagcaggccaattttcatgactaccgtagaaaacaacgcggcagctggcgcagaggcgttagcatgtgcctgcggcacccagccgtgcagcggaataatcccggccagcaggccaaagccaatcacaccgagcagccagatatcggaaccgagcggcagctgttgcatacgcatatccagcaggcgcagatccagcgtgccataacgctgccacagcagccagcaagcaatcgccagcagcagagtgccaagacgccccagcgcaaaccacagtttgccctctttgctgttgctggtaaggaacaccgcacacaaggccatgacttcagccattaccacgaacatgccgaggttgctggcgatgacggcgcagacggcggcagccatcaacatattgatctgcaagccgttgcacttcacctgcgcgtggcgatgccagtcaatgttgtagaggctgacaaacagaccgcacagaccgagcgtaatcagccaaatcgcgttaagcggagagatttgcacatcgtagcttaccagcgacagcgcaccgctcacgccaaccgcgccagtcagtacagtgaagcccgcggctgccgtatacagactaccaaccgcgccgccaattccggctatccagccacttagcgtcttttgaaaagaaaagagaaatgccagaacagcggcggcgacaaaccatgccacgccgctattgatcagggaaattgcgctcatttagcctctccactttgagcctgctgaaacaaggtgagatcgccaaagtccgtgttaaaggtcagctcacgcttacgtttgctgacgcgggcgatatcggtgttatccaccagatgcagggctttagtcgggcacatccgcacgcaggccggaccttgttcatcaaaactgcaaaggtcacatttgacggcgatcgcgcgaatacccggcacccagtcaagcagcgtactgatacgcgccggagcaggcggtgccggtggcgctttcggggtattggcatttgcaggaatatccagcggacggctgccggaaaattcaattgcgccaaacgggcaggcgatgccgcacagcttgcagcttacgcacaggctttcattcaactgcacggccccatcaacgcgggtgatggcgttaaccgggcagaccaccgcgcagggtgcatcttcacagtggtgacagagctgcggcgcagattctttttcatttagcatcactctcaggcgcggcattgattgcaggccgtgctggcgatgcgtctctgaacaggcggcctcacaagtgtggcagccgatacagagcgtggagtcagcaattacaaaacgattcaccaggcattcctcaggtgattgtcatttttgacgaaaacatgccgatgaaatgtcattttcgacactcatcgacacgcccatccccaaacaggcgtaacgcctgcaaaacgggcaaagcctcagctcatgctgccgggctttgtccctttaccagttggcttaaattcaccggcacattgttttcaatggcggtgtataagctgtcgtaaacgccagcgattttttcgagatagtgttccagaacctgttcgcgatcgcggatgttgaccttgccatcaatcatgccgtcaatgctcagttgcgcctgcgcaatccgctgtttgtcttcgccatcttttgtttcgacgtaatactcgatggtgtggctgttaaagccatccgccagggtgacgtaaatacgaaaatgttcaaaaaggacgaaacagagttctttgtccggcgcgcagctcatggcgtgatgcaggcgcgctttcgataacgtgatcccctgaaccagcgaattgcagtagatgtgccactggtcctgtaggcgacgatgccgctgtgcgatgtaatcggctttctcgcttatttcccaaatagtcattgtcaggttacccgtttaacagagatgccagctttaagcattttttgtgccaacttttaatttattgttattaaagagattttaagctaaagatgaatttcgtcgccgtgtcgacgtgtcatttcgacatcatcgacattattcaccgcagggataatcaacactggcacaattattgcttgtagctggcaatagttaatgggaggcgatatgcacgaaataaccctctgccaacgggcactggaattgatcgaacagcaggccgcaaaacacggcgcaaaacgcgtaactggggtctggctcaaaattggcgcattttcttgtgtcgaaaccagctctcttgccttttgttttgatctggtttgccgcggcagcgtggcggaaggttgtaaactgcacctcgaagaacaagaggccgaatgctggtgtgaaacatgccaacagtatgtgacgctactgacccagcgcgtccgccgctgtccacagtgtcatggtgacatgctacagattgtggcagacgacggtttacagattcggcggatagaaatagaccaggagtgagcgatgtgtacaacatgcggttgcggtgaaggcaacctgtatatcgagggtgatgaacataaccctcattccgcgtttcgtagcgcgccatttgccccggcggcacgcccgaagatgaaaatcaccggcattaaagcgcctgaatttacccccagccagactgaagaaggcgacctgcattacggtcatggcgaagcgggcactcacgcaccgggcatgagccagcgtcggatgctggaagtcgaaattgacgtgctggacaaaaacaaccgtctggctgaacgcaaccgcgcgcgctttgctgcccgcaagcaactggtgctcaacctggtttccagccctggttccggtaaaaccaccctgctgacggaaaccttaatgcgcctgaaagacagcgttccgtgcgcggttattgaaggtgaccagcaaaccgtgaacgatgccgcacgcattcgcgctaccggcacaccagcgattcaggtgaacaccggtaaaggctgccatcttgacgcacagatgattgccgacgccgcaccgcgtctgccactggacgataacggtattctgtttatcgaaaacgttggcaacctcgtatgcccggccagcttcgatctcggtgaaaaacacaaagtggcggtgctttccgttaccgaaggtgaagacaaaccgctgaaatatccgcatatgtttgccgccgcctcgctgatgctgctcaacaaagttgacctgttgccgtatctcaactttgacgttgagaagtgcctcgcctgcgcccgcgaagtcaatccagaaattgaaatcatccttatttccgccaccagcggtgaagggatggaccagtggctgaactggctggagacacagcgatgtgcataggcgttcccggccagatccgcaccattgacggcaaccaggcaaaagtcgacgtctgcggcattcagcgcgatgtcgatttaacgttagtcggcagctgcgatgaaaacggtcagccgcgcgtgggccagtgggtactggtacacgttggctttgccatgagcgtaattaatgaagccgaagcacgcgacactctcgacgccttacaaaacatgtttgacgttgagccggatgtcggcgcgctgttgtatggcgaggaaaaataatgcgttttgttgatgaatatcgcgcgccggaacaggtgatgcagttaattgagcatctgcgcgaacgtgcttcacatctctcttacaccgccgaacgccctctgcggattatggaagtgtgcggtggtcatacccacgctatttttaaattcggcctcgaccagttactgcctgaaaacgttgagtttatccacggtccggggtgcccggtgtgcgtactgccgatgggtagaatcgacacctgcgtggagattgccagccatccggaagtcatcttctgtacctttggcgacgccatgcgcgtaccagggaaacagggttcgctgttgcaggcaaaagcacgcggtgccgatgtgcgcatcgtttactcgccgatggatgcgttgaaactggcgcaggagaatccaacccgtaaagtcgtattcttcggcttaggttttgaaaccaccatgccgaccaccgccatcaccctgcaacaggcgaaagcccgcgatgtgcagaatttttacttcttctgccagcatattacgcttatcccgacgctgcgcagtttgctggaacagccggataacggtatcgacgcgttcctcgcgccgggccacgttagtatggttatcggcactgatgcctataattttatcgccagcgattttcatcgtccgctggtggtcgctggtttcgaaccccttgatctactacaaggcgtggtcatgctggtggagcagaaaatagcggcccacagcaaggtagagaatcagtatcgtcgagtggtaccggatgccggtaacctgctggcgcaacaggcgattgccgatgtgttctgtgtcaacggcgacagcgaatggcgcggcttaggcgtgattgaatcttctggcgtacacctgacgccggattatcaacgattcgatgccgaagcacatttccgcccggcaccgcagcaggtctgcgatgacccgcgcgcacgttgtggtgaagtattaacgggcaaatgtaagccgcatcaatgcccgctgtttggtaacacctgtaatcctcaaaccgcatttggtgcactgatggtctcctccgaaggagcgtgcgccgcgtggtatcagtatcgtcagcaggagagtgaagcgtgaataatatccaactcgcccacggcagcggcggccaggcgatgcagcaattaatcaacagcctgtttatggaagcctttgccaacccgtggctggcagagcaggaagatcaggcacgtcttgatctggcgcagctggtagcggaaggcgaccgtctggcgttctccaccgacagttacgtcattgacccgctgttctttcctggcggtaatatcggcaagctggcgatttgcggcactgcgaatgacgttgcggtcagtggcgctattccgcgctatctctcctgtggctttatcctcgaagaaggattgccgatggagacactgaaagccgtagtgaccagcatggcagaaaccgcgcgcacggcaggcattgccatcgttactggcgatactaaagtggtgcagcgcggcgcggcagataaactgtttatcaacaccgctggcatgggcgcaattccggcgaatattcattggggcgcacagacgctaaccgcaggcgatgtgttgctggtgagcggcacgctcggcgaccacggggcgactatccttaacctgcgtgagcagctggggctggatggcgaactggtcagcgactgcgcggtgctgacgccgcttattcagacgctgcgtgacattcccggcgtgaaagcgctgcgtgatgccacccgtggtggtgtaaatgcggtggttcatgagttcgcggcagcctgcggttgcggtattgaaatttctgaatcagcgctgccggttaaacctgccgtgcgcggcgtttgcgaattgctgggactggacgccctgaactttgccaacgaaggcaaactggtgatcgccgttgaacgcaacgcggcagagcaagtgctggcagcgttacattcccatccactggggaaagacgcggcgctgattggtgaagtggtggaacgtaaaggtgttcgtcttgccggtctgtatggcgtgaaacgaaccctcgatttaccacacgccgaaccgcttccgcgtatatgctaataaaattctaaatctcctatagttagtcaatgaccttttgcaccgctttgcggtgctttcctggaagaacaaaatgtcatatacaccgatgagtgatctcggacagcaagggttgttcgacatcactcggacactattgcagcagcccgatctggcctcgctgtgtgaggctctttcgcaactggtaaagcgttctgcgctcgccgacaacgcggctattgtgttgtggcaagcgcagactcaacgtgcgtcttattacgcatcgcgtgaaaaagacacccccattaaatatgaagacgaaactgttctggcacacggtccggtacgcagcattttgtcgcgccctgatacgctgcattgcagttacgaagaattttgtgaaacctggccgcagctggccgcaggtgggctatacccaaaatttggtcactattgcctgatgccactggcggcagaagggcatatttttggtggctgtgaatttattcgttatgacgatcgcccctggagcgaaaaagagttcaatcgtctgcaaacatttacgcagatcgtttctgtcgtcaccgaacaaatccagagccgcgtcgtcaacaatgtcgactatgagttgttatgccgggagcgcgataacttccgcatcctggttgccattaccaacgcggtgctttcccgcctggatatggacgaactggtcagcgaagtcgccaaagaaatccattactatttcgacattgacgatatcagtatcgtcttacgcagccaccgtaaaaacaaactcaacatctactccactcactatcttgataaacaacatcccgcccacgaacagagcgaagtcgatgaagccggaaccctcaccgaacgcgtgttcaaaagtaaagagatgctgctgatcaatctccacgagcgggacgatttagccccctatgaacgcatgttgttcgacacctggggcaaccagattcaaaccttgtgcctgttaccgctgatgtctggcgacaccatgctgggcgtgctgaaactggcgcaatgcgaagagaaagtgtttaccactaccaatctgaatttactgcgccagattgccgaacgtgtggcaatcgctgtcgataacgccctcgcctatcaggaaatccatcgtctgaaagaacggctggttgatgaaaacctcgccctgaccgagcagctcaacaatgttgatagtgaatttggcgagattattggccgcagcgaagccatgtacagcgtgcttaaacaagttgaaatggtggcgcaaagtgacagtaccgtgctgatcctcggtgaaactggcacgggtaaagagctgattgcccgtgcgatccataatctcagtgggcgtaataatcgccgcatggtcaaaatgaactgcgcggcgatgcctgccggattgctggaaagcgatctgtttggtcatgagcgtggggcttttaccggtgccagcgcccagcgcattggtcgttttgaactggcggataaaagctccctgttcctcgacgaagtgggcgatatgccactggagttacagccgaagttgctgcgtgtattgcaggaacaggagtttgaacgtctcggcagcaacaaaatcattcagacggacgtgcgtctaatcgccgcgactaaccgcgatctgaaaaaaatggtcgccgaccgtgagttccgtagcgatctctattaccgcctgaacgtattcccgattcacctgccgccactacgcgagcgtccggaagatattccgctgctggcgaaagcctttaccttcaaaattgcccgtcgtctggggcgcaatatcgacagcattcctgccgagacgctgcgcaccttgagcaacatggagtggccgggtaacgtacgcgaactggaaaacgtcattgagcgcgcggtattgctaacacgcggtaacgtgctgcagctgtcattgccagatattgttttaccggaacctgaaacgccgcctgccgcaacggttgtcgcccaggagggcgaagatgaatatcagttgattgttcgcgtgctgaaagaaaccaacggcgtggttgccgggcctaaaggcgctgcgcaacgtctggggctgaaacgcacgaccctgctgtcacggatgaagcggctgggaattgataaatcggcattgatttaactgcaaattgccggacagatctgcctgtccggcatactattcacgaggttttttcggacgatatttttccggcagttctggcaccggacgcttgtcatcgatgagatgacgcacggttaagatcggatgacgccacagcattctcggcccggcccaacgcataatctgtttcatctcttcacgctttgcaggctggtaacagtgcaccggacactgcttacaggctggtttctcttcgccgaacacacatttatccagccgcttttgcgcgtaaacaaacaacgcctcgtaatgctccggctccgctgacgcctgcgggcatttcgcttgataaagatcgatcattttttaatcgtcagtttttcacgagagatacgcttgccggacatgctgcctccacctcattaagatgtatttatattacatcttaatcttaaagggcactatgactctaaagaagaaaggttcgccaaccgacgcaattttgcgtacttgcttcataagcatcacgcaaaagctgcaaaacagcatctttcccggaaccagcatcaagaactcaccgttcgcttcttcccctgaaatgattaactccggtatcatgtgcgccttatgtgattacaacgaaaataaaaaccatcacaccccatttaatatcagggaaccggacataaccccatgagtgcaatagaaaatttcgacgcccatacgcccatgatgcagcagtatctcaggctgaaagcccagcatcccgagatcctgctgttttaccggatgggtgatttttatgaactgttttatgacgacgcaaaacgcgcgtcgcaactgctggatatttcactgaccaaacgcggtgcttcggcgggagagccgatcccgatggcggggattccctaccatgcggtggaaaactatctcgccaaactggtgaatcagggagagtccgttgccatctgcgaacaaattggcgatccggcgaccagcaaaggtccggttgagcgcaaagttgtgcgtatcgttacgccaggcaccatcagcgatgaagccctgttacaggagcgtcaggacaacctgctggcggctatctggcaggacagcaaaggtttcggctacgcgacgctggatatcagctccgggcgttttcgcctgagcgaaccggccgaccgcgaaacgatggcggcagagctgcaacgcactaatccggcggaactgctgtatgcagaagatttcgccgagatgtcgctgattgaaggccgtcgcggcctgcgccgtcgcccgctgtgggagtttgaaatcgacaccgcgcgccagcagttgaatctgcaatttggcacccgcgatctggtcggttttggcgtcgagaacgcgccgcgcggactttgtgctgccggttgtctgttgcagtatgcgaaagatacccaacgcacgaccctgccgcatattcgttctatcaccatggaacgtgagcaggacagcatcattatggatgccgcgacacgtcgtaacctggaaattactcagaacctggcgggcggtgcggaaaatacgctggcttctgtgctcgactgcaccgtcacgccgatgggtagtcgtatgctgaaacgctggctgcatatgccagtgcgcgatacccgcgtgttgcttgagcgccagcaaactattggcgcattgcaggatttcaccgccgagttgcagccggtactgcgtcaggtcggcgacctggaacgtattctggcacgtctggctttacgaactgctcgcccacgcgatctggcccgtatgcgccacgctttccagcaactgccggagctgcgtgcgcagttagaaactgtcgatagtgcaccggtacaggcgctacgtgagaagatgggcgagtttgccgagctgcgcgatctgctggagcgagcaatcatcgacacaccgccggtgctggtacgcgacggtggtgttatcgcatcgggctataacgaagagctggatgagtggcgcgcgctggctgacggcgcgaccgattatctggagcgtctggaagtccgcgagcgtgaacgtaccggcctggacacgctgaaagttggctttaatgcggtgcacggctactacattcaaatcagccgtgggcaaagccatctggcacccatcaactacatgcgtcgccagacgctgaaaaacgccgagcgctacatcattccagagctaaaagagtacgaagataaagttctcacctcaaaaggcaaagcactggcactggaaaaacagctttatgaagagctgttcgacctgctgttgccgcatctggaagcgttgcaacagagcgcgagcgcgctggcggaactcgacgtgctggttaacctggcggaacgggcctataccctgaactacacctgcccgaccttcattgataaaccgggcattcgcattaccgaaggtcgccatccggtagttgaacaagtactgaatgagccatttatcgctaacccgctgaatctgtcgccgcagcgccgtatgttgattattaccggcccgaacatgggcggtaaaagtacctatatgcgccagaccgcactgattgcgctgatggcctacatcggcagctatgtaccggcacaaaaagtcgagattggacctatcgatcgcatctttacccgcgtaggcgcggcagatgacctggcttccgggcgctcaacctttatggtggagatgactgaaaccgccaatattttacataacgccaccgaatacagtctggtgttaatggatgagatcgggcgtggaacgtccacctacgatggtctgtcgctggcgtgggcgtgcgcagaaaatctggcgaataagattaaggcattgacgctgtttgccacccactatttcgagctgacccagctaccggagaaaatggaaggcgtcgccaacgtgcatctcgatgcgctggagcacggagacaccattgcctttatgcatagcgtgcaggatggcgcggcgagcaaaagctacggcctggcggttgcagctctggcaggcgtgccaaaagaggtgattaagcgcgcacggcaaaaactgcgtgagctggaaagcatttcgccgaacgccgccgctacgcaagtggatggtacgcaaatgtctttgctgtcagtaccggaagaaacctcgccagcggtcgaagctctggaaaacctggacccggattcactgactccgcgtcaggcgctggaatggatttatcgcttgaagagcctggtgtaataacaattcccgattgtcttttgctatcgggaatattaacgacaactgacgaataaaataaaaacaccctgtataataggaaagcttattttacagggtaaaaccatgccatctacacgctatcaaaaaattaatgcccatcactatcgccatatatgggtcgttggtgatattcatggtgaatatcaattattacaatcccgcttacatcaactctctttttgccctgaaaccgacttacttatttctgtcggcgataatattgatcgtgggccggagagtcttgacgtcctgcgcctgctaaaccagccctggtttatctccgttaaaggcaaccacgaagcaatggcgctggatgcgttcgcgaccggcgatggcaatgtgtggcttgccagcggtggtgactggtttttcgatttaaatgattcagagcaacaagaggcaatagatctgttgctgaaattccatcaccttccacatattattgaaatcactaacgacaacataaaatatgtcatcgcacatgcagattatccgggtgatgaatatctctttggcaaagaaatagcggagagcgaattactctggcctgtttatcgtgtgcagaaatcgcttaatggcgagttacaacaaataaacggcgctgattattttatatttggacatatgatgtttgataacattcagacgttcgctaaccagatttatattgataccggatcgccgaaaagtgggcggctgtcattttataaaataaggtagtctcatgcttcttctgtgaagcatgagtaaccagatgttattgcaggccattattcatttttcgctaccagcaaagagagatcctgcttcgccagcgcgcgactggcactctccggcaaaccgtcgtctgtaataatctgatcaaactcgcttaatggtaacgccagccatgtcgccacctgaccatatttcgtcgcatcacagaccaaaactcgctggcggctggcactggcaatcgcccgtttcaccgtgactttatcttccgctggcgtagaaatcccccgcacactccatgacgatgcagaaataaaagcctgatcaatcatcaggctgcgcagcatggtcgcagcggcttccccgacacaggaacggttttcccgacacactgcaccgccagtgtgaataattgtgcaattactgttgtcgagcaagtagttcgcaataacgaaatcgtttgtgaccacagtcagtgactccatgtgaatcagatgctgtgctatcgctaacgtggtcgttcccgcatccagatagatacaacttcccggctgaacaagacttgccgccagcttgccaatagccgctttttgcgtcattgccagcgcagtttttacctgatgagaaggttcatgcgccacgcgtcccggagactggacgcctccggacaccagcacaacggctccctgctgctccagtttttgtaaatcccgacgaatggtcatatgtgacacattcattctgtccgttagttcagcaatactgacaatgcctttttcagctaccatctcaaggatgatttggcgacgctctacgggtatcaacttttgctccttcctttgtcctgctgacattctacgctatttgcctgcgaaacgtgcgcggcgcaactaacgcttagttcacataaaataacacacaatgttaatttatgtggatcagctcaccatatcgttatcttccagcgcttatattcacaatataaaacaaaatatcacttaaattaacaaggagagcagatgaaaacgggatctgagtttcatgtcggtatcgttggcttagggtcaatgggaatgggagcagcactgtcatgtgtccgcgcaggtctttctacctggggcgcagacctgaacagcaatgcctgcgctacgttgaaagaggcaggtgcttgcggggtttctgataacgccgcgacgtttgccgaaaaactggacgctctgctggtgctggtggtcaatgcggcccaggttaaacaggtgctgtttggtgaaacaggcgttgcacaacatctgaaacccggtacggcagtaatggtttcttccactatcgctagtgctgatgcgcaagaaattgctaccgctctggctggattcgatctggaaatgctggatgcgccagtttctggtggtgcagtaaaagccgctaacggtgaaatgactgtcatggcctccggtagcgatattgcctttgaacgactggcacccgtgctggaagccgttgccggaaaagtttatcgcataggtgcagaaccgggactaggttcgaccgtaaaaattattcaccagttgttagcgggcgtacatattgctgccggagccgaagcgatggcacttgcagcccgtgcggggatcccgctggatgtgatgtatgacgtcgtgaccaatgccgccggaaattcctggatgttcgaaaaccggatgcgtcatgtggtggatggcgattacaccccgcattcagccgtcgatatttttgttaaggatcttggtctggttgccgatacagccaaagccctgcacttcccgctgccattggcctcaacagcattgaatatgttcaccagcgccagtaacgcaggttacgggaaagaagacgatagcgcagttatcaagattttctctggcatcactctaccgggagcgaaatcatgatcaagattggcgttatcgccgatgattttaccggcgcgacggatatcgccagttttctggtggaaaacggtctaccaacggtacaaattaacggtgttccaacaggtaaaatgccggaagcaatcgacgcactggtgatcagcctgaaaacgcgctcctgtccggtggttgaagccacacagcaatcgctggcggctctgagctggttgcaacagcaaggttgcaaacagatctatttcaaatactgctctactttcgacagtacggcgaaaggtaatatcggcccggttaccgatgcattaatggatgctctcgacacgccgtttacggtcttctctccggccctgccggtcaacggacgtacggtttatcaggggtatttgttcgtaatgaatcaactgctggccgaatccgggatgcgccatcacccggtaaatcccatgaccgacagctatcttccccgtctggttgaagcgcaatccacagggcgctgcggcgtcgtttcggcacatgttttcgaacaaggtgtggatgccgttcgtcaagagctggctcgcttacagcaagagggctaccgctacgcggtgcttgatgcgctgaccgaacaccatctggaaattcagggagaagccttgcgcgatgccccactggtaacgggcggttctggtctggcgattggcctggcccggcagtgggcgcaagaaaacggtaaccaggctcgcgaagcagggcatccgctcgctgggcgcggcgtagtgctctccggttcatgctctcaaatgaccaaccgccaggtggcacattaccgtcaaattgcaccagcccgtgaagttgatgtggcacgctgcctctcaaccgaaactctggccgcttatgcacacgaactggcagagtgggttctgggccaggaaagtgtacttgctccactggtttttgccaccgccagcactgacgcattggcagcaattcaacagcaatacggtgcacaaaaagccagtcaggcagtagaaactctattttctcaactagcggcgcggttagcagcggaaggcgtgacacgctttattgtcgcaggcggtgagacctccggcgtagtcacacagagcctgggcataaaagggtttcatattggcccaaccatttcccccggcgtgccgtgggtaaacgcactggataagcctgtctcactcgcccttaaatctggcaacttcggtgatgaagccttttttcacgagcccaaagagagtttttatcatgagcgatttcgcaaaagtagagcagtctttgcgagaggagatgacgcggattgccagttcattctttcagcgcggctatgcaaccggttcggctggcaatctgtcgctgcttttacctgacgggaatttactggcgacaccgacaggttcatgcctgggcaatctcgatccgcagcggctttccaaagtcgccgcggatggcgaatggttaagtggtgacaaaccctcgaaagaggtgctctttcatctggcgctgtatcgcaacaatccgcgctgtaaagcggtggtgcatttgcacagcacatggtcgacggcgctttcctgcctgcaagggctggacagcagcaacgttattcgtccgttcacaccatacgtggtgatgcggatgggaaatgtcccgctggtgccttattaccgaccgggcgataaacgcatcgcacaggatctggcggaactggcagcagacaatcaggcttttttactggcaaatcatggcccagtggtttgcggtgaaagcctgcaagaagccgccaacaatatggaagagctggaggaaacggcaaagctgatttttattctcggtgaccgcccgatccgttatctgaccgcaggtgaaattgcggaattaaggagttaatgcaatgcctcgttttgcagctaatttatccatgatgttcaccgaagtgccttttattgaacgcttcgccgcagcgcgaaaagccgggttcgatgctgtggaatttctgtttccctatgactactccaccctgcaaatccaaaagcaactggagcaaaaccatctgacactggcgctgttcaataccgctcccggagatattaatgcgggggaatggggattatccgcccttcccggacgtgagcacgaagcacacgcagacatcgacctggcactggaatatgcattggcgctcaattgtgaacaagtccatgtgatggcaggcgtcgtgcccgctggcgaagacgctgaacggtaccgggcagtatttatcgataatctccgctacgctgccgaccgctttgcgctacacggcaagcgaatattagttgaagcactcagccccgacgttaagcctcattatctcttctccagccagtatcaggcactggctattgttgaagaggttgcgcgagataacgtgtttattcaactagatacttttcatgcgcaaaaagtagatggcaacctgacgcatttaatccgcgactacgctgggaaatatgcgcacgtacaaattgccggactacctgatcgacatgaaccggacgatggagaaatcaactatccgtggctgttccgcctgttcgatgaggtgggatatcagggctggatcggttgtgaatataaacctcgtggcctcaccgaagaagggcttggctggtttgacgcctggcgctaattcgttaaatccctaattacaacgtacccatacatccccccatctacggatggggtaggttaactataactttcagacagggtttcccatgtccacaattacattgttatgcattgcgttagctggcgtaatcatgctgttgctgctggtcatcaaggcaaaggtacaaccattcgttgctctgctcctcgtcagcctgttagtcgcacttgcggcgggtataccggcgggcgaagtgggtaaagtgatgatcgccgggatgggcggtgtgcttggttccgtcactattattattggtctgggcgctatgctggggcgtatgatcgaacactctggtggtgcagagtcactggctaattatttcagtcgcaagttaggtgacaaacgaactatcgctgcgctgactctggcagcgttcttcctcggtattcccgtcttctttgatgtcggctttattattcttgcgccaatcatttacggttttgccaaggttgccaaaatatcgccactcaaatttggcctgcctgtcgctgggatcatgctaactgtacatgtggcggtaccgccgcatccaggccctgtcgccgcagcggggttactccacgcagacatcggctggctaaccatcatcggtattgcgatttctattcccgtagggattgttggctactttgcagcgaaaataatcaataagcaccaatatgcgatgtcggtggaagtactggaacagatgcaactggctccggccagtgaggaaggcgcgacaaaattaagcgataaaataaatccaccgggcgtcgcgctggtcacctcgctaattgttattcctatcgcgattatcatggcgggtacggtttccgcaacactgatgccgccttcgcatcccctgcttggtacgctacagctgatcggctcaccaatggtagctctaatgattgcgctggtgctggcattctggttattggctttacgtcgcggctggaacttacaacacaccagcgacattatgggctcagcccttcccactgcggcggtagtgattttggttactggtgctggaggggtatttggcaaagtgctggtggaatcgggcgtcggcaaagcccttgccaacatgctacaaatgattgacctgcctctgttaccagccgcatttattatttcactggcgctgcgtgcatcgcaggggtcagcaaccgtagcaatcctgacaaccggcgggttactctcagaagcggtgatgggattgaatccgattcagtgcgtattggtgacgctggcagcctgctttggtgggcttggcgcgtcacatattaatgactcagggttctggattgtgaccaaatatctggggttgtcggtagcagacggtctgaaaacctggacagtgttaacgaccattctcggttttaccggattcttaattacctggtgcgtatgggcggtaatttgaccttaataaaaaggtccgatgggcatcggacctttttatttagcgcttaccttccgccagcagcggcgggatgctcggcaccattggcgcatcatcaatatctttctgcgtcatgcggaacgcttccgggtaatgttcgtgactggtgcggcgtagcggttcggtatcgcgccaggtataaaggcaatgctggcactgatataccgtccagacatctttcaccggcgatttcaccatcacttcaatctgttcatcggcacaacgtggacaaatcatcttcttctccttatttacgtgcagccagcatagcggtcagtttttcagcccaggctttggtttccggtaaatccaccaccggttggctgtagtgaccacggttgtccggggcgacaggcgtagtggcgtcgataatcagcttgtcggtgatccccgcagggcttgagcctggatcgagttccagcacggacatattcggcaactgcaccaaatcccctgccgggttcactttcgaggagagcgcccacatcacctgcggcaggttgaacgggtcaacgtcttcatcgaccataatcaccatcttcacgtagcccagaccatgcggcgtggtcattgcgcgcaggcccaccgcgcgggcaaagccgccgtagcgttttttggtggagataatcgccagcaggccatgggtgtacatggcgtttaccgcctgcacttcagggaactcggctttcagctgctgatacagcggcacgcaggtggctggccccatcaggtagtcgatttcggtccacggcataccgaggtacagcgattcgaaaatcggcctggtgcggtaagagactttatcgatgcgcaccacggtcatgttacgcccgccggagtagtgcccggtaaactcaccgaacggcccttcgatttcgcgtttacggctttcgatgaccccttcgaggatcacttctgaaccccacggcacatcaaaaccggtcaacggggcggtggcgatcgggtacgggctttcacgcagcgcgcctgccatttcgtactcggactgatcatatttcagcggcgtggcccccatcagcgtgatgatcggatcgttaccgagcgtgatcgcaatcggcagatcttcaccgcgctcttctgctttatgcagatgcagggcgatatcgtgcatcggcaccggttgcaggccgagcttacgcttgcccttcacttccatgcggtagatgccgacgttctgcttgccgaagttatccgggtcgagcggatcgcgggaaaccacgcacgctttgtcgagatagaaaccgccatcgccatcgtttaaacgaaacagcggcaggatatcgaacaggttgatctcgtcgccatcaacggtgttctgcgcccaggctggattggcgcggcgctccggggcaatcgggaagttatcccagcggcggataaactcatcaatctgctttttaaccggggcatttggcggcaggccgagggaaatcgcgtggttctgccaggaaccgatggtgttcatcgccacgcgggcatcggtaaagccgcgaatattatcaaaccacagcgcgggcgcgccgtcgccgatacgcccggtggcgttagctgctgctgccagatccggctcggcgttcacttcttcgctgattttcagtaactggccgtggtcatcaagcgcctgtaaaaagctgcgtaaatcatcaaatgccattattcattctcctgagaaaaattccgggcctgcggcaatccttgccagcgcctggcgtggggatgttcgaggccaaattgatccagcacgcgggctaccacatggtggacaatgtcatctaccgtttcgggatggttataaaaggcaggcatcggcggcaccatcgccacgcccatgcgtgaaagtgcgagcatattttcgagatggatggtgctaagcggcatttcacgcggcaccagcaccagtttgcggccttctttgagcacgacgtccgccgcgcgccctaccaggccatcggcgtaaccagcgcggataccggcgagcgttttcatactgcacggaataacgatcatgccgtcggtacgaaaagaaccggatgagatgatcgccgcctgatccgccgggttatggctgaagtctgcgagggcagcaacatcgcgagcgctgtaaggcgtttccagttcaatggtggttttcgcccacttcgacatcaccagatgagtctcgacattcggcatctcccgcagcgcttgcagtaatgccacaccaaaaggcgcaccggtagcccctgtcatcccgacgatcagtttcattgcttatcctcttaattgttcgtatacgaacgttattattaacatactccttcatttccacagcggcaaggattgaaaagtaacaacatcttcttcgtcactaaaaaaccgctatgatagcgacagagaattagcccggagtttacatggcgttacgaaataaagcgttccatcagttacgacagctttttcagcagcacacggctcgctggcagcacgagttacctgacctgaccaaaccacagtacgcggtgatgcgcgccattgctgataaacctggtatcgaacaggtggcactgatagaagcagctgtcagcaccaaagcaacgttagcagaaatgttggcaagaatggaaaatcgtggcttagtcagacgtgaacatgaccccgctgataagcggcgacgctttgtctggttgactgccgaaggcgaaaagatacttgctgcagcgatacccattggtgacagcgtggatgaggaatttttggggcgtttgagtggagaagagcaggagctgtttatgcagctggtgcgcaagatgatgaacgcatagggggcaaatttccggatgcgacgctatcgcgtcttatccagactacaaatacaccgactcaccaaccgaaagaaaaaaggccagcctcgcttgagactggcctttctgacagatgcttacttactcgcggaacagcgcttcgatattcagcccctgcgtttgcaggatttcgcgcaaacggcgcaggccttcaacctgaatctggcgaacacgttcacgggtgaggccaatttcacgacctacatcttccagtgttgccgcttcgtaccccagcaaaccgaatcgacgtgccagcacttcacgctgtttggcgttcagctcgaacagccatttgacgatgctctgcttcatatcgtcatcttgcgtggtatcttccggaccgttctctttttcatcggccaggatgtccagcaacgctttttcggaatcaccacccagcggggtgtctaccgaggtaatgcgctcgttaagacgaagcatacggctgacgtcatcaactggcttatccagttgctctgcgatctcttccgcacttggttcatggtccagcttatgggacaactcacgtgcggttcgcaggtaaacgttcagctcctttacgatgtgaatcggcaaacgaatagtacgggtttggttcataatcgcccgttcaatcgtctggcgaatccaccaggttgcgtatgttgagaagcggaaaccacgttccgggtcaaacttctctaccgcgcggatcagccccaggttgccctcttcgataaggtccagcaacgccagaccacgattgccataacggcgggcaatttttaccaccagacgcaagttactctcgatcatccggcggcgagaggcgacatctccacgcagtgcgcgacgcgcaaaataaacttcttcttcggccgttaacagtggtgaataaccaatctcaccaaggtaaagctgagtcgcgtccaacacacgctgtgtggctccctgcgataacagttcctcttcggccaaatcgttatcactgggttcctcttctactaaggccttttcgtcaaaaacctcaactccgttctcatcaaattccgcatcttcatttaaatcatgaactttcagcgtattctgactcataaggtggctcctacccgtgatcccttgacggaacattcaagcaaaagcctggttccgccgatttatcgctgcggcaaataacgcagcgggtttacggatttccccttgtaacgaatttcaaaatgcaagcgtgttgaactggttccggtgctacccatggttgctattttttgccctgccttcacttcttgttgttcccggaccagcattgtgtcgttatgggcgtaggcactcaggtaatcatcattatgtttgatgataatcagattaccgtagccgcgcagcgcgttaccggcataaacaacgcggccatctgcggtcgcgataattgcctgtcctttgctgcctgcgatatcaatccccttgttgcccccctcagaagcgccaaaggtttcgatcactttgccctcagtcggccagcgccaggtggagataggcgtactggttgatgtactgctgacagttggctcggttgtgcttgctgttggtaccgttacaggcgctgtgaccgtggtcgcagctggcttattgttcggcaacattttgttagcactctgttcacccgaagattcagaatacgtaattgtcggttgcgacgcaacagcaacggtggaattttgtgcaggcttgatcacaactccttgctctgctgcgtcggcctgggtaatggcatttccgccagtgattggcgtaccggaagcattacccacctgcaaggtctgaccaacgttcagcgcgtatggtgcctgaatattgttgcgctgagcaaggtcacggaaatcgttgccagtaatccaggcgatatagaaaagtgtgtcgccttttttcacggtataggtactgccgctataactgcctttcggaatgttcccatactgacggttatagacgatgcgtccgttttccatctgtaccggctgctgagctactggctgcactggctggatttgcggttgttgagtagcctgaatttgtggctgctgtaccggctgaatttgcggttgctgggctgtagacgtcgtccccattttcggcggcggcgtaatcaacataccagaattggtatttgcaggcgcattgccattaacggagctgaccggtgccggtggatttgaagtgtcagaacagcctgccagccatagcgaaaccagtgacaaagccgcaatgcggcgaacggtgaattttgggcttcccgcgctcatttatcccccaggaaaaattggttaataaccagtgacataattaccgtgcaaggcaccctactgaacactggaaaagatgttcacgatacgctgacctgcggcaaaataaccaggaataatccaggtatttcctcacgttttaagccagctcacccttcactaaagggacaaagcgcacggcctccacggtatcgataataaattcgcctccccgacgacgcacccgtttcaaatactggtgctcctcccctacgggtaagacgagaatcccgccttcgtccagctgcgtcattagcgcagttggaatttccggcggtgccgccgtaacaatgatagcgtcaaacggcgcgcgtgcctgccaaccttgccatccatcgccatgacgggttgaaacattatgtaaatcaagatttttcaggcggcgacgcgcctgccactgcaaacctttaatccgttcgaccgagcaaacatgctggacaagatgcgccaggattgccgtttgatatcccgaaccagtgccaatttccagcacccgcgactgcggcgtcagctcgagtaattcggtcattcgcgccaccatatacggctgcgaaattgtctgcccctgacctatcggcaaggcgatattgtcccaggctttttgttcaaacgcttcatcaacgaatttttcacgcggcacggcggcaagtgcattcagcacctgctcatcctgaataccttgcgcacgtaattgatccagaagtgcttgtacgcgtctgcttaccattgcgtgccaactcccacgctgtttaaccagtctgaaaccacatcttgcgcgctatgcgcagttaaatccacatgcagcggcgtgatggagacatagccctcatctaccgcagcaaaatcggtccccggaccggcatcacatttaccgcccggcgggccaatccagtacagcgtattgccgcgcggatcttgctgcgggatcacctgatctgccggatgtcgtgtaccgcagcgcgtcacgcgaatacctttgatttgatccaagggtaaatccggaacgttaatattaagaatacgcccggtgcgcagcggctctttacacagtgcgcgcaaaattgaacaggttaccgccgcggcagtgtcgtaatgtttatgcccgtcaagcgagacggcaagcgccggaaaacctaaatgacggccttccatcgcggcggctaccgtaccggaataaataacatcatcccccagattcggcccggcgttaattccggacacaacaatgtccgggcgcggacgcatcagagcattcacgccaagatagacgcaatcggtcggggttcccatttgcacagcaatatcaccattttcaaaggtaaacgtgcgcagggaggattccagtgtcagagaatttgaagcgccgctgcggttacgatcgggggcgaccacctgaacgtcagcaaactcacgcaaggctttcgccagcgtttgtataccgggtgcatgtaccccgtcatcattactcagcaatatgcgcataatcacctgttgtgttgataagttccctgacaacgctggttgcaaaactacccgccggaagccagaaacggatctctacggtgacgtcatcccaccaattccagcttaattgttgcggatacagcagcatcgctctgcgcgcggcttcaactttttcgcgcaccagtaaagcttgtaattcagtttctgcggcgacagctgcttgttcgaatgccagcgcttcacgctgagttccccattcgccactgcccggcaatgcggcggttatcatcagctctttatcgttgacgcgacgctgtaattccgccagttcttcggtggttgcgacaaaccagctaccacgtccggctaattgtagcgcatcgccgtcaacaacttgattaacgtctgcttttttgaggcgctcagcaacaatctgattaaacaacgcactgcgggctgccgacaaccaaaaactccgtttattgcgatcgcgcaccggagtattggtttgcgcccagcgcagcgcgccctgcaagttgctaccgccaatcccaaaacgttgggcaccgaagtagttcggtacaccttttacgcaaatatcgatcagacgttgttcaacgtcatcgcgattgctcacttcgcgcagaaccagggtaaaggcgttacctttcagcgcccctaaacgcagcttgcgcttgtgccgcgcatactccagcacctggcagccttccaattgaaaggcgctcagttcgggcatttccttgcccggcacgcgagcacataaccactgttccgtaacagcatgtttgtctttttgcccagcgaagctgacttcacgggcatgaattttcaggaatttcgccagtgcatccgccacaaaacgggtattgcagccgtttttgaggattctaaccagaatatgctcaccttcaccatcaggctcaaagcccaaatcttccaccaccacaaagtcttccggattggctttcagcagcccggtgccttgcggtttaccgtggaggtaagtgagattatcaaactcaatcattttgttgccttaatgagtagcgccaccgcttcacaggcaatcccttccccacgtccggtaaatccaagtttttccgtagtagtggctttcacgttaacatcatccatatggcagccgagatcttcggcaataaacacgcgcatttgtggaatgtgcggcaacatcttcggtgcctgagcgatgatagtgacatcgacgttgcccagggtataacccttcgcctgaatacgacgccaggcttcgcgtagcagctcgcggctgtcggcacctttaaatgccggatcggtatccgggaacagcttgccgatatcccccagcgccgccgcgccaagcaatgcatcggtcaacgcatggagcgccacgtcgccatcagaatgcgccagcaatcctttttcgtaaggaatgcgtacgccaccaatgataattgggccttcaccgccaaaggcgtgtacgtcaaaaccgtgtccaattcgcattatgtattctcctgatggatggttcgggtgaggtaaaactcggccagtgccaaatcttccgggcgcgtgactttaatgttatccgcacggccttcgaccaactgaggatggaatccgcaatattccagcgccgaggcttcgtcggtaatagtcgcgccttcatttagagcgcgcgtcagacagtcatgtaacagctcacgagggaaaaattgcggcgtcagcgcgtgccataagccgttgcgatcaacggtatgagcaatggcatttttgcccggttcggcacgtttcatcgtatcgcgcactggtgcggctaggatccctcccgtgcggctggtttcgctcaacgccaacaatcgcgcgaggtcatcctgatgcagacaaggacgagcggcgtcatgcaccaatacccactgcgcgtcgccagcggctttcaaacctgccagcacggaatcggcacgctcatcaccgccatctacaacggtgatttgcggatgattcgccagaggaagttgtgcaaaacggctatcgccaggacttatggcaatgacgacacgtttcacccggggatgcgccagcagcgcatgcaccgagtgttcaagaatggtttgattaccgattgagagatattgcttaggacattccgtttgcattcgacggccaaatccggccgccggaaccacggcgcaaacatccaaatgagtggttgccatgttaattcccgggctgatttatcgattgttttgccccgcagactgtgcgcgcttcgacgcgtcaggcaccagacgataaaaagtttcgcccggcctggtcatgctgagttcattacgcgcacgctcttcgagcgcctcctggccgccattgagatcgtcaatttcggcaaaaagttgatcgtttcgcgctttaagtttcgcgtttgtagcttgctgtgccgccacatcatcattgacgcgggtatagtcatgtataccgttcttaccgaaccacagcgaatactgtagccagaccagaatagccagcaacagcagcgttagtttacccatcctgccccctgaaaacggcatcatcatcccatgcatccgaagacgactctacatcctctgttggggataccgcgacaacgcgggcaaatgtaccacatttgtccattgttacgtatacccagggcgtgcagaacataatctcattattagttacggtttgaattatgaacagaggagacgggaaagtacaaattagcccagtagccacataaacagtgcgccaaacataatgcctactgtcaccagggtgaaaacaatactgtagcgtagctttccgtccatcaatgaatgcagcgcaatccccaccactaccgcgacgggcatcagcgccagaaagaaaggccaggtgtagataaagaagaacagcgtgttagagccataaatcaacatcggcatcgccagcgcaaataaccaggagataaaaccgaccacggcaccaggcagtgaccatgtggtttcttcatcctcagtaaggctgtcgttatttgttagtgtaatgttatggctattacgcatatttgatcctgttactttgacgaaccgggcatggaaacccggtggtgtctcaggatctgataatatcgttctgtctcaacagatctaataattgctgtaccaaatttgttactaattgttcaccattgagatgaatttctgccgattcaggcgcttcgtaaacggaatctattcccgtaaagttgcgcagttcaccggcacgcgctttcttatataagccttttggatcgcgggcttcgcaaatcgccagcggcgtatcgacaaacacttcgataaagcgcccttctcctacgcgttcgcgaaccatctggcgttcggcgcggtgtggcgagataaatgcggtcagcactaccagtccggcttcaaccatcaaattcgccacttcaccgacgcgacggatattctctttacgatcggcatcgctaaaaccgagatcgctgcataatccgtggcgaacattatcgccatccagcagatacgtactgacgccgagtttatgtaacgcctcctccagcgccccggcgaccgttgatttaccggacccggagaggccggtaaaccacagcactacaccacgatgaccgtggtgtagctcgcgttgttgcacagtgaccggatggctatgccagacgacgttttcgtcatgcagcgccattatttatcccccagcaaatcgcgcgcgccccagtgcggaaagtggcgacgaaccagagcattcaattccagttcgaatgcactgaattcagatggcgcagcagttgcctggctaactggctcgtgcaccataccggcacccacggtcacattgctcaggcgatcgataaaaatcagcccacccgtcaccggattttgttgataacgatctaacaccagcggctcgtcaaaagtgagatccacgaggccgatcccattcagtggcaggttttcaacttcacgctgggtaaggttattaatatcaacctgatagcgaatgccatcaacacgcgcgcgcgtcttcttaccggcaattttgatgtcgtaactctgccctggagaaagcggctgttccgccatccataccacatccaccgacgcgctctgcaccgccggtaacgcttcgtctgccgccagcagcagatcgccacggctgatgtcgatctcatccgtcagcaccagggtgatcgcttctccggcaaaggcttcttcgcgatcaccatcaaaagtcacgatccgcgcgacgtttgattccacaccagagggcagcacttttacacgttgcccgacttccacgcgaccggatgccagcgttccggcgtaaccacgaaaatcgagattcgggcggttaacatactgcaccgggaagcgcattggctgggcatccaccactcgctggatctccacggtttccagcacttcgagtagtgttggaccgctgtaccacggcatactttcactttgcgaagccacgttgtcgccttccagtgcagagagcggcacaaagcggatatccagattaccaggtaactgttcggcgaaagtcaggtagtcttcacgaatgcgggtgaatgtctcttcactgtaatccaccagatccattttgttgatcgctacgaccagatgtttgatccccagcagcgtggagataaaactgtgacgacgggtttgatcgagcacgcctttacgggcatcgatcagtaagatcgccagctcacacgttgaggcgccggtcgccatattgcgggtatactgctcgtgcccgggggtgtcggcgataataaatttacgcttctcggtagagaaatagcggtaggccacatcaatagtgatgccctgttcgcgctcagcttgcaggccgtccaccagcagagccagatccagtttttcgccctgggtgccgtgacgcttactgtcgttatgcagcgatgagagctgatcttcgtagatttggcgggtatcgtgcagcaggcgaccaatcagggtacttttgccgtcatcgacgctaccacaggtcagaaaacgcagcaggcttttatgttgttgcgcaatcatccagcttcgacgccgccttcattggcgatttgttgtgcaagtgcggtgttcatcttaaaaatacccctgacgttttttcagctccatagaccccgcctggtcgcggtcaatcacgcggccctgacgttcactggtggtggaaaccagcatctcttcgatgatttccggcagtgtttgtgcatttgactccaccgcaccggtcagcggccagcagcccagcgtacggaaacgcaccatccgttttttaatcacttcgcccggttgcaggtcgatacggttgtcatcaatcatcatcaacataccgtcgcgttccagaaccggacgttccgcagcgagatatagcggaacaatgtcgatattttccagccagatgtattgccagatatcctgctcggtccagttagagagcgggaagacgcggatgctttcgcctttgttaatttgcccgttgtagttgtgccacagctccgggcgctgatttttcggatcccagcgatggaagcggtcacggaaagagtaaattcgctctttagcgcgggatttctcttcgtcacggcgcgcaccaccgaaggcggcatcaaaaccgtatttgttcagcgcctgtttcaggccttcagttttcataatatcggtatgtttcgcgctgccgtgcacgaatggattaatccccatcgccacgccttccgggtttttatgcaccagcagttcgcagccgtaggctttagcagtacgatcgcggaactcatacatctcgcggaatttccagccggtatcgacatgcagcaacgggaaaggcagcgtacctggataaaacgccttgcgcgccagatgcagcatgacgctggaatctttaccgatagagtagagcatcaccggatttgagaattctgccgccacctcgcgaataatgtggatgctttccgcctccagttgccgcaggtgagtaagtcgtatttgatccataaccgttcctttgcaataccgctattttcttgccatcagatgtttcgactatagggagcgtaagagaacgaatgaaattaccaattagaatgagtagttccttaacggaataacgatttggcaaagctaatatcaaaaagtgcttaaggcaccggatttcgggcgtttaggaagatttgaaattgttttagcgcagcggcagtttcatactatggcggtaaaaaaatttgcatggtatttaaggactcactatgttttccgcattgcgccaccgtaccgctgccctggcgctcggcgtatgctttattctccccgtacacgcctcgtcacctaaacctggcgattttgctaatactcaggcacgacatattgctactttctttccgggacgcatgaccggaactcctgcagaaatgttatctgccgattatattcgccaacagtttcagcaaatgggttatcgcagtgatattcggacatttaatagtcggtatatttataccgcccgcgataatcgcaagagctggcataacgtgacgggaagtacggtgattgccgctcatgaaggcaaagcgccgcagcagatcatcattatggcgcatctggatacttacgccccgctgagcgatgctgacgccgatgccaatctcggcgggctgacgttacaaggaatggatgataacgccgcaggtttaggtgtcatgctggaattggcagaacgcctgaaaaatacgcctaccgagtatggtattcgatttgtggcgaccagcggcgaagaggaagggaaattaggcgctgagaatttactcaagcggatgagtgacaccgaaaagaaaaatacgctgctggtgattaatctcgataacttaattgttggcgataaattgtacttcaacagcggtgtaaaaacccctgaagcagtaaggaaattaacgcgcgacagggcgctggcaattgcgcgcagtcacggaatagctgcaacgaccaatccgggtttgaataaaaattatccgaaaggcactgggtgttgtaatgacgcagaaatattcgacaaagcgggcattgctgtactttcggtggaagcgactaactggaatcttgggaataaggatggttatcagcaacgcgcaaaaacagccgcattccctgcgggaaatagctggcatgacgtaagactggataatcaacagcatattgataaggcacttcctggaagaatagaacgtcgctgccgtgacgttatgcggataatgctaccgttggtgaaggagctggcgaaggcgtcttgatgggtttgaaaatgggagctgggagttctaccgcaggggcggggaattctaagtgatatccatcatcgcatccagtgcgcccggtttatccccgctggcgcggggaacacctgaaaccagttggctcgttgttcttctttggcggtttatccccgctggcgcggggaacacactaagcatacatatctgtttttaaacaaatttattccacatcaacaatctaccaactaaattcaaacatttccttatttttaaagaacgtctaacttattgattatcaacaggaagaaaagaaaccaaacgtaacccatccaaatccaccggaatacgtctgtttttgccccaggtctgaaactcaaaaccagactcagtatttgtcgcccaggccatgaccacatttccacaacctgccagttgggtaatttgctgccagatcatctcccgaatacgttttgatgtatcaccaacatacacaccggcacgcacttccagtagccagattgcgagccgtccacgtaagcgcggcgggacattttctgtaacaaccacgaccatgctcatcagccgcgtcctcgatgaccgctatcgcccaacgtttcaggttcggggatggctggcggtaacatatccggcgcaggttgtggcggttcaatttcacctgcggcaaggacttcctcaattaacggtattaatttgcccgttaacttagtgctacggaaaatatcacgacaggctaatctgacttctttatcaggttctgcgggttgcctcgccgctatttcaaatgcctttggtacaaccgaatcaaatttaatgatatcggctatgtcataaacaaatgaaagcggtttgccactatggataaacccaatagcgggcgcatatcccgcggctaatactgccgcttcagatataccgtacagacatgatgtagcagcactgatgcagcgattcacaacatcgcctttttcccagtctttaggatcgtatttgcgaccattccatttcacaccatattgtttcgccagtaatgcatacgtctggcgaacgcgagatccctcaattccacgtagctgctccactgaacggcgagctggcggtggctcacgaaaacgtaattcatacattttgcgcaccaccttcaggcgtagatcttccgttaaagccagctttgcctggtagagtaacttatcagcacgcgccccaccgggttgtccggaagagtagacgcgaacacccgcttcaccgacccagaccagtagcgtccccaccgtggcggccagatgcaccgccgcgtgggaaactctcgttcccggttcgagcataatgcaggcgaccgatcccaccggaatgtgcgtgcggatcccggttttgttgatcagcacgaaagcaccgtccagtacgtcgatttgaccgtactggaggaagatcatggaggtgcgatcttttaacgggatcggactcagtggtacaaacgtcacgcctctgctccgggtttgatcagcatcagaccacagccgaacgcccggcttttgccatacccctgactgagacgttgcagaaataacccgggatcggtgaccgtaagcatccccgtataatccacgctactgaactggatcagttgccgggtgttttcccgccggagttgttgttgtcggtaggcatcaaccgaggtatccagtagtgtaaaaccacttctttccccctgcgctgccagccagtccagcgccgcctgttgttgatgcaaccagatatcacgcccttccgcctgccccttcacctgccgtttcgcctccatcagcagatcgtggcgcttgcccgctttacagattgttggattcgcccgcaggttgaaacaaagagattgtccggtacgcagctcggacacaaatggtcggcattcgatggtgaaagtttcactttccgccgggcgtgcctgcgagaggacaaaaaagcgaaacgcgccctggagttcttcccgacgataaagaaattgcctttctttgccgccagggaagagatcccacagccactgatgcatcacatattcaccgcgatccaccagatgcagcaactgcgcaggcgaaagctggccggtatgtaaggttattcttgagaggtacatggttcctccttgctgagccacggcccctgattgacggtgcgttccccaaacagccactgctgacgatttaaaggaacatcccggcggcgtaatattttgctcgcgaccaggccctcgtgtttcccttcccaccagcattcatcctgaagttttgggagtgagactttcagtttatggaaatgatcctgatactgttggtatgcattacataaggcatcacacgcgttgccttcgagcagtaacggcgcaagaggtaatgccagcggatgactttttcgccccagataaagcggaaaaactggatggcgtaaaccgtcctgcaactgttcgaggctgtaaggcgcatcggctgttgttgccaccgccaccatccaccaggcatcggtgtagtagtcgcgccgggagataatcgcgctcaaaagctcagggtcgctcaactcttcgcgacggctgaaataacgtgctttacgcacctcttttggcatctggaccgtgtgataatcccgtgcccagcgcgggttacggctggcgcaaaccaccagtgaatagtggcgattaaacgcgtttaagcgttcggtatcatcacgccgaatccctaccccggcagccagtagccccagcaatgctgagcgcgaaggaagttcatgggtatgacgaacttcacctggagcatcgaccccccaggacgccatcggcccatgaagctgaaaaatcagatattggctcataagccgccccttacgcgcagataaagtccagcacgtccttcatgcttccctgtttgttcatcacgtcaaaacttgcgcattcggtcttctgttcgtagaccgtattcatgttttcgcgaagcgttgtaatacgctgcaccgccacatctaactgacgtgtgccattaatgggttcatagaaagccgccgccagagagcgtggttgatcggtgcctttttctgccagcgcccaggaggcgtaggcacggctggcaaagctgttctgtttgccggttggggagactttaagtgcggcttccgtaaaggcacgtatggtctgattagctaacgcttcgtcaccgccaaggttttcgaccagcagatctttatcaatgcagatataggtgtagaacagtgcagaaccgaatccggtttcaccaagatgcccggcaccggcatcttcagaagattggcgcaaatcatcaacggcggtgaaaaaatcatcttcgacaatcgtttcactgacaccaaatgcgtgcgctacctggcaggcggcttcaacattaaactcgggtttattcgccagcatacgaccaaacatggcaatatctaccgccatacggtctttgcgtaacaacgcgagatcttcctcttttggcgtgcgcttttcttctgcaagctgatgggccagcgcttttacggcgtcaaattctgccgggctgatatggactaactgttcagtttcggcgttagtgagcggatcttttggttttttgtcatttttagctttcccaagataatcagcaatttttgccgaccattcgatggcttttttatcttcaatccctttctcaatcaggatagttgccgcctcacgcgcaatacgcccactgcgaataccaatatggcccgccagtgcctgttcaaaaagtgcagaagtgcgccacgcacgtttcagactttgcgaggaaacgcgcagacgcgttgctccacccagcaccacagtttttggcgcaccggtatcatcacggttaaggttggcagcagggtaagcggttaacaaatgaagctgaataaatgttgtcatgagatagtcctttattgattttgttcgttatcggcgtcgccagcctggtaatattccagcgcccagcggatacggataaattcggttggccgctgctggcggcggtgatgattgagcaggtcgtcgctctcctggcaccaacggaagaccccctctgccagagagtcaagattgacggaaccgtttaataatctgactgcgcggcgtaactggcgcagtaattcatccggtgtttttactgccgacagacgagtaaaacgcccctttgacattaccgccgccagctgcgcggcaaaaggctgccgttcatcaatagctttaacattggcgctaactgcggctatcagcgccagtgcggtgatacgccactcaggttcatcctgccactttatttgtctgttcttcagaaacaggcgaaatccatccgtcagacaaacatcattaaccgtcgtactacgccgcagactggcacgttcgccacgtttctcctgcaattcctcgtgccatttgcgcagcgtggctttgtgctcctcttttacaatactcattcagcagcctcctgctttttctccctggcggctttagcactttgcttctccgccgatgttgtgaaatatttcttgcgcgcggtcataacgcgtttcaaatcaacaggctcatatggattggtgaatacacgctcgtcaaaatcctgacgcgcgaataaccaaatttccttttgccatttgccgagtaattcgtccgcatcctgaccttcttcaatttggcgcactaacctcaggaagcgatgctgagttttgttccagaagtcgatatccacaaaactgaaatcaccccgtgcaccttttggatcggagaaccacgcttctttcaatgcacttcgtaacagacttagaatccgtgaagccgtttgcgcagccagacgcagtttcggtatctggccttcttttttcttgagcagcagcgggaaatggtgttcgtaccaacagcgcgctttcatgttgtcgaaatcatagccaaatccccacaggcctacttttgcctgtttcagactgctggcattaaagagtttcaccaccagcgcgggaagttccgtattgttttctgatttacccgtttcgataaggcctaaccagtcgcgccagattaaaccgcccggttgtggtttgaccgagtaaaactcgccaccctctttaagtggtatacggtaaggcgttaagggatgctgccacatggcataattcgcaccgtaatttttggtcgtcatcaggctcaggagcgcgtcgctctgttcaccgcaaatatcgcagttgccgactgtcgtggtattaaaatcaatacgaatacggcgcggcattccccagtaagcctggagtttattgacctgatcatgggttaccaccgcaccggccagttcgctggttcgcgtcgggccaagccaggggaaaaccagatcgtcaaattttttgggtagcggtaagtcggcttcatcctgcggcatcacattgggccacagtttgcgccacaagggcgtttgttgattgccttgatattcctgtaattcaatcagagtggtcatcggcccaccgccgcgcaaaccggtgcgatagcctttgccgcctgatggcgcatttaactgtagggagaacagagctaacgcggaacaatgagggcatacgtgttcagtcacgccacgcttaataaagtggtctttattaaacttcgttgtttgagcgccgggaatctcaggcagtagcgaagcgacctgaactttatctcccttgagcgcctcgaaatcctgcataaatgaaggggaatctgccccaaactggaaagcgtgttctaaggacagcaatgcttcccgtagcttttcagcctccagtccgtcttcccagatatcatcccaacgaccgtgatttttgggcgcgaagctggtttgtagtagccccaacaaaaactgccaggccgccccctggagatctgcccgcggcgcagcgatatcgacaacattttcatcagccagatcgactggtgccagtttgcctgtcgttccgtctttaaaacgaacgggcaaccacggggttgtcagaagtgaaaacgagttcatacgcatcctctcgtaaaaaagaccatcccaggtcggttgtccatccttccatccttttctgtatatcaactattcagagagtcctgtcgcagacatctcaaccaaccttgccaatcaatccctccctggccgaatacccgcaactttcgtcatcggtgactaaaatcacgtttgccatttccggatcttgccgctgttcaacgcaccactgcctgaacgcatccccttccagtaaagaaaactcatcccgatgttttttccaccagcttcggcgcactctgacaacgctcatttcccatgcgtgagcaccggtggcataaggcttcaccacaccgtcaatacaggtagccagccacagggaaacagactcttcagccagacgtgtcgacagtttttccggaaggtaatcgttgatattggcggcatagccgggcctgaagttcagcacatactttttagcccttgcgcgatcacagtaatatttgcccacttgctcctgctcgctgcgggcaaatccttccggcattaccacgtcctcaccgtaaactgattcaataagaagccgggctgcgtgtggcatctgaatagcgccttgctcacgcagcacacgctgcgtcagccagattcgcccatgatcgggatagacatatgcactgttacgcatggcactgccgaaccattcgtcaccaggagcgtcatcccagacgggggccagaatcagcaattcagggggggaacgctcgtcttttccgtcacgctttaactgaccattaatatcgcggatatgccgctgtaatcgccccgctcgctggattagcaaatcaatgggggccaggtcggagatcatttcgtccaggtcaatatccacgctttgttcaattacttgtgtacaaacaatgacttgtgacgctctctgtaaactacaatatttaccaaagcgtgccagcgtttccgtttcaattcgctggcgatcgctaaaagcaaagcggctatgaaaaagtgaaaggctggaagcaggaatgacgccgcgggcaagcagctgacgatacacctgaatagcgtcatcaacagaattccgaatccaggcgatgcatttcccctgacttaccgccgattcgatacgcgcaatacactcttgttcactatggagccaacccacgctgacgctacgttcaacttctttgcgcgtcgctacccggtgcgaatgtacatcggttttcgtgacatgcgtcagccaggggtaatcatcttttcccaggagtggggcttcttgctggccctctgcaccacgcgcaaaggcggcgacgagtttgtcgcgctgctgttgagataacgtagcagaaagcaaaataacgctgtttccgccacgcgcctgccgctcgatcagcccttcaagaatgcacgacatgtaagcgtcacaggcgtggatctcatcagccagcaggattttgttactcagccccagaagccgcagattattatgtttaaacggcatcactgccatcatcgcctgatccagggtgccgacgccaatttcagccagcaacgccttcttgttactgtcggcaaaccaggccgcacaaccctggctgaaagcttgttcatccggttcttctgacccgattaaatcaccggaccagagtgattcattaaagcggtccattaatgtgcgggcactgtgtgccagcaccaggctggggcgagattctggcgaatagaaagaaagccaggttttgaccagccgatcgtacatggcattggccgttgccattgttggcagaccaaaaaacagcccgtgagctttccccgcagctatcaacctgtgcgccaggataagcgccgcttctgttttacctgcgccagtcacatcttccagaataaataactgcggtcctggctggctgatatccagatccagcaccttttgctgtaacggtgtcggattctcaataaaaggaaacagtgtattaattccggtgaaaggtgcggtttctgcttttggaggaaagacggttaatgcgttttgagcctgcactaaagccttctgccagtaatgtttaatatccattgcctgtgcgacgcgtggaaaaaatcgcgttgacgaacctgtccagtctgcgagtacgacggttgcagagatataccaggaaaggtgttttataagttcaatgccctcgtcatcatcccagaatgcggggatctctattcgcggaaacagtgccttgattgcaaggagaaaatctcgtgctgcagctttgtcttcaggcagaaaattatccaattcatccatacgatcagggggccgaccatgatgccctgtcgtcacgggcatccacatttctatcactcgcctaagtttgcgcggagagagcgaagatgaaggaagtaactcctgacattcacttaaataatgattccacaaccagtagcccagcgttgaatgagagattttttcgtaattttttctggcactttcctgaatcttgagttcagggggcaggtaaagttgttgaaaagagcgggcaaattttccaatatcgtgccagcacagcaaccaggcgaaaaattgagccgcctgttccttgtcagaaatccctaattgacgaaaataatcagccagcccgaagcaatttcttttaaccattaaatagcccatcgcggctacatccagcgaatgccagcaaagaaggtgatagtcgtcgcccccgtctttctcgccgcgtcgggtttttccccagaaatcaaaaaaagtcacaatatttttatccttcagtaaacttaaaggatatttacgcatatttttaaaattatctgtgatatatatcagccaataaaacatttacattatgnatnaantnatgantttcatttgnaattcataataataaatagagactatatattcacataaaaaatataaattttaaaaaagggtgcaggagaccaaaccatcacaattcagtacgcggggttttacccccgcgtggtggctacttcttcgattcgtaagcgagaactgccttaaactccataccacgttctctgatactcaactcacacaacgagtcacctaccatcagcgtgaatcccagtactgtacaacacagtacgatgattgccacaagggcatattttgtcagcatgtcttgcctccctgcaaagaagagactaacattcgaattgtttgggttcgaacgtaagcctcaggttgatagaaatatcgcctggggcttttgtccatctggaacctcgcgaatgcttaacgccagacagcctcaagcacccgacgccattctatacctgataattcttccagcggcgttcacgtttaaaatcaggaatactgctcgcaaaataaaaacgcccccatcatttctgacagaggcgtttaatttatccggcaatatttacccttcgtgcaatccacattccctttttaagccaaagaaacgtgtttcttcttccgacatgccaggttcccatttacgggttgtatgggtatcgcccaccgataaatatccttcgtcccataatgggtgatatttcaggccatgtttttgcagatactgatatatcgttcggttatcccagtcgataatcggcagcactttaaatacgccacgctgaattgccagcaccggtaaattggcgcggctgccggattgttcgcggcgcaggccagcaaaccacgtttgcgcattcagttctttcagcgcccggttcatcggttcgactttgttgatgtcattgtacttttcaatgccttcaacgccctgttcccacagtttgccgtagcgtgcttcctgccaggcggcgctttcggtagcgcggtacactttcaggttgagcttgagtttgtccgttaactcgtcaataaagcggtaggtttccgggaacagatagccggtgtcggtgaggatcaccggaatatccgggtgaatctgattcaccagatgcaggctcaccgccgcctgaatgccaaagctggaagaaagtacatattcaccgggcagattatccagcgcccaggcaacgcggccttcagcgtccagtttttccagttcggcgttagtttctgccagcgccagaatgcgatctaccttcggcagttcgttcagggcgtttagatcgagtttggacatagattcctcactgtttgccttgcctgatgcgacgctcacgcgtcttatcaggcctacaagaccgggctgatggttaatcccacaaatcgcgcgccggatcgagcaccgggcgaatgatgcccgcacgcaccgtaaagtcgccgaagccttcacccgcttcgcgctctttcgcccagcgccctatcagttcatcaagcgacgccaggatttccggctcggtgatgttttctttatacatccgtgggatacgtgtcccaatgcggttgccgccaagatgcagattgtagcgacccggtgctttacccaccaggcccacttccgccagcatcgcgcgaccacaaccgttcgggcagcctgttacacgcatcacgatatgctcatcgctgacaccatgtttcgccattaaattatcgatgttgtcgataaaagacggcaggaaacgctctgcttccgccatcgccagcgggcaagtcgggaatgacacgcaggccatcgagttttcacgctgcggcgtgacggcattcattaacccgctctctttggcgatcttctcgatcttcgctttctcgctttccggtacaccggcgatgatcagattctggttcgccgtaatgcggaaatcgcctttgtggatcttcgcgatctccagcaggccggttttcagcggacgccccggataatcaaggatgcgaccattttcgataaacagcgtcaggtgccagttatcatcaatgcccttaacccagccaatacgatcgcctcgtccggtgaactcatatggacggatcggttcaaatttgatccccgcgcgacgctccacttccgctttaaacgtctcaacccccacgcgctccagcgtgtatttggttttggcatttttacgatcggttcggttaccccagtcacgctgagttgtcacgacggcttcggccaccgccagcgtatgctccagcggcagatagccaaactcgctcgccgtgcgggcgtaggttttcttgttgccgtgttcgatagaaagcccaccgcccaccagcaggttgaagcctaccagcttgccgttttcggcgattgccacgaagttcatgtcgttggcatgcagatcgatatcgttctgcggcgggatcactaccgtggttttgaacttacgcggcaggtaggtctgaccaaggatcggttcttcatcagtagtggcgactttttcctggtcgagccagatctccgcatacgcgcgggtacgaggcaacagatgctcagaaatcttcttcgcccactcgtacgcttccgcgtgcagctgcgactcgtaagggttcgaggtgcagagtacgttacggttcatgtcgttagctgtcgccagcgcatcaagaccgaccgagtgcagcatctggtgcaccggtttgacgttctttttcagaatgccgtggaactgaaacgtctggcggttggtcaggcgaatgctgccatagatggtgttttcaccggcaaatttatcgatcgcttgccactgtttggtggtgatcacgccacccggcagacgacagcgcaacagcatcgcatggcgcggctccagcttctgttcagcacgttcggcgcggatgtcgcggtcatcctgctgatacatgccgtggaagcggatcagcaggaagttatcgcccttaaagccgccggtcagaccgtcgtttaaatcttccgcaatggtgccgcgcaggtagttgctttcaagcttcatgcgctcggcgtctgtcagtttaccttcgaccactaaaggccctggatgtttttcgctcattagtagacatctcgctgataacggcgctctacgcgcagctcacttaaaaattcatccgccgcttcggtgtccatgccaccaaattcggcaatcacttccagaagtgcctgctcaacgtctttcgccatgcgattagcgtcaccgcagacataaatatgggcaccgtcattgatccagcgccacagctccgcgccctgttcgcgcagtttgtcttgtacgtaaactttttctttttggtcgcgcgaccaggcgagatcgatccgcgtcagcacaccctctttgacgtagcgctgccactccacctggtagaggaaatcttccgtaaagtgcgggttgccaaagaacagccagtttttacccggtgcttcgtcggcagcacgttgctgcataaaggcgcggaacggcgcgatgccggtgcctgggccaatcataatcaccggggtttccgggttagcgggcaggcggaagttatcgttatgttcgataaatacgcggagttcgccctcttcttccacgcggtccgcgaggaagctggaggcaccaccggcacgggcgcggccttccacgtcgtaacgcaccacaccaacggtgacgtgtacttcgttctcgacttccgcctgcgaggaggcgatggaatacagacgcggcgtcagcgggcgcagcagattaattagcgcttcggcatcaagctgtgccggggagaaacgcaccatgtcaacaatcggcgtcgtcgcggcgtaatgctgtaacttcgctttatcgcccaccagcggcagcagtgtttcactgcgggtaagcgtggcgtaattctcaacaatgttggcggtgttgacggtcagttcgaagtgccactgtagcgcttcgttcagaggcaacgttttgccctcgacggtgacaggttcatcgcctgtcagccacagcagttcgacaagttctttcaccagtgccggatcgttctgataccagacgcccagcgcgtcacccggctggtaacgcaggcccgagtcacctaagtcaatttcgatatggcgaacgtctttttcagagttacgcccggtaattttctggttaacagagaggctagccaccagtggcgcgtctttgctgtacgggctggtgtggatttcatttaccgcgccagtagcgacggattgcgaaggtgccgcgacaggcgcacgcgatttaagcgcatcaaccacgcgggcgcgccactcgctggcagcagcctggtactcaacatcggcatcgacacggtcgagcaggcgttcaccgcccagttccgccagcttgctgtcgaaatctttcccggactggcagaaaaattcataagagctatcgccgaggctaaacacggcaaacgcggtgttttccagctttggcgcttttttggagaacaggaacttatgcagcgcgacggcttcctccggcggttccccttccccttgcgttgacgtcactacgatgagcagtttttcgctggcgatttgtttgaatttatagtcgcccgcgttcaccagcttaacgttcagttttgctgctaataaatcatcgcgtaatgcttcagcaacccggcgcgcattgccggtttgcgaggcggagataatagttatacccggcatttctgcggctggcgctggcgtcgctgcaagcgcagcaggctgctgattgagcacgccccagaaatagccagaaacccaggcaagctgggtgggagttaaatcggtcgtggccgcctgaaggcgtgccagttgctccgggttcaacggaagcaacgcggaaggtgggacctgtgtcgtcatgcgtcgttatgttccagtaagcaaagctgtttctgcgccctgtcagcgcccataaaacagaagagaaggtaaggttaacggggtgaacggtgtggattaaagacgggatagcgataactaataaccaaatcgactaacctgttttagcaatagtctttaacaacaaaatagattaaccaacctaatgaaaaacaaatgaatttagccaatcattaagataaatcagcgattttgcgcaacaaagtcgttttagataatgcgaaaaaacagcctttccggtactctacggcggttttatcgtcctgtagagaaattatgatgtccaccacgttatttaaagatttcaccttcgaagccgctcaccgcttaccacacgtcccggaagggcataaatgtggtcgcctgcacgggcattcctttatggtgcgactggaaattaccggggaagtcgatccgcatacgggctggattatcgatttcgctgaactgaaagcggcgtttaagccaacttatgagcgcctcgatcaccattatctcaatgatattccaggtctggaaaacccaaccagcgaagttttagcaaaatggatttgggatcaggttaaacccgttgtgccgctgttaagtgcggtgatggtaaaagaaacctgcaccgctggttgtatctatcgcggcgaatgataagagtgtgtcggcggtcaatttcccttaagtaacgctatgttagggtgttgtgttctggatatctggggcatgacatggaagacgactgcgacattattattattggtgccggtattgcaggcaccgcttgcgcgttacgctgcgcgcgatcgggtttatccgttttgttactggaacgcgctgaaatccccggcagcaaaaatctttccggcgggcggttatatacccatgcactcgcggaactcctccctcagtttcatctgaccgcgcctcttgaacgatgcatcactcacgaaagcctttccctgttaacgccggatggcgcaacgacgttttccagcttacagcccggcggtgaatcctggagtgtattacgtgcacggttcgatccgtggctggttgccgaagccgaaaaagaaggtgtcgaatgcatccctggtgcgacggtggatgcactgtatgaagaaaacggcagggtgtgtggtgtcatttgtggtgacgatattctccgcgcccgttatgtggtgctggcagaaggtgccaacagcgtcctggctgagcgtcacgggttagtgactcgtcctgctggcgaagcgatggcgttggggatcaaagaagtgctgtcgctggaaacatccgctattgaagaacgttttcatctggagaataacgaaggcgcagcgttgctgttcagcggcgggatctgtgatgacttacccggcggcgcatttctttatactaatcaacaaacgctctcgttagggattgtttgcccgctctcttcccttacgcaaagccgtgttccggcaagcgagctgctgactcgctttaaagcgcatccggcagtgcgcccgcttatcaaaaacacggaatcactggagtatggtgcgcatctggtgccagaaggtggcttgcacagtatgccggtgcaatacgccggtaacggctggctgctggtgggcgatgcgttgcgcagttgcgtcaataccggaatttccgtgcgcggcatggatatggcgctgactggcgcgcaggcggcggcacaaacgctgataagcgcctgccagcaccgcgagccgcaaaatctgtttccgctttatcatcacaacgtagagcgcagcctgctgtgggatgttctacagcgttatcagcatgttccggcgcttttgcaacgcccgggatggtaccgtacgtggcctgcgttaatgcaggatatttcccgcgatttatgggatcagggtgataaacctgttccaccgctgcgccagttattctggcatcatttacgtcgtcacggcctgtggcatctggcgggcgatgttatcaggagtctgcgatgtctgtagcccgtaatctctggcgcgttgctgatgcgccgcacattgttccggctgactccgttgagcgccagacggcagaacggttgattagcgcctgtccggcaggtcttttttcgctcacaccggaaggtgacttacgtattgactatcgcagttgcctggagtgtggcacctgccgtttgctgtgcgacgaatcaacactacaacagtggcgctatccgccttccggattcggcatcacctaccgctttggataaataataaggataatttatgcccctcttacacctgctccgccagaatccggtgattgctgccgttaaagataatgccagcctgcaactggcaatcgattctgaatgccaatttatttccgtgttgtacggcaatatctgcaccatcagtaatatcgttaaaaagattaagaacgccgggaaatatgcttttattcatgttgatttgctggaaggcgcgtcaaataaagaagtcgttattcagtttttgaaactggtgaccgaggcggacggcattatcagtaccaaagcctcaatgttgaaagcggcaagagcggaaggttttttctgtattcatcgcctgtttattgttgattcaatttcgtttcacaacattgataagcaagttgcgcaatcgaatccggattgtattgagatcctgccaggctgtatgcccaaagtgctgggctgggtgacagagaaaatccgccaaccgctgattgccggtgggctggtgtgcgatgaagaagatgcgcgtaatgcgattaacgcgggtgtcgtggcgctttccaccacgaataccggggtctggacgttagcgaaaaaattactttgacgggataatcgtaaccaattgaatttggtttgatttgtaggccgcacgccacatccgacattcagcgcctgatgcgacgcttgacgcgtcttatcaggcctacaagtccccaggccagaaccgtaggcaggatcatccggcaacacgttattggcaatctgcgtgaatgtttgtcaccagtgcctccagcaccactttccagtcatcaaccacgccaacatctgcctgtgaaaataccgcagcgctggcgtcatgattaatcgccaccacaaacttgctattgcgtacgcccgccattaacgctgctgcgccagaagcgccaacaacaatacacacctcaggtgccagcagatgtccggaaataccaatcactttttcagcatcaacgccaccgttcatcactcgcgcccgactgtagcccacttcggctcccagcttttctgccagcatagcgatttcctggttatctgcctctccgccctgccccaccaccagcacccgtctggcctcagctaatgggtcgcgagtaacatttttcagatcctctgtgctaaccagccagtcgggaagcgcacccgggacaatgttcagttgttgcattccagagggcaacgtggcgtttttcgctgctcccgcctgacgcgccagggaaaggcatagcgggcgtttttctgtttgcagcgtcgccgttagcgcatttccccagtgggatttgcgcacgcttacggttggaatatctaacgaagtcacctggcagatgcttgcaccatgtaaacgccaggccagccgggtcgacagttcatcgccaaacgttcccggcggaaagagaacaacgtccgcaggcgttcgctgccactgttccaccaacgcatccagcacctgttccgccactacaggctgaggttcaatctgccagtgcgccagggtacaaccgctgaaatcctgcgccgccagccagcttgctattgcggcattctcctgatttattgtcacaattgcgatattcatggctgcatcctttggcgtaaatagtcctgccatagcttttgagctttttctgctaccgtttgcccatcaatcagcgtcgctccgcgtcgttgctctgctcttgccagttgcagacactgcatcgctggcatttcggcagcaacagttttacggataatttctgctttccccgcagccattcgctggcgcattcccggtactggcaaggccacttcaccgcactgacgcacggcaatcaccgcaggcaagcgaacccggcaacaacgcaaaccatgttcagtacgctgttcgagggtgataaacagcgcgtcgagagtgaaacgctccacctgggtgaagcagggccagcccagcatttccgccagcaaaaatggcgtttgcccattctgcccttcgctgctttggcagccggtaattatcagatccagcggattctgatgctgccattcggcaatatggcgagcgacaaattccggcgcaaagcgcagatctgccgccgtctccagcaatacagcttcctcaaacccaagagccatgagatagcgcagccagtgcaatgcccgttcatcccccatgctcaacgcggttaaagacatcggcgtaccgttttttctctgcgccaacagcagcgcggcagcggcctgttcatcagcaccgagtaaacttcgcagtagcgaaatatccggtccgcttttaccctgagccgccgcctgccactctttttccgccagcattccggcatccggttcggctttaaacgctaacagaatgttcattcgcacctcctacatttcccgccgccaccagcgggagggctttagtttctggtgcccatagccaggtcacaacaaaaccaaccaacaacactgtcgccaggagcaataaggtgacttgcattccccactgcgccagcacccacggcagcaggccagtacttaccgccgcgccaagtcgactcatggcggtggcaaaaccgacgcccagcgagcgaatgtcagtaggaaaactttccgcaggcaaaatgcccaccagattactgactgccgaaatggtggtgctgaagagaacaaaaagcagcagcgttaatgaactgccggaaggcaaacaggccattactaccagcgttgccgccagcagcaaaaaacttcccagcaaaaatttgcgatgtgccagcaggtgcgtcagaactaatcccagcagcgcgcccacaattaacaacgcattaagcatcaggctggcagtcagcgcatcttccagaccaatagtctgggcgatagttggcagccaggtataaatcacaaaccatgggattacgaggcagacaaagaagacgctgttaaacaccgtgcgccgccagtaacgcgaagagaacaaggttttgatgtgtttatgggtcgccgttaccacttcatcgcccagtaaaacatggggaccaaaatagcgatgcacgatagcgtgagcttctgcaaaacgcccctggcgcagtagccagcgtggtgattctggcgttccccagcgtaataacgtaatcaacaacgcgggcagagctgccgatgccagtagccagcgccaggcctccgggttttcggaaataaagtgatgtccggcaatacttgccagcacatagcctacggtccacaccacgctgaatgcgcccagcaaaataccgcgatggcggcgcggggaaaattcagccagcaaggtgtgacctactgaataatcgcctcccagaccaatgccaatcaaaatgcgcagtccaataagatgctctggcgtggtggcaaaaaattgtaaaaacgaagcaagcgtaatcagcaaaaagctgaaggtgaagattttttgccgaccaatatggtcggagatccacccaagaaccaggctgccaaggaacaaaccaaggagcgccgagccgccgatcattcccgccataaacggcgtcagttgcatggcgggcgtaagctgaataatggcgtaaccaatgacgccgagaacataaccgtcggtcaggtgtgcgccgaaagtgagcgcagcaatgcggcagtgaaaacggttaagcggtaaatcatccattcgcaccggtgaagtgttcatctttaccccttcattgtccggtaataagaacggcttctcgcctgagaagccgaaaaggcaacgccccgtcatcgcggaacgctgcctgacacattatttttcaatcggatagatagtacccgtattcataatgccattaggatcgaactgctttttcagcccttccagcaacgcccacgcgctgcccgtgttccagtttgctccagtgaacgcgatgtttaccgataccgtggtggtgcaccatcgaaccgccgaggcgaatggtttcttcacagatgatcttgttgagcggattgtggtacttgtcgatttcctcttccggcttacagtcaacgacgttgtaatcgtagacgaagtacatgttggtgccgttctgatagctatgagaggaatgaccgcccagcatggtgatgtcgtcggcgtgcgggaactcagtacgaatacggttaataacgctttcgtagatttcgtggatgcagctccagcagccggacacttcagtggtaaagcccatgttgccggttttgaggatctgcacacgttcggcagccactttatccggtccccagttcaggttgttaaaccaggtttcgatcagtttgctgtccacgcgctggcactgcgggtagcgggcaacgatttccgcaatcccttcgcccgtcgccttcgcaatgcgaggattgccttcagccataaagatcagcacacatttaccgtcggcaaaatgggtgaagtgttgggtgccatcttcagcgtcatacaaacgagcgatcgacggacgatacccttccaccatgacttcacgcaggatgttgaagccggttttcatgtcttccaggatatagccgtagaagaggttgttttccggggtgaatttaaagattttcactgttacttcagtgatatagcaaagtgcaccttcgttaccgatgatgatgtggcgaatgtccgggccagccgcgcggcgtggcacgtttttaatgcgtgtgacggtgccatcagccaatactgcttccagaccaacgaccatatcttcgattgcgccgtagagtgtggagaactgcccgatactgcgggttgctaccaggccgcccatctgcgccagcggctttgactgcggagaatgccccgtggtgtaacctttttcacgcaacgcattttccagcacctccagcggaacgccacattgcgccgtcgcctgcatattctcaatatcaatattaatgatttgattcatggcggagccgtcgagcaccaccgagttttccacaacggtttccagcccaccttcagtggcggaagcgccggtacgcggcacaccgttaattttgtgcgcattcataaaattcagcacacgggagacttgttctgtggaaccgagttttacgaccgctgccggaatcggcaaagtataaataccatgaatatccggaaatttacgaaaacggtcaatactgttcttctttaatactgtttcatcggtaattacgcgatctgcaccaacaatttcctttagttggtcgacaatcgctgcgcgagataaagacatagtaattccttcctgataataaaaatggaataatcattaataagagaaaacagaaaccaccgttatggattagcgcactaaataaccaccatcgaccactaataaatgcccattgacataatttgaagccggacttgcgaggaatacagctgcgcccattaaatcctgagtatcgccccaacggtttgccggaatatgatcaagaacgcgctgattggtttctggattactgcgtgtcgccagcgtaatatctgttgcataatagccaggggcaataccatttacctgaatattatattgacctagttcatcacaataagctttggtgaatccggcaagagcatgtttagtggcagaatatgcaggtgaccattgtccacctaagtaagagaacaatgaacagatattaataattttgccgcttttctgcgggatcataatttttgccgcttcatagcttaactcgaatgcggcggtcaggttcacatcaatcatcggatcccagtcggcacgaccgaagtccagcaccttattcagcttacaaataccggcattgtttaccagaatatcaactgtaccgaaacgctcacagcaagcagcgataatcttctgcggcgcgccttctgcggtgatatccacctgcatgaagtccacctcaacaccctgtttttcaatcatttcctttgtttcgccgttatctttgacgaaactaggaataaagatatttgcgccagctttggccaacgccatggcaaatgcctggcctaaaccgctattcccaccggtaacaattgcggttttacctttcagtgagaaaaaatccattgagaacgcattgagagattcgattgacatagttagctccaatttccgtaaggcaaaaaaaaagaaaggtaacttcccccgcgagagggaagttacctttctcattatctctggtaactggagataatttttagcataacggcataactgctaatgtgatcgtaatcacagtgtgatattcgtattgtcaaatagttttaaaaagcagaagcgtgattactctcacacaacacctctgctttccatgttatttcttattgcaattactagagacctgagaaaagtaatccacctgaaagggcggcttacttttctcttttttttgtctattacaaatgggaatacgatatgcaacacaactcatatcgccgttggataaccctcgcgataattagttttagcggcggcgttagttttgacctggcttatttacgttatatttatcaaattcccatggcgaaatttatgggattcagcaataccgagataggtttaataatgagtacctttggtattgcggctattattctttatgcccccagcggcgttattgccgataaattttcacaccgcaaaatgattacttccgcgatgatcattaccggattactgggtctgttaatggcaacgtatccaccgctgtgggtaatgctctgtattcaggtcgcctttgcgataacgacgattttaatgctgtggtcggtgtcgattaaagccgcctcgttgctgggcgatcatagtgagcaagggaaaattatgggctggatggaagggctgcgcggcgtcggtgtaatgtcgctggcggtgtttaccatgtgggtcttttctcgctttgcaccggatgacagcgccagcctgaaaacagtcattatcatctacagtgtggtttacatcttgttggggattctgtgctggttttttgttagcgataacaacaacctgcgcagtgccaataacgaagaaaaacagtcattccagtttagcgacatccttgccgttttgcgtatcagcaccacctggtattgcagcatggtgatttttggtgtcttcacaatctacgccattctgagttactccaccaactatctgaccgaaatgtacggcatgtcgctggtggcagcgagctacatggggattgtgatcaacaaaatcttccgcgcgctgtgcggcccacttggcggcattatcaccacctacagtaaagtgaaatcccctacccgcgtgatccaaatcctttccgtactcggcctgctggcgttaactgccctgctcgtcacgaactctaacccgcaatcggtcgcgatggggattggcctgattttactgctgggattcacctgttacgcctcacgcgggctgtactgggcctgccctggcgaagcgagaacaccgtcttacattatgggcaccacggtaggtatttgttcggtgattggattcctgccggatgtcttcgtttacccgattatcggccactggcaagacaccctgcccgcagcagaagcctaccgcaatatgtggctgatgggaatggcggcgcttgccatggtgattgtctttacctttttgctgttccaaaaaattcgtactgctgatagcgcccccgcaatggctagcagcaagtaagccaggaaaattacaggagaaaaatcatgtcgaaaaaatacatcatagggattgatggcggaagtcagagcacaaaagtggtgatgtacgatctggaaggtaacgtggtttgtgaaggcaaaggcttattacagccgatgcacacgccagatgccgatactgcagaacatcctgacgacgatttatgggcatcattatgttttgccggtcacgatttgatgagtcagtttgccgggaataaagaagatattgtcggtattggtctgggatccatccgttgctgtcgtgcgttattgaaagccgatggcacgcttgctgcgccgttgattagctggcaggatgcacgcgttacacgcccttacgaacacactaatcctgacgtggcatatgtcacctctttttcgggttatctgacgcatcgcttaaccggcgagtttaaagacaatatcgccaactattttggtcagtggccggtggattataagagctggacatggagcgaagatgctgcggtaatggataagtttaatatcccccgtcatatgctgtttgatgtgcaaatgcctggcaccgtcctcggacatatcacaccacaagccgcactggcgacacatttcccggcaggactgccggttgtttgtaccaccagtgataaaccggtagaagctctgggggccggattactggatgatgaaactgcggtaatttctcttggcacttacatcgcattgatgatgaacggcaaagcactgccgaaagatccggtggcgtactggccgattatgtcttctattccgcaaacattgctgtatgaaggttacggtattcgcaaaggtatgtggacggtgagctggctgcgtgacatgttaggcgagtcgttaattcaggatgccagggcgcaggatctttcaccggaagatttactcaacaagaaagcctctagtgtgccacctggctgtaatgggctgatgacggtgctggactggctgaccaatccgtgggaaccgtacaaacgcgggattatgatcggctttgattccagcatggattacgcatggatatatcgttcgatattggaaagcgtggcgctaacgctgaagaacaattacgacaatatgtgtaatgaaatgaatcactttgcgaagcatgtgatcattactggcggcggttcgaacagcgatctgtttatgcaaatttttgccgacgtgttcaaccttccggcacgccgtaacgccattaacggttgtgcaagtctgggagcagcgattaatacagcggtaggtctggggctatacccggattacgcaacggctgttgataagatggttcgcgtgaaagatatctttataccgattgagagcaatgccaaacgctacgacgcgatgaataaaggcattttcaaagacctaaccaaacatactgatgtgatcctgaaaaaatcgtatgaagtgatgcatggggaattggggaatgtggattcgatccagagctggtcgaatgcgtaagtgaggaaggccgggcgggaaactgcccggcctgaacatacctgaatggttatccccgctgacgcggggaacataagttcgacaacttaaaaaatgataacaagtccggtttatccccgctgatgcagggaacataataaaaactttaactagttcggtttatccctgtttttacaaggaatattaactacactcgatgtctttagaataaaagacaatacgaatcgcactttatcaattttcacttaaagtatgaactggatatctttattcataagaactattcatcaacagcgtatagaggcggttatgtaaaaccactcattagcctcaaaacaaagacaaacttccagatttattacttaaccaatgaataacaagcttaaaaaacatactgttattctaaagaaaaaattaacaggcattaattcaatattaaaaaaataatagattaaaatttcttaacgatttaagaatcatacaaataacactttgattaaatttaattttttgtatcgataattgtgaacctctctggcatggagaactattttgaatatgaggtgttacgtggatatgttgcttattacaagtactgctaatataaaaacttgagaaagagataacgggttatatggtggtttatccccgctggcacggggaactcgcctgacattgcagacgttacaaattgagaggcggtttatccccgctggcgcggggaactctaatcacgttttagcgcgccctcgtccggtttcggtttatccccgctggcgcggggaactcatcttcttgttcaggaacgtcagtagaggtgtcggtttatccccgctggcgcggggaactcaggcattaaccccaccagctcgacgtgtgtggcggttatcccgctggcgcgggaactcg

SEQ ID NO: 596 - DNA, 267769 bp, Escherichia coli
  modified_base (1)..(1): a, c, t, g, unknown or other
  modified_base (97838)..(97841): a, c, t, g, unknown or other
  modified_base (236452)..(236454): a, c, t, g, unknown or other
nctaatcacgttttagcgcgccctcgtccggtttcggtttatccccgctggcgcggggaactcatcttcttgttcaggaacgtcagtagaggtgtcggtttatccccgctggcgcggggaactcagcattaacccccaccagctcgacgtgtgtggcggtttatccccgctggcgcggggaactcgcgggcgttaacgcggtgatactgtttgacggcggtttatccccgctggcgcggggaactcaccgagcgccgctgggaggcgtatctcacgttcggtttatccccgctggcgcggggaactctgaatgatcggaaagacgctgcaaaggcaatgcggtttatccccgctggcgcggggaactcattaaaggattattttgatgagtctgaaaaatcggtttatccccgctggcgcggggaactctgattttggtggcgggggtgactgggggaatacggtttatccccgctggcgcggggaactctaccggtgtgaattacagcaccaccgccaccccggtttatccccgctggcgcggggaactccaaacaggtcgacatgtttggctaacagctaacggtttatccccgctggcgcggggaactccgataacacagggccgtcaatgcggcccttttcggtttatccccgctggcgcggggaactcataccgggttttgctccagcagcgccagttcctggtttatccccgctggcgcggggaactctgtaaacataacctattattaattaatgattttttaagccagtcacaatctaccaactttatagtatcacacaaacaacacatccattatgttaaagagcacttaatccattgattaaaaaggtaaatatttaaaataactctatacaaactaaaatctaccaaactttaccgcaataattttcactccagcgaaaaattaatgccacagaatttgtagagaatgctaatgattagccctggatgggtaaaatggaggagttttcagaggcgacaaacaatataaatgagtagaagtctttacaggttccacccatttataacgcttataaatgtttaatcaggcaatatttagatatttatgtgtttgcatcgacaaacgccaattacgcgcaatgcaggtttcaatgcacaaacgtgtggcatcatccttttggctaatcggctgcagtgcaatgactcgcggtttatcatcggtcagcgttgccagtagttcatccagtgcttcaatatcacgtacgcgccccactggatgcttgatttcgttggctcgctccagtgcctgtgacaacacttcatagccgccgcgcatgttcagctttggtgatacggtaacccaggtattcggtgtgcagcgtacttcatgagttccactggtttcgatctggcagctaaaaccgttcttttcgagcaggtcagtcagtggcagcaaatcatgaatgcaaggctcaccacccgtaatcaccacatgccgcgcggtatatccctgccgaccaatgacagccagcaaatcttcactgctcgccgccccccacttatcactctctttggtcttcgccagaatgctgaaaagggagacttcccgatcctcaagcttttcccaggtgtgtttggtgtcgcaccaggcacagccaaccgggcatccctgtaaacgaataaaaatggcggggacgccggtaaagtaaccctcaccttgcagggtctggaacatctcgttaatcgggtactgcatagcattctctgtgaagtggataattgttaattattgcagatcctgccgcaacaatcatgtcttattaacattctgttacatgcagatttaaagaaaaatgcgaaacatatcgttaataattaaagggagtaacgtattatgtcagaagaaaataaagaaaatggatttaatcatgtcaaaacattcaccaaaattatatttattttttctgtattagtttttaatgataacgaatctaaaattaccgatgccgccgtcaatttatttatccagatttaatgagaaatttataatgcgctatttcatactaatgttcactttcgtatgttcctttgttgcagcccaaccaactattgtcccacaattacagtaacaagttacggatcttacgagtagcttaaactcacaagaaaagaaagaactgacgcacaagttagaatctattttcaataatacccaagtgcaaattgctgtattaattgttcccacaaccaaagacgagacaattgaacaatatgctacaagagtttttgacaattggcgtttaggagatgccaaacgtaatgatgggatactgatcattgttgcctggtcagatcgtactgtccgcatccaggtaggttatgggctggaagaaaaggtaaccgatgctctggctagagatatcatccgtagcaacatgatacccgcatttaaacaacaaaaatttgctcagggattagagctagctataaacgctttgaataaccaactcacttcacaacaccaatatccgactaatccttcagaaagtgaatcagcgtcttccagtgatcattattactttgctattttttgggtatttgcagtgatgttcttccctttctggttttttcatcaaggcagtaatttttgtcgcgcatgtaaaagtggagtctatatttcagcaatctatcttttagatttattcctgttctccgataaaattttttccattgctgtattttccttcttttttactttcaccatatttatggtctttacctgtttatgtgtacttcagaaaagagcatcaggtaaaagttatcattcagacaacagcggttccggtggaggctcaagtggcggcggatttagcggcggtggcggttcttctggaggtggcggcgcatccggccgctggtaactcaaccataaaaaatgccagcccggaggctggcatttttaaatcagataaagtcagtcttatgcctggcctttgatctctttacgaccgttgtacggtgctttttcgcccagagcttcttcgatacgaatcagctggttgtatttagcaacacggtcagaacggctcatagaaccagttttgatctggcctgcagcagtaccaacagccaggtcagcgatggtagcgtcttcagtttcgccagaacggtgagagataactgcagtgtagccagcatctttcgccatcttgattgcagccagagtttcggtcagagaaccgatctggttgaatttgatcaggatggagttagcgatacctttttcgataccttctttcaggatcttggtgttggttacgaacaggtcgtcaccaaccagctggattttgtcgcccagaactttggtctggtatgcgaaaccgtcccagtcagattcgtccagaccgtcttcgatagaaacgatcgggtactgtttggtcagttcttccaggaagtgagtgaattcttcagaggtgaacgctttgttgccttcgccagccagaacgtatttaccatctttgtagaattcagaagctgcgcagtccatcgccagagtgatgtctttgcccagttcataaccagcagctttaacagcttcagcgataacagccagagcttcagcgttggaacccaggttcggcgcatagccaccttcgtcaccaacagcagtgttcatgcctttcgctttcagaacttttgccaggtgatggaaaacttcagaacccatgcggatggcttctttcacagttttcgcgccaaccggctgaatcatgaattcctggatatcaacgttgttgtcagcgtgctcaccaccgttgatgatgttcatcatcggaaccggcatagagtatttgcccggagtaccgttcagttcagcgatgtgctcgtacagcggcatacctttagcagctgcagcagctttggcgttagccagagatacagccaggattgcgttcgcgccgaatttggatttgttttcggtgccgtccaggtcgatcatgatcttgtcaatgccagcctgatctttagcatctttgccaatcagcgcctgagcgatcgggccgtttaccgcagcaacagctttggttacgcctttacccaggaaacgggatttgtcgccatcgcgcagttccagagcttcacgggaaccagtagaagcacctgacggagcagctgccataccgacgaaaccaccctccagatgtacttcggcttcaacagtcgggttaccacgggagtcgatgatttcacgaccgatgatttttacgattttggacattaggttttcctcaagtcactagttaaactgaaactccagacaaacaacgcgtacccagggtacgcgttgccgttctaacttttttacttacttcgcctgacgtttctggaactcgctggcggctttcacaaagcctgcaaacagcgggtgaccatcacgtggagtagaagtaaactccggatggaactggcaagccacgaaccacgggtgattcggaacttcgatgatctcgaccaactgatcatccccggaacggcccgcaacgcgcagacctgcatcttcaatctgtttcaacagcatgttgttgacttcgtaacggtgacgatgacgctcaacaattgtcggcgcattgtacagctggcgaaccaggctatcgtcaaccaactggcactgctgtgcgccgagacgcatggtaccgccgagatcgctcttctcgctacgaacttcaacgttgccgttttcatcgcgccactcggtaatcagcgccacaaccgggtacttacagtctggcacaaattccgtagagttggcgttctccatgttggcaacatggcgagcgtaatcaattaacgccacctgcatacccaggcaaatgcccagataaggaatattgttctcacgcgcaaaacgcgcggtcgtaatcatgccttctacgccacgatagccgaaaccgccaggtacgaggattgcgtccagacctttaaggatttcaacgccgcgcgtttcaacatcttgtgaatcgatcagtttgatgttgacgctgacacgattcttcagcccaccgtgtttcagtgcttcgatcactgatttataagcatccggcagttcaatgtacttgccgaccataccgatggtgacttcacttaccgggttcgcttcttcgaagataacctgttcccattcggacagattcgcttccgggcagtttaagctgaatcgtttacaaatataatcgtccagcccctgagatttcaacaggcccggaattttatagatggaatcgacgtctttcagagaaataaccgctttttccggaacattacagaacaatgcaatcttcgcacgttcgttcgccggaacagcgcgatctgaacgacaaatcaggatgtcaggctggataccgatggagagcagctcttttacagagtgctgagtcggtttggttttgacttcaccagacgctgccatgtacggcaccagcgtcaggtgcataaacagagtgtgctcacggccaatttcaacagccatctggcgaatcgcttcgaggaacggcaaggattcgatatcacctactgtaccgccgatttctaccagtactacgtcatgaccttcgccaccttccagcacgcgctctttgattgcgttagtgatgtgcggaataacctgcacggttgcgccgaggtagtcaccgcggcgttctttacgcagaacgtcagagtagatacgacccgtggtgaagttgttgcggcggctcattttggtacgaatgaaacgctcgtagtgccccaggtccaggtcggtttcagcgccgtcttcagtaacgaacacttccccgtgttggattgggctcatagtacctggatcgacgttgatgtaaggatccagtttcatgatggtcacattgaggccacgggcttcaagaatggctgcgagggaggctgcggcaatgcctttacccagagaggatacgaccccgccggtcacaaaaatatagttcgttgtcatgctgaacctgagaagttaggttgaaaagacgatggaataaccaagacgggaaagcagtatacccgaacatgacctgtgccacaaactttcattatccctcctcttcgccagcgcactattgaaatcaggagtgagaaaatagcccctttggggtaaatgtttttgacgcaaatcaagcgcttgtcatttaaaaaatgacacaaatggcgcttgaccgcgtaattcccttagagatcaatttcctgccgttttacctgttgccagacttcttccattgtttcgaggtcaacacctgtcatttccagtccacgcgcggcaacaatacgctccacttcgcgaaaacgacgctcaaatttttcgttcgctttttgcaatgcgatttccgcttttgtccctaaatgacgagccagattgaccgtggcaaacagcaggtcccccatttcctcctccagtttagcctggtcgacaacagcctgccgcgcttcgtacatcacctcgtcgatctcttcgtagactttatcgactaccggaccaagcgtcgtccaatcgaagccaacgttggcgcaacgtttctggattttttgcgcacgcattaaagccggtaaactacgaggaatatcgtccagcgccgaatgctgcgctttctgcgcgcgctcttcggttttgatttgctcccaacgggcaagcacttcactactgttttcggcagaactatcagcaaaaacatgcggatggcgacgctctaatttatcgctaatagcagcgcaaatatcattaaagtcaaagcgcccttcttcctgagccatttgcgcgtaaaacaccacctggaatagcagatcgcccagttcaccgcgaagatcgtcaaaatcttcacggggcgatggcgtccagcacttcgtaggtttcttcaagggtgtaaggcgcaatggtggcaaatgtctgctctttatcccacgggcagccgttttccggatcgcgcaggcgctgcataatagtgagcaaacggtcgatttgattcattgaattgtcctgaaaattgcgggtctgtcaggtggaaacctgtgaccagaatagaagtgagttagtaacactacccaatcagtacgttaattttggctttaatgagttgtaattcctctggggcaactgttcctttcttcgttgctcctcttgcccgccaggcgatactttttacctgatcagctaacgctacgccatcacgttcctgaccggataaaacaacttcgaacggatatccttttgattgcgttgtataaggaacacacagacacatacctgttttgttgttgtacatgaaaggactcaggacaacagctggacgatgtccagcttgctcgctaccttttgtcgggtcaaaatcaacccaaatcagatcgcccatatcgggtacgtatcggcttaccattaccagacttccttatctttcggctctccccagtcgatattctcgtggaggttttccggcgtgatgtcgttgaccagttcagcaagcgtaaatacgggctctttacgcactggctcaataattaatttgccatccaccaggtcaatcttcacttcatcatcaatattcagattgagcgcctgcattaacgtagccgggatccgcaccgccggtgaatttccccaacgctttacgctactgtggatcataaccctttcctcaaaccgctatcatatgtagatacagtatatatcaatctacattgtagatacgagcaaatttcggcctaactcccgtgcaaccgacgcgcgtcgataacatccggcacctggttgagtttacccagcacgcgccccagcacttgcaggttgtaaatctcaatggtcatgtcgatggtcgccagttgctgtttggtgtcgctacggctggcaacgccaagcacgttcaccttctcgttggcgagaatggtcgtgatatcacgtaacaacccactacgatcattagccaccacgcggaccaccagcgaatatccggcggagtagctctcaccccataccgcgtcaacaatgcgttctggcgcatgggagcgcagttccgccagttgttcgcaatcggcgcggtgtactgaaataccgcgcccctgggtaatgaagccgacaatctcatctccaggaatcggctggcagcagcgcgcgatgtggtgcatcaggttgccaacaccttcgaccaccacgcgaccgttatctttactgcggttttgcggcgtgtagcttttttgctgaagttgcttcagcgcggcggcgtcctgctcttcggcactcggcttattaaattgcgattgcaggaagttcaccatctgattgagacggatatccccgccaccaatcgccgccagcaactcgtcgacatcattaaagttgtaacgcggcagcagatgtttttctgcttctttcaggctgatccccagatgttccagctcgtcgtcaaggatttgccgcccagccagaatgtttttgtcacggtcctgtttacggaaccaggcgtgaattttcgaacgcccacggctggttgtgacgtaaccgaggtttgggtttaaccagtcacggctggggttcggctgtttctgggtgataatttcaatctggtcgcccatctgcagctggtaggtgaacggcacaatgcgcccgccaatttttgccccgatgcagcggtgtccgacatcactgtggatgtggtaagcgaagtccagcggcgttgatcccgcaggcaaatcaacgacatcacctttcggcgtaaagacatacacccggtcgtcaaagacctggctgcgtacttcgtcgagcatttcgccggaatcagccatctcttcctgccacgcaatcagtttacgcagccaggcaatccggtcttcatgtcccgaacgtgcgccgccagctgccgcgccctctttatatttccagtgcgcagcaacacccaactctgcatcttcatgcatctgtttggtgcggatttggatctcaacggttttgccacctggccccagaaccacggtatgaatagactgataaccgtttggtttcgggttagcgacataatcgtcaaactcatccggcaggtggcgatagtgagtgtgcactatccccagtgcggcataacaatcctgtaaacgctcggcgacaatacgtaccgcacgcacatcaaacagctcatcgaaggcgaggttctttttctgcattttgcgccagatactgtagatgtgtttcggacgaccatacacttcagctttaacgccttcagctttcatctcagcgcgcagatggccgacaaactcttcgatatagtgttcgcggtcgagacggcgttcatgcagcagttttgcgatgcgtttgtattcggtcgggtggagataacggaagcagtaatcttccagctcccatttcagttgcccaatcccaagacggttcgccaacggcgcgtagatattggtgcactcttttgccgccagtacgcgttcatcttccggcgcatcttttacttcgcgcagatgagcaatacgctccgccagtttgatgaccacgcagcgaaaatcatcgaccatcgccaataacatccggcgaacgttatcgacctgttcggaggaaacagaatcagtgtgcgtcgctttcagctggcggatcgccgccatatcacgcacgccgtgaataaggttaacgaccgacttaccgacgctctcacgcagcacatcttcgctgactacgttggcatcagccagagggaacagcagcgccgcccgcagcgtgtcaatgtccatacttaatgtcgagaggatctccaccatctcaacaccacgccacaataacagactggcatccggatgcccctgcgtctgttgcagacaatacgcccaggtttcggctaagcactcacacgacttctggctggtaatacccagacttgcgatccatttttccggatcaaattcaccagccttattgatatgtgcacttcttaccgcaaccattgtcctctcctttagggaccagacctgccgaaatcggcaaatcgtaactatttaacgcgcgagaaaagtaccatcgattccagatgtcccgtgtgtgggaacatatccagcatcgccagtcgcgcaatggtatatcctgcttttaataacgcttcgctatcccgagccagcgttgcagggttacaggatacataaactatacgaataggttccagttttataatttgctgcataacacctgcggcacctgctcgcgccgggtccagcaacactttatcgaagccgtttttcgcccacggctgctttgtgacatcttcttcaagattttcgtgataaaacgtcacattctgtaaaccattaagacgcgcattctgctggcctttttccaccagcgccggaacaccttctacaccgaccacactggctgcttgtttcgccaatggcagtgtaaagttgcccataccgcagaacagatccagtacgcgatcttcaggttgcacatccagccattccaacgcacgcgctaccattttttggttcacacccgcattgacctgaataaaatcgcgcgggctaaaagttaagcgcaacccgtttgagtcataccagggcatctcaccagagacggtttcgagtatctcactatcgggggcgagatacagatccaggccttcagaatgcgaaaagcgttccagtttttcgcgatctgccgaacttagcggtgcggtatggcgcaaaatcatcagcgtgccgctggttgcctgtaccagttcaacatgaccaagatggcgcataacttgtaagctgcccaggcatgccctgactttgggcagcaatgcttcaagtttgggcactaaaatggggcattgtttaacgtcgacaatgtcactggagcccgctttgcgaaagcccatctgaagttgctgtgttttcggtaagtagttcaaacttaaacgcgcgcgacggcgatagccccagggaacatcggcgatcacttcagagacttcgtgtttcattaatcgggcgagtgccgcacttttgcttcgctgctgtaaatccacgctggcgtgttgttgctgacagccaccgcatacgccaaaatgagggcagcgtggcgtttcgcgttccgggctatcgcttaaccggcgcacgactttagcgcgggcgtactgttttttatcttcagtaacagtaacttccgcgttttcctgtggcagtaatccaggaataaataacgctttgccgttatgtcgcgccacgccctgaccaaaagagtcgaggtcgttgactgaaacggttatgatctgacgcgtcgtcgtgcgtcgttttgcagagtagaattgcgccattggcgagactttctcaatttaacagtgtgaccttaattgtcccataacggaactccatgaccaactacagcctgcgcgcacgcatgatgattctgatcctggcaccgaccgtccttattggtttattgctgagtatctttttcgtcgtgcatcgctataacgacttgcagcgtcaactggaagatgccggtgccagcattattgagccgcttgcagtttctactgaatatggcatgagcctgcaaaatcgcgaatctatcggtcagttaataagcgtactgcatcgtcgccattccgatattgttcgcgcgatttcggtttatgatgaaaataaccgactctttgtcacctccaattttcatgatgctgccaacttactgatttagtgtatgatggtgtttttgaggtgctccagtggcttctgttctatcagctgtcctcctgttcagctactgacggggtggtgcgtaacggcaaaagcaccgccggacatcagcgctatctctgctctcactgccgtwaaacatggcaactgcagttcacttacaccgcttctcaacccggtacgcaccagaaaatcattgatatggccatgaatggcgttggatgccgggcaactgcccgcattatgggcgttggcctcaacacgattttacgtcacttaaaaaactcaggccgcagtcggtaacctcgcgcatacagccgggcagtgacgtcatcgtctgcgcggaaatggacgaacagtggggctatgtcggggctaaatcgcgccagcgctggctgttttacgcgtatgacaggctccggaagacggttgttgcgcacgtattcggtgaacgcactatggcgacgctggggcgtcttatgagcctgctgtcaccctttgacgtggtgatatggatgacggatggctggccgctgtatgaatcccgcctgaagggaaagctgcacgtaatcagcaagcgatatacgcagcgaattgagcggcataacctgaatctgaggcagcacctggcacggctgggacggaagtcgctgtcgttctcaaaatcggtggagctgcatgacaaagtcatcgggcattatctgaacataaaacactatcaataagttggagtcattacccccattttcatcttgatccctcatcaatgcagctcggcagcaacgtgccgtttcctcgccagctcactgtcactcgtgacggcgatattatgatcctccgcacgccgattatttctgagagttactcccccgacgaatcgcccagtagcgatgccaaaaatagtcaaaatatgttgggatatattgcgcttgagctggatcttaaatcggttcgcttgcagcaatataaagagatctttatttccagcgtgatgatgctgttttgtatcggtattgcgcttatttttggctggcgcttaatgcgcgatgtaaccggtccgattcgcaacatggtgaataccgtcgaccgcatccgtcgcgggcaactcgacagccgggtggaaggatttatgctcggcgagctggatatgctgaaaaacggtatcaactcgatggcaatgtcgctggctgcttatcacgaagagatgcagcacaatatcgaccaggcgacgtccgatctgcgtgaaacgctggagcagatggaaattcagaacgttgagttggatctggcgaaaaagcgcgcccaggaagcggcgcgtattaaatccgagtttctggcaaatatgtcacacgagctgcgtacaccactgaatggtgttattggctttacccgcctgacgctgaaaacagaattaacaccaacgcagcgcgatcacctgaatacgattgaacgttcggcaaataatttgctggcaattattaatgatgttctcgacttctcgaaactggaagcaggtaagctgattctggaaagtattccattcccactacgcagcacgctggatgaagtcgttactctgctggcacattcttctcacgataaagggttggaactgacgctcaatattaaaagcgacgtgcctgataacgtgatcggcgacccgctgcgattacagcaaatcatcactaacctggtggggaatgcaattaaattcaccgagaatggcaacattgatattctggtagaaaaacgtgcgctgagtaataccaaagtgcagattgaagtgcagattcgggataccggcattggtattcctgaacgcgatcaatcgcgcttattccaggccttccgacaggctgatgccagtatttcccgccgtcatggtggcaccgggctggggctggtgattacacaaaaactggttaatgaaatgggcggcgatatttcgttccatagccagccgaatcgcggttcaactttctggttccacattaatctcgatctgaacccgaacattattatcgaagggccatccacccagtgcctcgccggtaagcgcctggcctatgtcgaaccaaactccgcagcagcgcaatgcacgctggatattttaagtgaaacgccgctggaagtggtttatagcccaacgttctccgcgctgcctcccgcgcattacgacatgatgttgttaggcatcgcggtgaccttccgcgagccgctaacaatgcaacatgagcgattagcgaaagcggtatcgatgaccgatttcctgatgctggcacttccttgccatgcacaagtcaatgcagaaaaactcaagcaagatggtatcggcgcgtgtctgctgaaaccattaacacctacgcgcctgttgcctgccctgacggaattttgtcatcacaaacaaaacacgcttttgcctgtaaccgatgaaagcaagctggcaatgacagtcatggcagttgatgacaaccccgctaacctgaaacttatcggcgcattgctggaagatatggtgcaacatgtggaactttgcgatagcgggcatcaggcggttgaacgggcgaaacagatgccgttcgatttgatcttaatggatattcaaatgcctgacatggatggcattcgggcctgcgagctcatccaccagctcccccatcagcaacaaacgccggttatcgcggtaacggcgcatgcaatggccgggcaaaaagagaagctgcttggcgcagggatgagcgattatctggcgaaaccgattgaagaagagcgattgcataatttgttgttgcgctacaagcctggcagcggtatttcctctcgcgtcgtgacgcccgaagtcaacgaaattgtggtgaacccgaatgcgaccctcgactggcaactggcactacgccaggcagcaggaaaaaccgatttagcgcgcgatatgctgcaaatgttactcgatttcctgcctgaagttcgcaacaaagttgaggaacagctggttggagaaaacccggaaggcctggttgatttgattcataaactgcatggcagttgcggctatagcggtgtgccgcgtatgaagaatctctgccaactgatcgaacaacagctacgtagcggtactaaagaagaagatttggagccggagctgctggaactgttggacgagatggataatgtagcgcgcgaagccagcaaaattctcgggtaacggacgtcttgtcgagtagcaatcggctttttatgacgctggtttcagattggtgacaaagtgcctgtgtttatgccggatgcggcgttaacgccttatccggcctacaaaaccaattaaattcaatgaattaaaaaatgatgtagacctgatacatagcacaacaggctattttgcgtttagcatcagtctcaagccggctccagatagagccggttttggttttctgtcttaacgcaccatgcacgggcgcttgttatcgaacgtccagccaggaatcagatactgcattcccatcgcatcgtcacgcgcgccaagcccgtgtttctgatacagctcatgagctttcatcacttgatccatatcgatttctacacccagccccggtttttccggcacctgaaccagaccgcctttgatctcaaacggttctttggtcaagcgctgattgccttcctgccaaatccagtgcgtatcaatcgcggtgattttacccggtgcagcggcggcaacatgggtaaacatcgccagggaaatatcgaagtggttgtttgagtgtgaaccccaggtcaggccaaattcatggcacatttgcgccacacgtaccgaaccttgcatcgtccagaaatgcggatccgccagcgggatatcaacggattgcagggagagcgtatggcccatctgccgccagtcggtggcgatcatattggttgcggtcggcaggccagttgcgcgacggaactctgccatcacttcacgcccggagaaaccttgctccgcaccacacggatcttctgcataagccagcgaccctttcaggtatttaccaattttaatcgcttcgttcagcgaccaggcaccgttaggatcgagcgtaatacgcgcctgcgggaagcgttgcgccagtgccacaatagactcggcctcttcttccccggccagtacaccgcctttcagtttgaaatcgttgaagccatatttttcatacgccgcttccgccaggcgcaccaccgcatccggcgtcatcgcttcttcatgacgcaggcgataccagtcgcatgagtcatccggctggctttgatacggcagcggtgtggctttgcgatcaccgacgaagaacagataaccgagcatttcgacttcgctacgctgttgaccatcgcccagcagggatgccacgtttacccccagatgctgccccagcagatccagcattgccgcttctatcccggtaactacatgaatagtggtacgcaaatcaaatgtctgcaaaccgcgcccaccagcatcacgatcggcaaaagtattacgcaccagcgtcagaacgtttttgtattcacccagcgttttacctaccaccagcggaatcgcatcttccagcgttttacggattttctcgccgccgggaatttcccctacgccagtgtgaccagaattatctttgataatcacaatattacgcgtaaagaacggtgcgtgtgcaccactcagattcatcagcatactgtcatgacccgccaccgggatgacctgcatttcagtaacaacaggcgtcgtaaattgagaactcatatttatgtcctttttcagaatcaatgacggccgaaaacgggacgtttacggtcaaaggtccagccggggatcaggtactgcatcggacctgcgtcgttacgcgcaccgacaggcagacgtttataggcctcatgtgccttttgtacctgttcccagtccagttccacgcccagaccgggcgcatcaggaacggcaatttttccgtttttaatctccagcggatttttggtcaggcgacaatcgccctcctgccaaatccagtgggtatcgatagcggtaggattacccggtgccgccgcgcccacatgggtaaacatcgccagagagatatcgaaatggttattagaatggcagccccaggtcagcccccagtcgtcgcaaagctgcgccacacggactgcaccggaaagcgtccagaagtgcggatcggcaagtggaatatctaccgcattgagcatcaccgcatgacccatttcgcgccagttggtggcgatcatgttagtcgcgacgggcaagccggtcgcccgccgaaactccgccataacttcacgaccggagaaaccctgttctgcgccgcatggatcttcggcataggtaagaacatcattcagccctttgcatagagaaatggcttcatcaagtagccaggcaccgttgggatcaacggtaatccgcgcatcagggaagcgtttcttcaatgcacgaacagtgtcgatttcttgctcgccaggtaacaccccgcccttaagtttgaaatctttaaagccatagcgatcctgtgaggcttccgccagacgcacaacggcttcgctgttcatcgctttctgatggcgcaactgataccactcatggttgcccggcgtattttccagataaggaagatcggttttggtccgatcaccgatataaaacagataaccgaggacggtaatagtctcgcgttgcttgcctggccccaacagttcgcagaccggaacattcagcgccttacctagcaggtcaagcaaggcggcttacagcgccgccacggcattaacgcgcaattcaaaagtccaggcacctttgccgaaggtatcaaaatcggctgcctgattacctttatgcacctgctgaaccactttattcaggcgcgcaacttcctggcccagaaccatcggaatagcatcgaccagtgtttgataaatcacctctccgcccggcgcttcaccaatgccggtatgcccggcgttatcggtgagtaccacaatattgcgggtgaaatatgcgttatgtgccccaccaatattaagcaacatgctatcgtgcccggcgaccggaatgactttcatatcagtaataacaggactggattgtgtcgtcatcttattgccccgcgacaggtttcagctcgatacgcttgatatcgcccaccagcaccaggtagctcagtaccgcgattaaggcatgaacaccaacataaatcagcgccccattaaaggagccagtcgtgccaacgatataaccaattgcgattggcgtgacgatgccagaaatgttaccgaacatgttgaacaggccaccggaaagaccgctgatctcttttggcgcggtatctgccattactgcccaacccagcgccccgatgcccttaccgaagaaggccagcgccataaagccgatgatcatccactcaacgttgacgtagttgcagaacaccatcaccatcgacagcaacatgcccattacgatcggtgttttacgcgcaatgttcagcgatcccgtgcggcgcatcagccagtcggaaataatcccacccagcacaccgccgataaaaccgcaaaccgccggaacggaagccacaaagcccgctttcagaatcgacatcccacgcgcctgcaccagataaaccggaaaccaggtaatgaaaaagtaagtcagggcgttgatacagtactgaccgatataaacgccgatcatcatccgtgacccgagcagttgtttgatctgcccccacttcacgctgaacggcactttaactttggtgttttgctgatccatattgatcagcgcgccacccgcggcgatgtactccagctctttctgatttacccccggatgttgatttggctcgtggatgactttcaaccagataaagctgatgacaatccccagaccgcccataaagaagaagacgtgtgaccagcccacttcatgcgtcagccagcccataatcggcgcgaagatcaccgttgcgaagtattgagcggagttaaaaatcgacaccgccgttcccctttcctgcgccggaaaccaggccgcaacaatgcgactgttgccggggaaagatggcgcttcagcaagcccgaccaggaagcgcagagtaaacagggcaacgataatgccgaatccactaaagatatcgacgaagccttgcagcaaggtaaacatcgaccagataaagatcgaccagaagtagacgcgttttgaaccaaaacgatccagcaaccaaccaccagggatctgcccgataacataagcccatgagaaggcagagaacacatagcccattcccacgggatcaaggccgatatctttggccatttccgaaccggcaatagaaagcgtagcgcggtcgccgtagttgaaggatgtgacgataaacaacatcaccactatccagtaacgagcattcgtgcgtttttccacactgctcgcagcctgacttaaagaactcattgttgcactcctgaaaattcgcgttagccacgctcactctggactgcgacatagccaggaaatcagaggtgacgtagggtgttttttgccgtttttataggtcgttcgccgaatacggcgcgtgtttatatctggcaatagcagtataaaaagcgcgccatagcggctcaccgtgcaacaacacaacattaatgcgttcaatgaggcccgattttggcattagccctggacggtggaatccacttcacggaaatgaaaacaagaacaagaaaggaagggttaaaacgaagaaataaagaagagtatgaaatggatcgcttgactccaggcaaacgccagtaaaaatccgcgctatgaagcagtttttactggcatttgcctgaaaatattcgattcagcaccgctaaaacgacatttaccgctcgctgaacatatcaggacaacagcgtgccccactgttcgacccacggatttgattccgtttccggttccgggttctcactggcgtcaatcaacagcatttcgccaacccgctgagcgctctgttcctgcaacaaggcatcgaactgtttgccgccattgcagaaatttacataactgctgtcgccgagcgcaatcacgccataacgcagattcggctggaagcccagactatctttgattccctgaaagagcggcacaatgctatcaggaaggtcgccctgcccggtcgtggacgtaaccaccagaacatacttatcctgatagggcagccagtcgcttaattcaggatcttcaaataccgttgctttgtggccctgtgcggtcagaattgcttctgcttcttccgccactaacagcgaatttccgtacatggtgccgacaaaaataccaatttccgccataccgttttctccctggattaggaacttatctctccatcctgacccgatggcgcactgaactcaaccctttcattttcaggaagcagaccgcgccagccaaattgtgataacgcctgcatccaggtgtcgtccaggcccgcgtgaatagtcagcggctcgccagtaaaaggatgcgtcaatgacaactgactggcatgtagcattaaccgctggaggccaaaatgctcagcaccgctgcgattctggcgtaaatcgccatgtttgctatcgccaataatcggatgacgcaaatgggcaagatgtcggcgaagctgatgtttgcgtccggttttcggctccagttccaccaggccgtagcgcgtggtcgggtaacgtccggtcgctaccggcatttctacggtcgccagaccgcgataatgcgtcactgctggctgcgagcctttatcttcgcgggcaaatttatcagcgattttgtccagttcttccaccagtggataatccagaactgcttcttccatcaaccagccgcgcacaatcgcatggtaacgtttctggatttggtgctgttcaaactgttgtgccagcagccgtccggcctcgctggataatcccatcaacaacacaccagaagtgggtcggtccagacgatgagcggtaaaaacgtgctggccaatctgatcacgcacggtttgcatgaccactactttctcgtcgcgatccagccagctgcggtgaaccagccagccggagggtttatttaccgcaaccagccattcatcctgatagagtatttccagcattagctcgcatcatccgcaaaaagagcatccagtttttccagctcagccagaataagcgcgcgttgcggatggtccgtcgccagcgccatttcataatagggtgcaacggcaaaagcgcccggtaacggctgtttgttatctaacaaatcgtgcattcgcgggatcagcacccactgcaaccactccagtggttccatggtgtccataaagaacggttgggtactattaaattgatgcggctggggttcatcgtttcgccagtgctgatgttcacgcagtaacgcttcaagcgcctgcaactggagacgaacgcggtcatgagtggtcataaagcaacctcaataagaaaaactgccgcgaaggatagcaggaataaaaaaagggagcactgtattcacagcgctcccggttcgtttcgcagcattccagctacttttgttgctccctgctcatccttgacaacttttcctctggccttgcggccaatcgttcatcctgaactattgcttcctgctcacaccaccccgatgtgatacttcatcctgaagtgtccctggccttcctgacccaccgaatcatcctgaccggttctcattctccatcctggaggtgtcctttaacgcgtcctgcgtcatcctcttcgcttcatccagaagcctttccctgaaacaccatcctggtgtgtcctgcagaagtgtcatcatcctgatgttcacttcgttgtctgactccctgtcgacgaagatagaatcgtctttttcgcgaagtcttacaaggcgcttacagacaatgccttaaggaaaatttcatatgaaagttaagaattaacaatcaacattttgattttaaatgaaaataacgattcttatctttttaagtattcgcttatttcctggcgatctcctacagagtctgtaagagatctctcacaaccagatggggtatttggattacagaagaggcttaagttgattaaggaattccgcaagatttgaggctaaatgcgtccgtttacgtgttcccagcgtctctttgcacacttcaccggagagattacacaccgagatgacctctaactcttcttccagcgtcgcgataaatagcgtgggcggcagttttagccttttctgagtcaccagatgaccaatcagattttcctgcacccgacggaagtcgtcttcactccaggtttgcagcaatgtcagtttgatatcgccaaactgcgcgtgcatatccccggcaaactgagtcgtataaaaggtatgaattgtgggttgtatcacaatatcaaaagcgcgttcaaccgcgtttacattttgttccccggtaaacggctggggttgccagtatacggcatcttcggtagttgaaataatgcacggtgaaggaacaccgtacagttcctcacttaacggccagcttttatgctcttcatgccacgcatcgcagtagcgtgcagtaaaatctttcagggcttgtgcggtcaaatcgtccactaatttctctcttcacttaaaccagatacacttgtcgtttagtttatctggtttatgacggtgaaacatgtcttcttatgcaaaccatcaggcacttgcgggcctgactcttggaaaatcaaccgattaccgggatacctatgacgccagcctactgcaaggcgttccacgcagcctgaatcgcgacccgctgggtctgaaagcggataacctgccttttcacggtacggatatctggacgctgtatgaactttcctggctgaatgcgaaaggtttgccgcaggtcgctgtcggtcatgttgaacttgattacaccagcgtaaatctgattgagtcgaagagttttaagctctatctcaacagttttaaccagacgcgttttaataactgggatgaggtgcgccagacgctggagcgcgacttaagcacttgcgcccagggtaaggttagcgtggcgttatatcgtcttgatgaactggaaggccagccgataggtcatttcaatggcacctgcattgatgaccaggatatcactatcgataactatgaattcactactgactatctggagaatgccaccagcggtgaaaaagtagtggaagagacgcttgtcagccacctgctgaaatcaaactgcctgatcacccatcaaccagattggggttcgatccaaattcagtatcgtggacgccaaattgacagagaaaaactgctgcgttacctggtctcattccgtcatcacaacgagttccacgaacagtgcgtggaacgcatctttaatgacctgttacgcttctgccagccagagaaattaagcgtttacgcacgttatacccgtcgtggcggtctggacattaacccgtggcgcagtaatagcgattttgtcccatcgaccacaagactggttcggcaataaattttttctcaattttgcgtgctggattcacgcagaaggttgtgaaaggtcatcaggcagggctattgtaatcaaagggaatgacgatattcgtcccataaggagtttttcttgattacacatattagcccgcttggctccatggatatgttgtcgcagctggaagtggatatgcttaaacgcaccgccagcagcgacctctatcaactgtttcgcaactgttcacttgccgtactgaactccggtagtttgaccgataacagcaaagaattgctgtctcgttttgaaaatttcgatattaacgtcctgcgccgtgaacgcggcgtaaagctggaactgattaatcccccggaagaggcttttgtcgatgggcgaattattcgcgctttgcaggccaacttgttcgcggttctgcgagacattctcttcgtttacgggcaaatccataataccgttcgttttcccaacctgaatctcgacaactccgtccacatcactaacctggtcttttccatcttgcgtaacgctcgcgcgctgcatgtgggtgaagcgccaaatatggtggtctgctggggcggtcactcaattaacgaaaacgagtatttgtatgcccgtcgcgtcggaaaccagctgggcctgcgtgagctgaatatctgcaccggctgtggtccgggagcgatggaagcgccgatgaaaggtgctgcggtcggacacgcgcagcagcgttacaaagacagtcgttttattggtatgacagagccgtcgattatcgccgctgaaccgcctaacccgctggtcaacgaattgatcatcatgccggatatcgaaaaacgtctggaagcgtttgtccgtatcgctcacggcatcattatcttccctggcggtgtgggtacggcagaagagttgctgtatttgctgggaattttaatgaacccggccaacaaagatcaggttttaccattgatcctcaccggcccgaaagagagcgccgactacttccgcgtactggacgagtttgtcgtacatacgctgggcgaaaacgcgcgccgccattaccgcatcatcattgatgacgccgctgaagtcgctcgtcagatgaaaaaatcgatgccgctggtgaaagaaaatcgccgcgacactggtgacgcttacagctttaactggtcaatgcgcattgcaccagatttgcaaatgccgtttgagccgtctcacgagaatatggctaatctgaagctttacccggatcaacctgttgaagtgctggctgccgacctgcgccgtgcgttctccggtattgtggcgggtaacgtaaaagaagtcggtattcgcgccattgaagagtttggtccttacaaaatcaacggcgataaagagattatgcgtcgtatggacgacctgctacagggttttgttgcccagcatcgtatgaagttgccaggctcagcctacatcccttgctacgaaatctgcacgtaatctccgctcccccggtgacgtttgttgccgggttttctcgtttttggtcacttactcatcaactcatttcatttgttatatgaatgtttcttaccaccctcacgcgacaaatatcatcacagttaatatgtcatacaatttatgttgcaacgcaaacgtttccctattttcataaaccgtattttatcgctatgaaaaagaaattatcgccatgattaactaaaagtattgattttttcagttcaacctacatatattgcgcgccccggaagaagtcagatgtcgtttaatgggcaaatattgcccttaaattctcttttacttttgatttacagagtaaagcgttgggataatctatcttccaagtagattattgtatttgagatcaagatcactgatagatacataacttgtgtgtatctttccgccctcaaattattacggcggtaaatgattaagccatcgccgatagacagatttcatttttacggtcaggcaccttcccgggctgaactggctaaaagctgaattatttgcattcctccaggagaaatagatggaaacgactcaaaccagcacgattgcgtcgaaagactctcgtagtgcctggcgcaagacagacaccatgtggatgctgggcctttacggcacggcaatcggcgcgggcgtgctgttcctgccaatcaacgccggtgttggcggtatgatcccgctgatcatcatggctatccttgcgttcccgatgacgttttttgctcaccgcggcctgactcgcttcgtactgtctggtaaaaacccgggcgaagacatcaccgaggttgtagaagaacactttggtattggcgcaggtaaactgattaccctgctctacttcttcgctatctacccgatcctgctggtttatagcgtggcaatcaccaataccgttgaaagcttcatgtctcaccagctgggtatgacgccaccgccgcgtgcgattctgtcgctgatcctgatcgtgggtatgatgaccatcgttcgctttggtgagcagatgatcgttaaagcgatgagtattctggtattcccgtttgttggcgtactgatgctgctggctctgtacctgatcccgcagtggaacggcgcagcactggaaacgctgtctctggacactgcatctgcaaccggaaacggtctgtggatgaccctgtggctggcaattccggtaatggtgttctcgttcaaccactctccgatcatctcttctttcgccgttgcgaagcgtgaagagtacggcgatatggcagaacagaaatgctcgaagatcctggcattcgcacacatcatgatggtgctgaccgtaatgttcttcgtcttcagctgcgtactgagcctgactccggcagacctggctgcggctaaagagcagaacatctcgattctgtcttacctggctaaccactttaacgcaccggttatcgcgtggatggctccgattatcgcgattatcgctatcaccaaatccttcctcggccactacctgggcgcacgtgaaggcttcaacggtatggtgattaaatctctgcgtggtaaaggtaagtctatcgaaatcaacaagctgaaccgtatcactgcgctgttcatgctggtaacgacctggattgttgccaccctgaacccgagcatcctgggtatgattgaaaccctgggcggcccaatcatcgcgatgatcctgttcctgatgccgatgtacgcaattcagaaagtaccggcaatgcgtaagtacagcggtcacatcagcaacgtattcgttgtcgtgatgggtctgattgcaatctccgcaatcttctactctctgttcagctaagtcctttcgcgccgctttcgggcggcgcttcctccgttttaacgcgatgtatttcctatgattagcgtattcgatattttcaaaatcggcattggcccttccagttctcataccgttggaccaatgaaagcgggtaaacaatttaccgacgatctgattgcccgtaatctgcttaaagacgtgacccgcgtggtggttgacgtgtacggctcgctctctctgaccggtaaaggccaccacactgatatcgccattattatgggcctggcgggtaacctgccggataccgtggatatcgattccatccctggttttattcaggatgtgaatactcatggtcgcctgatgctggcaaacggtcagcatgaagtggagttcccggttgatcagtgcatgaacttccatgcagacaacctttctctgcatgaaaacggtatgcgcattaccgcgctggcgggcgataaagtcgtttacagccagacttactactctattggcggtggctttatcgttgatgaagagcattttggccagcagaatagcgcaccggttgaagttccttatccgtacagttcagcagccgatctgcaaaaacattgtcaggaaaccgggctgtcactctctggcctgatgatgaaaaacgagctggcgctgcacagcaaagaagagctggaacagcacctggcgaacgtctgggaagtcatgcgcggcggtattgagcgcggtatttctaccgaaggcgtgttgcctggcaaactgcgcgtaccacgccgtgctgcggcactacgccggatgctggtcagccaggataaaaccaccactgacccgatggcggttgttgactggatcaacatgtttgcactggcagtgaacgaagagaacgccgctggcggtcgcgtggtgactgcgccgactaacggtgcgtgcgggattatcccggctgtgctggcgtactacgataagtttatccgcgaagtgaacgctaactcactggctcgttacctgctggtagccagtgccattggttctctttataagatgaacgcgtcaatttctggtgctgaagtcggctgccagggtgaagttggtgtggcgtgctcaatggcggcggctggtctggcagaactgttaggtgcaagcccggcgcaggtgtgcatcgcggcggaaatcgccatggagcacaacctcggtctgacgtgtgacccggtcgccggacaggtccaggtgccatgcatcgagcgtaacgccattgcggcagtaaaagcggtgaacgccgcacgtatggcgctacgccgtaccagcgagccgcgcgtctgcctcgataaagttatcgaaaccatgtacgaaacaggtaaagatatgaacgccaagtaccgcgaaacctctcgcggcggcctggcaatgaagatcgttgcctgcgattaatcgctctccagaggcctcgttttgcgaggcctcttcccgatttctcatccagccgtagcctgttccggcatcgaatgttacccttatcgcctgatctttaagggggttatcgtggctgttcatttgcttattgtcgatgcactgaatcttattcgtcgcattcatgccgttcagggatcgccctgtgtcgaaacctgccagcatgcgctcgatcagctcattatgcacagccagccaacccacgcggtcgccgtttttgatgatgaaaaccgcagtagcggctggcgtcatcagcgtttaccagattacaaagcgggtcgaccgccaatgccggaagagttgcacgacgagatgcctgcattacgcgccgcctttgagcaacgcggcgtcccgtgctggtcaaccagcggcaacgaagccgatgacttagccgccacgctggcggtcaaagtgacacaggccgggcatcaggcaacgattgtttcgacagataaaggctactgtcagttactttcaccgacattacgtattcgtgattacttccagaaacgttggctggatgcgccatttatcgataaagaatttggcgttcaaccgcagcagttgcccgattactggggacttgcggggatcagcagttcaaaggtaccgggtgttgcgggaatcggaccaaaaagcgccacgcagctgctggtcgagtttcagagtctggaagggatatatgagaatctggatgcggttgccgaaaagtggcgcaaaaaattagaaacccataaagagatggcgtttctgtgccgcgatattgcccgcttacaaaccgatttgcatatcgacggcaatttacagcaattgcggttggtacggtaacggcgagccggatacgccgcaaacgtcgtatccggcattatcacatcagcgcatttaccaggcggtatggtaaagctctacaatatcctcaagcgttgcttcacgcgggttgccaccggtacaaacatcatccagtgccgcctgcgccagtgccggaatgtcttccttgcgtacaccaacatcacgcaaatgtggcggaataccgacatcacggttgagagcaaacaccgcttcaacagcggcattacgcgcctcttccaggctcataccttccactttcacgcccataacgcgcgcgatatcgcggtacttctcaccggtaaagtcagcgttatagcgcatgacatgcggtaacaggatggcgttcgcaacaccgtgtggagtgttgtaaaacgcgcccagtggatgcgccataccatgcaccaaccctaacccaacattcgagaagcccatacccgcaacatactgcccgagcgccatttcttctccggcatccttatcaccagcaaccgatcctcgcagcgccccagcaatgatttcaatcgctttaatgtgcagtgcatcggttagcgcccacgcgccacgggtaatatacccctcaatagcatgagtgagcgcatcgacacccgtcgcagctttcagcgctggaggcataccatccatcatgtcagcgtcaataaacgccacctgcgggatatcatgcggatcaacgcaaacaaacttgcgccgtttctcttcgtcagtgatcacgtagttaatggtcacttctgccgcagtacctgctgtggtaggaattgccagaatcggtacactgggtttattggtcggggaaagcccttccaggctacgcacatcggcaaactccgggttgttgctgataatgccaatcgctttacaagtatcctgtggagaaccaccaccaatagcgatcaggtaatccgcgccgctattctggaatacaccgagcccttctttgacgacagtaattgttgggttgggcactacgccgtcgtaaatcgcccatgccagccctgcagcatccatcttatcggtcactttcgccaccacgccgcattgcaccagcgttttatcggtgacgatcagcgccttctgataaccacggcgtttcacctcatcggttaaagccccaacagcaccccgaccaaaccatgccgtttcgttcagaatcattctgttagccatcatccttctccttgttgctttacgaaattactcttcaatccgtaacccataggttttgaatttctccagcactacggcaatctcttcatcgctcagcactggcaccgggtccgtaatcgccagggtcgtcaggtaaagttgcgccagcacttcaacttcatgcgccagccataacgctttttccagattcacctcacaagcgataagcccatgatgttgtaacaaagttgccttacgatttttgagagcctgcgcaacatgttcagaaagttcacgtgttccaaaggtcgcataaggcgcgcaaggaatagaattaccgccagccgccgcaatcatgtagtgaatagcggggatcgatcggttaagaatggaaactgccgtgcaatgaacggcatgattgtgaacaaccgcgttggcatccggtctgctttgataggccgccatatggaaacgccattcgcttgaggggagctttccttcctcatgtttaccgttgccatcaataaagacaatatgcgactccgtcagtttttcatatggaatgcctgtaggcgtaatcagcatcccatcctgataacgtacactgacgttccccgctgtcccctggttcagtcctaggcgggtcatttccaggcaagtgtcaataatctgacgagcaagtttatttcgttccattagctacctctctctgattcaaaacagggcaataatgttgttcctttcacactattgaattagccgtttaattacccaccatcttcttcctgattaaccagaaagaaattcacaagcttatattttgtgacctggttcaactaatcacagtaaataactgcaagttctctttttataaccccattaaaaatgaccgctcttaaaaatatttatcaaaacggtcatttttctattcactcaagccaggaatgcccgttttcggcataaacaattaatacggtcatctggtttgtgttttttatgatttattttctgaaacgggcatgaaatttcgattattaaagtgatggtagtcacataaagtcaccttccagctaataagtgtgaccgccgtcatattacagagcgttttttatttgaaaatgaatccatgagttcatttcagacaggcaaatattcactgatatgaagcccgaactcgctggttttgcacttttgaaaacataaccgattacgtgcttaagcttctgaacctaagaggatgctatgggaaacacatcaatacaaacgcagagttaccgtgcggtagataaagatgcagggcaaagcagaagttacattattccattcgcgctgctgtgctcactgttttttctttgggcggtagccaataaccttaacgacattttattacctcaattccagcaggcttttacgctgacaaatttccaggctggcctgatccaatcggccttttactttggttatttcattatcccaatccctgctgggatattgatgaaaaaactcagttataaagcagggattattaccggattatttttatatgccttgggcgctgcattattctggcccgctgcagaaataatgaactacaccttatttttagttggcctatttattattgcagccggattaggttgtctggaaactgccgcaaacccttttgttacggtattagggccggaaagcagtggtcacttccgcttaaatcttgcgcaaacatttaactcgtttggcgcaattatcgcggttgtctttgggcaaagtcttattttgtctaacgtgccacatcaatcgcaagacgttctcgataaaatgtctccagagcaattgagtgcgtataaacacagcctggtattatcggtacagacaccttatatgatcatcgtggctatcgtgttactggtcgccctgctgatcatgctgacgaaattcccggcattgcagagtgataatcacagtgacgccaaacaaggatcgttctccgcatcgctttctcgtctggcgcgtattcgtcactggcgctgggcggtattagcgcaattctgctatgtcggcgcacaaacggcctgctggagctatttgattcgctacgctgtagaagaaattccaggtatgactgcaggctttgccgctaactatttaaccggaaccatggtgtgcttctttattggtcgtttcaccggtacctggctcatcagtcgcttcgcaccacacaaagtcctggccgcctacgcattaatcgctatggcactgtgcctgatctcagccttcgcaggcggtcatgtgggcttaatagccctgactttatgcagcgcctttatgtcgattcagtacccaacaatcttctcgctgggcattaagaatctcggccaggacaccaaatacggttcgtccttcatcgttatgaccatcattggcggcggtattgtcactccggtcatgggttttgtcagtgacgcggcgggcaacatccccactgctgaactgatccccgcactctgcttcgcggtcatctttatctttgcccgtttccgttctcaaacggcaactaactgaacatattttccgaataaagtgaggaatctgtaatgaaaaaaatcagcttaccgaaaattggtatccgcccggttattgacggtcgtcgcatgggtgttcgtgagtcgcttgaagaacaaacaatgaatatggcgaaagctacggccgcactgctgaccgagaaactgcgccatgcctgcggagctgccgtcgagtgtgtcatttccgatacctgtatcgcgggtatggctgaagccgctgcttgcgaagaaaaattcagcagccagaatgtaggcctcaccattacggtaacgccttgctggtgctatggcagtgaaaccatcgacatggatccaacccgcccgaaagccatttggggctttaacggcactgaacgtcccggcgctgtttacctggcagcggctctggcagctcacagccagaaaggcatcccggcattctccatttacggtcatgacgttcaggatgccgatgacacatcgattcctgccgatgttgaagaaaaactgctgcgctttgcccgcgccggtttggccgtcgccagcatgaaaggtaaaagctatctgtcgctgggcggcgtttcgatgggtatcgccggttctattgttgatcacaacttctttgaatcctggctgggaatgaaagtccaggcggtggatatgaccgaactgcgtcgccgtatcgatcagaagatttacgacgaagccgaactggaaatggcactgacctgggctgataaaaacttccgctatggcgaagatgaaaataacaaacagtatcaacgcaatgccgagcaaagccgcgcagttctgcgcgaaagtttactgatggcgatgtgtatccgcgacatgatgcaaggcaacagcaaactggccgatattggtcgcgtggaagaatcacttggctacaacgccatcgctgcgggcttccaggggcaacgtcactggaccgatcaatatcccaatggtgacaccgccgaagcgatcctcaacagttcatttgactggaatggcgtgcgcgaaccctttgtcgtggcgaccgaaaacgacagtcttaacggcgtggcaatgctaatgggtcaccagctcaccggcaccgctcaggtatttgccgatgtgcgtacctactggtcaccagaagcaattgagcgtgtaacggggcataaactcgatggactggcagaacacggcatcatccatttgatcaactcaggttctgctgcgctggacggttcctgtaaacaacgcgacagcgaaggtaacccgacgatgaagccgcactgggaaatctctcagcaagaggctgacgcttgcctcgccgctaccgaatggtgcccggcgatccacgaatacttccgtggcggcggttactcttcccgcttccttaccgaaggcggcgtcccgttcaccatgacccgtgtcaatatcatcaaaggcctgggaccggtactgcaaatcgcggaaggctggagcgtggaattgccgaaggatgtgcatgacatcctcaacaaacgcaccaactcaacctggccaaccacctggtttgcaccgcgcctcaccggtaaagggccgtttacggatgtgtattcggtaatggcgaactggggcgctaaccacggggttctgaccatcggccacgttggcgcagactttatcactctcgcctccatgctgcgtatcccggtatgtatgcacaacgttgaagagaccaaagtatatcgtccttctgcctgggccgcgcacggcatggatattgaaggtcaggattaccgcgcttgccagaactacggcccgttgtacaagcgttaatacattactccctgatgtgatgcccggtcgctccggctaccgggcctaaacaagcaagagtggttagccggataagcaatgttatccggctatattgcaggagcgattatgaaacaagaagttatcctggtactcgactgtggcgcgaccaatgtcagggccatcgcggttaatcggcagggaaaaattgttgcccgcgcctcaacgcctaatgccagcgatatcgcgatggaaaacaacacctggcaccagtggtctttagacgccattttgcaacgctttgctgattgctgtcggcaaatcaatagtgaactgactgaatgccacatccgcggtatcgccgtcaccacctttggtgtggatggcgctctggtagataagcaaggcaatctgctctatccgatcattagctggaaatgtccgcgaacagcagcggttatggacaatattgaacagttgatctccgcacagcggttgcaggctatttctggcgtcggagcctttagtttcaatacgttatataagttggtgtggttgaaagaaaatcatccacaactgctggaacgcgcgcacgcctggctctttatttcgtcgctgattaaccaccgtttaaccggcgaattcactactgatatcacgatggccggaaccagccagatgctggatatccagcaacgcgatttcagtccgcaaattttacaagccaccggtattccacgccgactcttccctcgtctggtggaagcgggtgaacagattggtacgctacagaacagcgccgcagcaatgctcggcttacccgttggcataccggtgatttccgcaggtcacgatacccagttcgccctttttggcgctggtgccgaccaaaatgaacccgtgctctcttccggtacatgggaaattttaatggtccgtagcgcccaggttgatacttcgctgttaagtcagtacgccggttccacctgcgaactggatagccaggcagggttgtataacccaggtatgcaatggctggcatccggcgtgctggaatgggtgagaaaactgttctggacggctgaaacaccctggcaaatgttgattgaagaagctcgtctgatcgcgcctggcgcggatggcgtaaaaatgcagtgtgatttattgtcgtgtcagaacgctggctggcaaggagtgacgcttaataccacgcgggggcatttctatcgcgcggcgctggaagggttaactgcgcaattacagcgcaatctacagatgctggaaaaaatcgggcactttaaggcctctgaattattgttagtcggtggaggaagtcgcaacacattgtggaatcagattaaagccaatatgcttgatattccggtaaaagttctcgacgacgccgaaacgaccgtcgcaggagctgcgctgttcggttggtatggcgtaggggaatttaacagcccggaagaagcccgcgcacagattcattatcagtaccgttatttctacccgcaaactgaacctgaatttatagaggaagtgtgaaatgctgaaaacaatttcgccgttaatttctcccgaactattgaaagtgctggcagagatgggacatggagatgaaattattttttccgatgctcactttcccgcccattcgatgggaccgcaggtgatccgcgctgatggcctgttggtgagcgacttgctccaggcgattatcccgttatttgaactggacagttatgcaccgccgctggtgatgatggcggcggtagaaggtgacactctcgatcctgaagtagaacgacgttaccgtaatgcgctttcactacaagccccgtgtcctgacatcatccgcatcaatcgttttgcgttttatgaacgggcgcaaaaagcctttgcgatcgttatcacaggcgaacgagcgaagtacgggaatattcttttaaaaaaaggggtaacaccgtaatctcataccggtacgcccgcatgacgcgggcggttatcgaatgatggggtgaaaaatatgaaagcggcacgccagcaagcgatagtcgacctgctgctgaaccataccagcctgaccacggaagctctctctgaacagctaaaggtcagtaaagaaaccattcgtcgcgatctcaatgaattacagacgcagggtaaaattctgcgcaatcatggacgcgctaaatatatccaccgtcaaaatcaagacagtggcgatccctttcacatcaggctgaaaagccattatgcgcataaagcagatatcgcgcgcgaggcgctcgcgtggattgaagaagggatggtgatagccttagacgccagttcaacttgctggtatctggcacgccagttgcctgacatcaacattcaggtcttcaccaatagccatccgatttgccatgaactcggtaaacgcgaacgcattcaactgatcagttccggcggcacacttgagcgcaaatatggctgttacgtcaatccctcgctgatttcccaacttaaatcgctggaaatcgatctgtttattttttcttgtgaagggatcgatagcagcggcgcactgtgggactccaatgcgatcaacgctgattacaaatcgatgctattaaaacgtgccgcgcaatcgttgttattgattgataaaagtaaatttaatcgttcaggggaagcccgcatcgggcatctggatgaggtaacgcacattatttctgatgagcgccaggttgcaacttctttggtaacagcctgacggaaagggtagcaggccggagacgacgccccggccttgcctgttatcgctcgtcgcgacgaccacccaccgcagcccagatgcggcggacgtgcaccgtcacttcttcgcgatcgtgatacaactgccgcgcctgaatctgagcatttatgccatgttcatcaagctgtgcctgaatatacgccagattgtgtgacacttcttcgtagcgttttttcatcggcagtttgaggttgaaaatggtttcacggcaccagccattaaccagccactgcgccatcaatgccgcaactttcgccggtttttcaaccatatcgcataccatccaggagatattgctgcgcgtcggacggaatttgaaaccgtcttcccgcagccacgtcacctgtccggtatccatcagactttgcgccatcgggccgttgtcgacggaataaacccacatgttgcgcttcaccagttggtaggtccagccgccagggcaagcgcctaaatccaccgcccacatcccgttcgccaggcgttcatcccactcatccgcaggaataaacacatgaaatgcctcttccagtttgagcgtggaacgactcggcgcatctgccggaaatttcaggcgcggaatgcccatatagaacggcgaattattgttgctgtatgagtaaccggtatagcagcagcctggtgcaataaagaatacatgcacaaccggacgcttcggcgtttcatagttcgccagcaccccggcatcgcgcaaggcagcgcgtagcggaacagtaaatttacggcagaatttcagtaactctttgctttcgttggtatcggcaacttcaacacgcagttcaccgcccttctctactacgccctgtaacatgccgacaatgggggtaatacgatcttctggcggcaaatgctgcaggagttcccccaccacaaaccactggcgggcaaaaattaatgaactgaacggcagctcacggattaacttatcgccatcatcaggttgataacattcataaatgacataacccgcattctctttcacgcgggcaaaaccgaaaatttcccgctggccggctttatcggtaatttctgcggcgcactctttttcaaagcccggacggcacagcaatacaaccttattcatgacttacgcccttgcgctttaaacggatagcaccaactaacattaacgcccagcccgcgaggaagctcacgccgccaaccggagtgacaaacgcccacaaacgcagatgggacagcgccaggcaataaaggctgccgctgaacaacaccgtgcctaacgcgaggaaaacgctactccagtaaaaccagatactgatgcgacgctgcattgccaccgccagacctaagatcgccagcgtatgaaacgcctggtattcgaggccggtctggatccagcccatctcaacggcccccatggttttacttaacacatgcgcgccaaaagcgcccagagccacaaaaatgaagccgctaatggcggcgaaaatcagcatgaaacggctggtcatggtcgtaccctacgtaaattattgttcataacgaaagcggaatttttcttgttcagcagcggctttcgccaggatccattggcgaaaggcggctattttacccagttctgcctggctgtcatgacaaaccagataaaaagcgtttttactgaccagaacatcattaaacgggcaaacaagacgtccggcctcgatttcagattgcgccatcacgttatttgccaacgccactccctgcccgtgaatagccgcttgcagcaccatggcgctatgactaaaaattggcccttgctgaacgttgatatgatttaaccccaactgtcgggtatatgtctgccagtcacggcgtgacgcatcatgtaataacgtatgtttagccagatcttccggggtcttcaagggtttttcgcctgtcagcagtagcggcgaacacaccggcaataaatattcggcgtacagtttttccacccgtagccccggccagttgccccgaccataaaatatcgccacatcaacatcatccgccagcttatcttcctgacgatcaaccgcctggattcgaacgtcaattcccggataagctgaattaaagctggaaagtcgcggaaccaaccaatgaatggcgaaactggggagtaaactgaccgtcaacgcccccttggcgctacgggcctggagtttacgcgtcgcttcggttaattgcgaaaatatctctttgatatcgaggaaatagctttgcccttcctcggtcagcaggagtgaacgattacggcggcggaacagttttagccccaaaaaatcctcaagagacttgatttgatgacttactgcggcctgggtcacaaaaagctcttctgctgcgcgagtgaaacttaaatggcgtgctgcggcatcaaaaactcgtaaggcatttagcggtggtaatcgtttagacatggcttttaaactttgatgttaaatgaatttaacaattagatcacactgtgtaacctattagtttttttaatctgagccattataaattgtccgttgagcttctaccagcaaatacctatagtggcggcacttcctgagccggaacgaaaagttttatcggaatgcgtgttctggtgaacttttggcttacggttgtgatgttgtgttgttgtgtttgcaattggtctgcgattcagaccatggtagcaaagctaccttttttcacttcctgtacatttaccctgtctgtccatagtgattaatgtagcaccgcctaattgcggtgcttttttttaccttgcgatcgcgaattactgatccagttcgaccatctctttcacgtcagtacggttgatctgctgtttgttgccattagcgtctttatacgaaatcataccggtatcgttatcagtctgtggtttgccgtcagagacgatggtacgtccgtcattggtgtgcatcacatagttcgaaccggaacaggcgctcagggcaaaagtcagcatacaggcagaaataattgcggcagtctttttcatcatcttctccttaaagcgattaataaatcttaatagtattgattaacaggctaaaattaacgcctaacactattcagcatatgttacttgcgcggcttcgccaggatatccagataattctgatggttagcactctccttgtatcaaagtgaattttgcgtcacgatcggtgcatcaagccgaggagtaccatgaacgtttttaatcccgcgcagtttcgcgcccagtttcccgcactacaggatgcgggcgtctatctcgacagcgccgcgaccgcgcttaaacctgaagccgtggttgaagccacccaacagttttacagtctgagcgccggaaacgtccatcgcagccagtttgccgaagcccaacgcctgaccgcgcgttatgaagctgcacgagagaaagtggcgcaattactgaatgcaccggatgataaaactatcgtctggacgcgcggcaccactgaatccatcaacatggtggcacaatgctatgcgcgtccgcgtctgcaaccgggcgatgagattattgtcagcgtggcagaacaccacgccaacctcgtcccctggctgatggtcgcccaacaaactggagccaaagtggtgaaattgccgcttaatgcgcagcgactgccggatgtcgatttgttgccagaactgattactccccgtagtcggattctggcgttgggtcagatgtcgaacgttactggcggttgcccggatctggcgcgagcgattacctttgctcattcagccgggatggtggtgatggttgatggtgctcagggggcagtgcatttccccgcggatgttcagcaactggatattgatttctatgctttttcaggtcacaaactgtatggcccgacaggtatcggcgtgctgtatggtaaatcagaactgctggaggcgatgtcgccctggctgggcggcggcaaaatggttcacgaagtgagttttgacggcttcacgactcaatctgcgccgtggaaactggaagctggaacgccaaatgtcgctggtgtcataggattaagcgcggcgctggaatggctggcagattacgatatcaaccaggccgaaagctggagccgtagcttagcaacgctggcggaagatgcgctggcgaaacgtcccggctttcgttcattccgctgccaggattccagcctgctggcctttgattttgctggcgttcatcatagcgatatggtgacgctgctggcggagtacggtattgccctgcgggccgggcagcattgcgctcagccgctactggcagaattaggcgtaaccggcacactgcgcgcctcttttgcgccatataatacaaagagtgatgtggatgcgctggtgaatgccgttgaccgcgcgctggaattattggtggattaatgacaaacccgcaattcgccggacatccgttcggcacaaccgtaaccgcagaaacgttacgcaataccttcgcaccgttgtcgcaatgggaagataaatatcgccagttgatcatgctggggaaacagcttccggctttgccagacgagttaaaagcgcaggctaaagagattgtcggatgcgaaaaccgcgtctggctgggatataccgtgactgaaaacggtaaaatgcacttctttggcgacagcgaagggcgcattgtgcgcggcctgttggcggtgttgttgactgccgttgaggggaaaaccgtcgccgaattgcaggcacagtcgccgctggcattgtttgatgagctgggattgcgtgcacagcttagcgcctcacgcagccaggggttgaatgcgttaagcgaggcgattatcgctgcggcgaagcaggtttaagcacagaaccaggtcggataagacgttcgcgtcgcatccgacctgattgtttaaccctgacgcgccgctttcgccatcatcttcttcagcgcatgagaaaccgcaacaaacccaaaggtggcggtcaccatcgttgccgcgccaaatccagatgcacaatccatccgcttcggcccttctgccgtggctttcatcgcacacacagtaccgtctgactgcgggtacaccagcgcttcagtagaaaacacgcaatcgacgccgagcttacctttactgtttttcactacgccaaaatcgcttttcaggcgctcgcgcaacttcgccgccagcggatcctgaatcgttttcgccagatcggtaacctgaatctgcgtcgggtcaatctgcccacccgcgccaccggtcgtgaccagcgggattttattgcgccgacaataagcaatcagcgccgctttgggccgtacactatcaatggcatcaatcacgtacgaataacccacgctcatatactgcgctacgttatccggcgtcacgaaatcatccaccaccgttacacggcactccgggttaatctggcgaatacgctccgccatgacttccgcttttgccagcccgacgttatcgcgcagagcgtgaatttgccgattggtattggtgacgcacacatcatccatatcgataagcgtgattgcgccaatccccgtgcgcgccagcgcttccgccgcccaggaaccgacaccaccgataccaaccacacaaatatgcgcgtcagcaaacagttgcaacgctttttcaccatacagacgcgctgtgccaccaaaacgctgacgccatgcatcactaattaccacagacatagcacctcagaattaaaaagggtgaggttatccctcaccctggcgtatccgtaaaaacggtatacagaataacacatcagccgctaaagacgttacctgcgcccggggcggttttcagcacccagacacgtccatagtggttgtaccaacctgcgcgatgtccggcttccggcccgatcccttgatagatatcgaagtgttggcctttgattgcgccaccgacatccagcgccaccatcagacgcaattcgtactgaccgttaaatttgccgttattatccagcagcggcacttctgccagcaaggtagtacctggcggaataattgaacgatcggaggcaacagaagcacggccaaccagcggcaccgcacttgcccctttcaccggtgcaaaagattgcggtttaaagaaaacgaaagacgggttctgttccagcagctcgcgaacctcggcttcactgtgtgtttcgccccaatgacgaatcgcctgcatcgacatatcttcttttttcacttcgccacggtcgatcagcaccttaccaatgctgcgataggcatgaccgtttttccctgcatagctgaaaaagttaagcggactgccatcaccaaagtcgatatacccgctaccctgcacatccataatgaagttatccatcagggagttgctgtaagcgagaatatatttatcactcagcgcccctgcgtagatctccgcacgagacggcagacgaccacgttttggcggcatacggtaaataggatactggaactcgccctggcgggtatggcgcgcctgaattaccggcgtgtaatagcctgtaaactgcacgttaccatagttgtcggcaccttccatctgccaggcatcaatgccgaactggcgcatattgcgggtatcaccgcctgcgcgcagccactcttgcaccgcgttataaacattactctggttgccatacagacgcggtgacgaattacggatatggttaatttgctcggcaaaatcaccggcgttaatcggcgcgccaacggcatctggctggttcaccagagagaaaggctgggtaaatttcccgtctttatattgctgtccgcgatcggttggtttggaagagcaggcggcaagcattgccacaaccgtgcccataagaaggtactttacccaacgtcctttcattgttctcttcttcaggttaaaaaataaggcgcaacgaagataacaaaccgccgcgtttaatgaaatgagcagcctctccctgacgcaaattttgcacaaaaaataggctttagtggtttgtttttgttcaaaatcatgctaaatccgtgatcggggtaaaaaaaaggttgcatgaaaacgcgagcggagtatagtgcgcatccacggacgcggggtggagcagcctggtagctcgtcgggctcataacccgaaggtcgtcggttcaaatccggcccccgcaaccaattaaaatttgatgaagtaaagcagtacggtgacgcggggtggagcagcctggtagctcgtcgggctcataacccgaaggtcgtcggttcaaatccggcccccgcaaccaatcaaatttgatgaaataaagcagtacggtgacgcggggtggagcagcctggtagctcgtcgggctcataacccgaaggtcgtcggttcaaatccggcccccgcaaccaattattgaacaccctaacgggtgtttttttgtttctggtctcccataaaaaagcgccattcagcgcctttttatcatccccttctcgccagcgtcgccccatcggcaaaatacgctttaattcccgcaagaatagactccgcaacttcctgctggaaagtcgccgttttcagtttacgctcttcctcaacgttactgataaacgccgtttcgaccagaatggagggaatatctggtgcctttagtacggcaaacccggcctgttcaacttgatttttatgcagcttgttgattttaccgagcttattcagcaccgctttaccaaacttaaggctgtcagcaatggtcagcgactgcaccatatcgaacatggtgtggtcgacatagcggtcaccgcttttgctcacgccaccaatcaagtccgaggcgttctgggtttgtgccagatattttgccgcagtactggttgcacctttggttgagagcgcaaacacagaggaaccgctcggctgacgactggtaaaggcgtcggcatggatagagacaaacaggtcagcacgctgtttctgggcttttgctacgcgcacttgcaatggaatgaagatgtcttcattgcgcgtcatgtacaccttcatattgccctctttctcgatcagagagcgcaaacggcgagctatttgcaataccacatctttttcgcgcgttttgtatttccccaccgcaccggagtcttcgccaccgtggccagggtcaagcataatgacaatcggacgatcgcgccctgctttacccggttgtggaccactttgcgctggcggcacctgcttttcgaggtcgcctttgttgtaatcctccagcagcgccagcagcgggtcctgcatatcctgtgcattggccggatagaggtccatcaccagacgctctttaaacccggcgaccggcgcaagggcaaacagctgcggttttacgttttgctttaattcaaaaaccatccgtacggtttgcgggtcaaattgcccgacgcgcgccgacttgatgaacgggtcgtctgcacgaatttgtgccgccatccccttgagtaccgagttcaggtttacatcttcgatatccaccaccacgcgttcagggttactcaacgcgaactgcttatatttcagctgacgatttgattccaccgtcacgcgggtgtagctggacgcaggccagacgcgcaccgccacgacctggctgaccgcagccagactgacctgacttacgctcaatagccacatggcacccgcgccttgcagtaaacgacgacggctgattgcagtgttggatcctgacatgcctctcccgagcaaaagaaatctaagctgtgtaacaagtaaacgactaatttgaccggaaactttagcgaaagacgcataatctgtcatctaataaacggtaaacattctttttatattcacggcattactgataaaaaagtcgctctcgcataaaatttacacttgcaccctgcgaaaaacagaataaaaatacactaatttcgaataatcatgcaaagaggtgtgccgtggtaaaggaacgtaaaaccgagttggtcgagggattccgccattcggttccctatatcaatacccaccggggaaaaacgtttgtcatcatgctcggcggtgaagccattgagcatgagaatttctccagtatcgttaatgatatcgggttattgcacagcctcggcatccgtctggtggtggtctatggcgcacgtccgcagatcgacgcaaatctggctgcgcatcaccacgaaccgctgtatcacaagaatatacgtgtgaccgacgccaaaacactggaactggtgaagcaggctgcgggaacattgcaactggacatcactgctcgcctgtcgatgagtctcaataacacgccgctacagggcgcgcatatcaacgtcgtcagtggcaattttattattgcccagccgctgggcgtcgatgacggcgtggattactgccatagcgggcgtatccggcggattgatgaagacgcgatccatcgtcaactggacagcggtgcaatagtgctaatggggccggtcgctgtttcagtcactggcgagagctttaacctgacctcggaagagattgccactcaactggccatcaaactgaaagctgagaagatgattggtttttgctcttcccagggcgtcactaatgacgacggtgatattgtctccgaacttttccctaacgaagcgcaagcgcgggtagaagcccaggaagagaaaggcgattacaactccggtacggtgcgctttttgcgtggcgcagtgaaagcctgccgcagcggcgtgcgtcgctgtcatttaatcagttatcaggaagatggcgcgctgttgcaagagttgttctcacgcgacggtatcggtacgcagattgtgatggaaagcgccgagcagattcgtcgcgcaacaatcaacgatattggcggtattctggagttgattcgcccactggagcagcaaggtattctggtacgccgttctcgcgagcagctggagatggaaatcgacaaattcaccattattcagcgcgataacacgactattgcctgcgccgcgctctatccgttcccggaagagaagattggggaaatggcctgtgtggcagttcacccggattaccgcagttcatcaaggggtgaagttctgctggaacgcattgccgctcaggcgaagcagagcggcttaagcaaattgtttgtgctgaccacgcgcagtattcactggttccaggaacgtggatttaccccagtggatattgatttactgcccgagagcaaaaagcagttgtacaactaccagcgtaaatccaaagtgttgatggcggatttagggtaagtgatgaaaatcgtcggatgcgacatgcgtaacactcgtacgtcgcatccggcaattacgtttattcccgtgaactaaacaacgccgccagaccactgcgccgctcagtacgagtggcgattgccgcacttaatatgcgctcatcggcatacagcgacagacggcgacgcgcgcgggtcactgcggtgtaaaccagctctcgcgttactaccggcgtgcgttggctcggtaaaatcaacgccgcatggtcgaactccgatccctgcgatttatgtaccgtcatcgcccacgtcgtttcgtgctctggcaggcggctcggttgcacagacttaatattgccgtccggcatcgcaaaccaaacgcgcgtcccctgcccgcgatccagcgcaataccgatatcgccattaaacaacccaagcgcgctgtcattacgggcaatcatcaccggtcggccttcgtaccaacgagagtgcggatgacgatgaattttgcgcttctgttgcataaactgctcaattcgttcattcagtccagccacgccaaacggcccttcccgcagggcgcacaaaagctggtactcattgaacgcctgaatgattaaatccggctcggcacgcgcttgcagcagatccagataacgtccgtaacccgcaagagcttcctcaagcatcgcaatataatcttcgccgctctgtaaaagtcgtttttcgatatcagtaaaatcctgctgaaaaacggttttcactgccgttttatcaccacggttgatcgccgcagctaactgaccaatgccagaatcgctgccgaaacgatagcttttttgcagcaggcagagactgtcgcgcaaagatgccgcttctgtgccggttcctgccggaacgtgagtccccgtcaggcggcttagctgcctggcacgctcggcggtaaagcccgcgttggcataagcgcagatatcgcccagcacagccccagcctcaaccgaggccagttgatcacgatcgccgagaaagatcactcgcgcatgatctggcaaggcgtcgatcagtctcgacatcataggcagatcgatcattgacgcttcatctaccaccagcacatcaagatgcagcgggttaccggcatgatgacgtaaacgctggctacccggctgcgcgcccagcaatcggtgcaaagtgctggcatcttccggaatgcgtttcttttgttcatcggtcagcggtaactgtcgcaaagccttgccgagagattcggttaagcgcgcggcagctttacccgttggtgcagccagacggatacggcagcgttcgccgtcggccatttgaattaacgctgccagcaacttcgccacggtggtcgttttaccggtgcctgggccgccggaaatcaccgagatccgccgcgtcagcgccactgccgctgcaactttttgccagttaatttcatcgcttactggaaaaagtttgtccagggtttgcgccagtagagcttcatcaacctcaatggcatgattcacctcattgaagaagcgcgctaccgtccgctcgttacaccacatgcgattcaaataaagacgatcgccacagaggatcatcggcgtgggttcatctcccctgctgaccgcttgagaagccagcaagcattcttcccaattttgtagctcaccgatttcactgacacaggtcgccaacagcggatgcgacgcctcgttattttccagtcgtgaaagcggcaaacagacgtgtccctctccggcatcatgacttaacagtgccgccgcgagggtgacggcaggatgttcatctcccgccacggtcagggcaaattgcacatccagcgggcgtagctgtttgtgctccacagcttccagtaattgcttttgcaatttcattacgcctcctccagggtcataccggcaaacatctcatccatcagggcaatcaacccggcgttgggtcgggttgtgtaaatcccttgttgcggatgttctttatcaacgccacgcaggaacagatagataacgccgccaaagtgacgatcatagtcgtaatcagcaatgcgatggcgcagataacgatgcagcgccagggtataaagctgatattgcagatcatagcggtgtgcctgcatcgctgctgccatagcctgttgggtgtaagccgaactgtcttcacccagccagttggatttatagtcgagcaggtaataacgcccttcgtggcggaataccaggtcgataaagccttttaacatgccgcgtacctgcatgaactccagcggcgggcagccagcggatagcgggtcaaactggcgaattagtgcatcaagctggctggcgatgagcggttcgctaatcggcaggtaaaactccatctccacctgtttatcgcggtcggaaagctgactcaggctaacacccgtttcattgagaggtgcctggaggacagccgtgatccactcggtcaacaccggttcccactgcgattcaaagccgccgagttccagtttttcctgtacccagttcgggtcaaccggctgggtaaaatcgaggtcttcaaacaaactgtgcaagaatgtccccggtgacgcaccgcgcgggaactgatgcggtgttaacgtcggttcttcaacgacgctgaccacgcctgcggcatcaacatccagccgtggcatcagatcctgagcgataccgtgaccacgctgctgcaagccggagtagctggtgacacgccagttatcgccgggcaatcgttgtagtgtcctcgcattcagttctgcagttaaagcatcattaacctgccagggctggttatcaccagtttgtgccgtttgccaggcaatatcatcatcgcataacgcttcaatacaggtgcgaagccctgccgcatcttgcggttcccctttttgcagcaaacgcccgagcgcactttggtggacgtcggtgtcaccttttttatcgccacgacggcgcaccagcggtgcaacgccgagactgcaatgccaaaccgaacgcgtcagcgccacgtaaagcaaacgcagatcttccgccagacgttcgacctccgcgaggtcgacgctttctggcgcagcattaagatccaaaactgcctcaaacgagtggcgatcgtgataaaacgcctgatcctggacgcggaaattggtaataaatggcaaccagaccagcggatattccagccctttcgatttatggatcgtgacaatctgcaccagatgtttatcactttcgaggcgcatttgttggctggaggcattactgtctggctcgaggatatgttgcgataaccagcgtaccagcgcatgttcactttccagctgcgttccggcttcttgaagcagttcgctgatatgcaagatatcggtaagacgccgctcaccggctgccgttgccagcaagttttctgcaatgttacgcgccgacatcagcgcccgcagcatcggcataacgccacgtttgcgccagatttgccgataaccatcgaactcttcgactaccgcatcccacgcatgttcgtcattattcagcgtttcaatatccagcgcgttcagccccatcattgacgttgccagcgcactacgcagggtgttctcacgttcgggcgtcatcaccgcctgcaacaaccaaagcatttcctgcgcttccagagtttcaaaaacactgtcgcggttcgaaaggtaaacggaagggatttccagcaacgttaaggcatcgcgcacctgggcggcctcctggcggctgcgcaccagcacgctgatgtccgaagcacgcaccggacgcgcgtcgtcgccgttcatcagcaacgcttcgccccgctgtccggcttgtagccagtcgcggatttgcgcagcacatacctgcgccatggtactttgataatcgccaactccgcagctttcgccttccatcagccacattttcatcgcaggctgcatttcacctttaaagacaaaacgtaacgcctgatttttcccggctgatttcactggaataaacggtatttcgcgaaacatgaacgcgtcatcagtctggctgaaaagcttattcacgctgttcaccattcctggtgcggaacgccagttggtgtctaaagtgtagtgggcgtgaacttcgctacgcgccttcatataagtgaagatatccgcaccccggaatgcatatatggcctgtttcgggtcgccaattagcaacaatgcggtttccggctgatggtgccagatacggcgaaaaattcggtactgctgggggtcggtatcctgaaattcatcgatcattgccaccgggaatcgcgtacggatcgccgctgccaacacctcaccgctttcgctacgcagcgcggaatcgagccgacttaacatgtcatcaaaacccacttcgccacggcggcgtttttcacgcgctactgtttcgcggatctcagccaatgcgcgggtgatcaccagatcgcggatcgacaatggttctgcaagcagttgatcgatcgcctcaaacagtggatgtcgcggggtttcccccccggctttcgtgcgatcttctaagaaacgctgggagaatttttccagcgactctggcaactgataactgttggtctcttcttctgcccaggcgctgatcttttcgatccatttagcctgattactacggttaaacttgcgtcgatcaataccagaagattcgatcagcgcatccagttcacccactgcgtcgcgccactgctgttttaccgtatcaatacgcgccacaatttgcgcgtggcgggaagccagcgtttcatcatcgggcggcggtgctttgataaccggcgcttcgccttgcagataacgattaatatcgcgcagcaacgcctgcggccctttccaggtttcaaagacgacctgggctatttcacgcggcagcgggtagcagtggcgacgccagaaatcggcgcaggcctggtagcgtagcagagactcatcttcaatcagctgctgctcaaacagcatgccggattcaaaggcattcaggttgagcatgcgctggcaaaagccgtgaatagtaaagactgccgcttcatccatctgccgttcggctaacaacaaccactgcgcggcttgcgctttatcgtcgatctcttccagcaggcgttcgtacagtggattgtcggtggtttcacgcagacaggcgatgcgcaactcgtggatattgctacggatacgaccgcgcaattctgccgtggcagcctcggtaaaggtgaccaccagcagttcttcaacggtcagcgggcggggaaaggcggcggaaccgcctagtccaagtaacaggcgcaaataaagcgccgcaatcgtaaaggttttgcctgtgccggcagaggcttcaatcaggcgctcgccctgtaagggcaagcgcaaaggatctagtgtctcggcgacatcactcattcttttcactcatcaggggcattgtttgctgcaacgcgctgacgttctcccacactttccagccttcaggatgcacatattcggctttcccgttctggctgccggaaatctgcgacagaatagccatgccttgcggctcgaccaccgcctgatggaagaaatcagcaagtttttgcggcgtcagcagttttatctgggccacgattttatcacgcgaatcgaagcgcatattgccgcgatcgaaatctttacttaacttcgatgcttcttcgccgagcgtttgcggtgcctgcagcatctgggtaattaccgcctgctggatttgcgcaaactcttctggcttcatcgcccgcaattttgcctctgcggttgggaaaaacgccttgtaacgctcccacaagaatgaaggctgtttatcattgctttgcaaaaggaagcccatgccccactgacgccccacgctcattgggaatgcaaacacggcatagcccaactgttcttcggtacgcaactgattgtagaaccacggctgtacgatctgccccaacagagagctataggctgagctggtgtattcatcgtagccagtcggtacaaataccgctgccagtgcggagtcggtgctgttaccggctttttcaaagatgacggattgttttttatcgaccactacatctttgtttcgacaccactctgaaccatcagcgcccaactgtttttgcacatcgcgtgccagcgttgttgcctgggcctcggtcatgttgccgataaccataaactctggtcgagcccctgattttaaggcgtcgcgataggccagcacctctttcaacgtaatggagggcaaaattttacgccgttcatctcgcgagaagtacggcacttgcgagagcatctgcgcgggcataatcgcctgctcaaacgctttacccttttctgcggaatccatcatctggttataccaggacttcgcctgctcaagctgatcttccgtagcggtatagctaaagtacccctcgagcaatgcctggaacagctgcggcagacgctgggtgtaaccattagcattaaccataaggccgttgttagcgttggtggaaaaacttatgccaccaaccgacgcctggttgcttaactgatcaagcgccagccctgcgagataatcattgagcgcaaacatcacctgattgcgggcgctgtccatggctttcggattacgcaaaatcaggctgacatcagctttgggttcgctggaaaaataacggcttggcgcatacaccacgcgcagattcgactcatcaacaatcagctctggatggtcatatttcttctctgacttaatcagcgagaaatcgtcaggaatataggggttaagctccggtaaggagagcgcaatattggcagctttttgctgccagtcagcgaaagtttgttcgctgattttatcgacctgatacggcgcatcgacaaaataagccgttttattgtgcggctctttcgggctgatataccagatacgcgcattctgcggcgtcatcatcgccagacgttcttttactgctttagcatcgtaccgatcggcaatattgactgcatccagcgtatgctcaacaggaacgcgaatcatggtatctgccagccattcgacgtaatccatatcacgggtgattgacggataacggaagtcgatatccagcacattcgccagttcatcgaagtattgtttatcgatccctttttcacgtaacaaattgaggtagctaaaaatagccgccacaacctgatcgcgattcgccagacctttatcggttaaagacgcagagatcgctaatacgccgctgttgccgttgacgataggatcggagttggcgctaatgccctcaactaatccctgcttttgcagccagtcggaaagtgtacctgggctgcgattaccaatcagataggtaatcaattcatcggttttgctacggaatttcgccgagttgttatcaatacgaaactctacgcgcaacactttacgcggcagcgccgggacgtaatgaatgataatgcccttttgcgcgtcggtgactaccggcacggtgatttccggttttttgctctctttgttcggcacgcgaccaaaggtgtccgccgccatttttgccaattccggcaacggtttattactgtaaataaccgccttcatcaaattggcggaatagtacttctcgtggaaatctttcagcgcctgctgcaccggattaccaggtttgtcgcttaaagtttcgaggttaccgcctgaaaactttgaaccagggtgcgccgggttaatggtttctgcgctgacctgtgccatgcgcatcccgtcacgcgtacgcgccatggttaattcagcgttcactgcattacgctcacgttcggcgtatttcttgtcgagcaagggttctgcaatagcatcggccaggcggtctaccgcaccgggcaaggcgtcgttctcaacttccagatagaaagccgtgcgatacggcgcagtgctggcattgtgactaccgccgtgcattttgagatattcggccagactgtcagcctgcgggtactttttcgaccccatcagactcatatgttcaaggtaatgtgccagcccctggtacgcctcgggatcttccagcgacccaacgggcaccaccagcgccgagagcgatttaactgcctgcggatcagaaaccagcaagaccaccataccgttatccagacgtatagcctgatactggcggttatctttatcacttttacggatggtttcctgaatcggctgccatcccgtttctgcctgacttaagggtgcccaaagggcaactaacaacaataatgctttgaaccaggtgctgcggggcattcacggacctcataatcaactttattttctggccagattcaacaggttaacgcaaatcatctgccagaatttaatcttgtgctgcacgagtcagcctatgtttatataaccatcagtccgtgactggtgcgcatcataaagtaagcggatagattgcgcaatttttatacagcactcatgactgattaaagcgaaacagcggtaacaggaaacgttgcgactgttcaacgatggcctccattgtctctggtgttaattgccgccagagcctttgataccagatatcatcaccttcgccacgcaccatcatgttgccttcgtaagcctgaaggaatttcgtacgggctttttgcaacgtggaatcgtcatccagcatggcatcgttttgcgcgtcataacaggtttttagccacgcgccgccactttcaggtaacaccagcaatggcgcggacatcccttcacgatacccctcaatcagttgtgagaggtaatgcaaagcctgttcggctgcaagcggcggaaaacgccactcgccgtctttgcgtagaaaaaggcgactttcaccattaccaccgctggcacagtagacaaggtgttccagccaaagttgcattccctgcgccacacttaataaagagggacgccagcgcaacaagccatccggctgcacctgcggcaaccagccagttatctgcacaccgttgcaggcgagatcaatttccatactctgccccggctggcgacaggcaatgactctgtcggcaagctgctgcatctcctggcactgtgtttcccagaaaatttcaccaaaagcgccatacggtaaatcccctgccgcccggaagcggcggaacaagcgttcggcatcatcctgctcaaccagtgcattcaataactgctgattgatttgataacgactaagcccttcaagaataaatggctcggtgtcggggatttcgctgtcttcagtacggaagttcacctgcaaacgcatctggaagaacgcccgcaccggatgtgcccagaatcgttgtagcgtttccagcggcacggtttccggtaaggtaaacggcagcggctgaacaaattcagaatgtgctttaccagcctggctggccgcaggtagccattcacgagcatagctttgtcgttcgcctggctggtagttttgtggatcaaacggcatccgggtatggaggcaagtaagatgcgcttttacccttgcctcgctttcatcacagttgagcgcttcatcgtccggtagataatgactttgcccgatgtagtcgatcagttcctgcaccagtaccgacgggaaacgttcactgttatcctgaatggaacgcccgatatagctgatatagagtttttgctgcgcggaaattaacgcttccaggaacaggtagcggtcgtcatcgcgacggctacggtcgccacgcttcggtttctggctcatcaggtcaaagcccaatggcgcaagctgacgtggataaacgccgtcgttcattcccagcaggcaaaccactttgaacggaattgaacgcattggcatcagagtacaaatgttaaccggtccggcgagaaaacgctggctgatacgttcttgatccagacgctgcgccagttcatcacgcaatagtgacagcggcaccgcgtcgccatactgcgcacctaaaccttcggcgataatcgcctgccattgttgttcgatcagcgtcatcgccgcttcggtttccgcatccggcaggaagaaggcgttgagcatatcgcgacaaaccggcaaccactcttctagcggacgctcctgtgccagcccgcgacgccagatgtttagctgcattagcagtgaagccagatgccccaccagttctgcaattaagccgctcgattcatcataaggtagaaccgattgccactcgccctgcgcgctctccatcgcgtagcccagcaacatacgcgtcaggccaaatcgccaggtgtgttgtccggtggcggggagttccagctcgcgaacgttgtcgtcatctatcccccaacgaatgccggattcgttgacccactggcgtaaataacgcagcccttcttcggtgatgtcaaaccgcgccgccagcaccggcacatccagtaatgccagcacgtcttccgacacaaagcggctgtctggcaacgataacaggctgataaacgcttccagtaccggatgcgactgccgcgcccgacggtcggaaatggcgtaaggcaggtaacgatccgcaggtgcgctaccaaacacagcctgaataaacggactgtagctgtcgatatcagccaccatcacgatgatgtcgcgcggagtaagtgtcgggtcttcttccagcatcgccagcaggcgatcgtgcaaaacttcaacttcacgctgcgggctatggcaaacgtggaaggtgatactgctatccagtggatcaagcgggcgtttgttatcgctacgggaaaactcttcgatgttcacaccagcaacggcacggttttccagttccagaatgtcagactgaatgttatgcagcaggttatctggcgtgacatcgacaaaggcgtccagctcctggctgctctccaggtcagaaaggagataaatgtagtcgcgcccaagcttaccccatgaagccagcagcgggttgccgacatcctgttcaccatcgctgttaaagagctgcccggcattttcgctatcacgaaatagcggcaattcgcgatcttcaaaactgtgtcgacgctgacgggtcagcagtttcgccagataagcaggatctttaatatcgccccagtaataacggcaggggttggtaaacaggagatggatttcaatatgtttacccagcgcctgtagcgcctggagataaacaggcggtaacgcggaaataccgcatataaagacgcgcgaaggtagccccggcgggcaggtcgtcgcggactccagcgtttcgataaagcgctgatagagattggcgcggtgccagcgcggttgcccgagttgatgggtatattccaccaacgccttccacaacggcgcttgccaggcctgtgcttctcccagcccttcaaccaaatgtcctgtttcccactgtgccagccagtccggacgatagaccagatactggtcaaacaggtccgccgcttttgaagaaagctggaacagttttcgcttgtcgctatcgtcagtcagataatgccgcaacagggtaaagtcttcgcgctccaacaattgcggcagcagagtcatcagtttccagctcatgctctgtttgttaaaggcgctctctttggggatttccggtaacacccggacgaacatatcccagataaagctcgctggcagcggaaaatcaatgtttgccgcaataccaaacttttgcgacagggtcatttgcagccactgcgccataccggtactttgcaccagaatcatctctggttcgaaaggatcgtccagccgttcgcgttcgacaataaactccatcaacgcttccagcacgtccagacgattggaatggtagacccttaacatagcggctcctgactactgacgattcgggcaatgcaggcgggtcatctcgccttctctgcccccgggtgaaactagcgtaacgctgatgctgacacatcccgcctgcgatgtctgcattcggttgacctgccagttggcaggtggcgaaatcgcgcgcagttgcgtttgctgccaaccatgccgccagagctgttggtactggtttctgctggcgagactgttcattaatgtttgctggatacccgataacgcagtgacaatcatcaccatcagcaccatcgcaaccattacctccggcaggctaaagccttgttgattcttcagggaagctgacataacgccctctctttcagcggacaaaaatcgctccagccgcgtggcgaaaaaacaatgtttccatcaatgacttcgcctgttcgccacaacgaaacgccttcataaccggcaaccaataaggcttcattatctgccagtaaacgcaaacaaacccgggcatcggttccagcgtactgcgagcactgaactgcgggctgcgtctgccaggagtgcattttcccccacgccagcgccgactgaacgatggcctggcggcgcaatgactgactttccatgctcacgcgagaggcaaaactgcgatcctgctgactcattccttgcaatagcaagctacccaaaaccagcagcatcagaaccagagccagtgacgaaacacctttttcgcggttcacaggttgaatcctgtcacgctatagctggcatccaccacggtttgcggttcagacttactggcagcacgcatattaaccgtcaacaccggcgagaagccgctgacatcctgacgtacgacctgaaaagtgtcgataatgatggcatccggattagtgactttatcccagcccttaccttcacaggatgtcgcaccgcgtagcgtttccagcacatgctccttcagacgaaatccaatctggtcagactcttttaccggttcgcgatcccagataccgttactgttcgcatcccactgcacaatgatacagtcatcctgtccgacaatttccagcccttcgccggtacagctgccatgacaataacccgccctctggagatgcttcgcgacggtaaatacccgcagccagatttcatcttccagcgccagcttacgggtgctcgttaaactttcacgctgtaacgcaggcagaaagcgtgcagcccccagcaacaatacgctactgatcgccatagcaatcaacacttccagcagagaaaaaccttgctcttttacaggcatccttctgtttctccttgctgacaaagccggagtcttccccacggcgaaaccaccagccaccactcgcccgttgagtttttgaagcgaatatgcccggcccatgcggtattgcgcaggccaaagaaagcaagcgaaggtgtcaggtcgctcatttcgacttcgggccagcgtggcacaaagaccaatggtgaactgccatgacaggtattggccccagcagcggaactcacaaggcaccataacgtcccctccctgataacgctgatactgtggtcgcggttatgccagttggcatcttcacgtaaatagagcaaatagtcccgcgcctggctggcggtttgccatagccgttgcgactgctgccagtattgccagccatagagtccacttgcgcttagcatgaccaaaatcagcatcgcgaccagcgtttcaatcagcgtataaccacgttgtgttttcatgccggcagtatggagcgaggagaaaaaaagacgagggccagtttctatttcttcggcgcatcttccggactatttacgccgttgcaggacgttgtaaaatttcgggaaggcgtctcgaagaatttaacggagggtaaaaaaaaccgacgcacactggcgtcggctctggcaggatgtttcgtaattagatagccaccggcgctttaatgcccggatgtggatcgtagccttcaatctcaaagtcttcgaaacggtagtcgaagatggattcgggtttacgtttgataatcaacttcggcagcggacgcggttcgcggcttaattgcagatgagtttgatccatatgattgctgtacaggtgcgtgtcgccccccgtccagacaaaatcgcccacttccagatcacactgctgcgccatcatatgcaccagtaacgcgtagctggcaatgttaaacggcaggccgaggaaaacgtcacaggagcgctgataaagctggcaagagagtttgccgtctgccacatagaactggaagaacgcatggcacggtgccagcgccattttatccagttcgcctacgttccacgctgaaacaataatgcggcgcgaatccgggtcgtttttcagctggttcagtaccgtagtgatctggtcaatatgacgaccatctggcgttggccaggcgcgccactgtttaccatacactggtccgaggtcgccgttttcatcggcccattcgtcccagatggtgacattgttttcgtgtagataagcaatgttagtgtcgccctgcagaaaccacagcagttcgtggatgatggaacgcaggtggcaacgtttagttgtcaccagcgggaatccatcctgcaggttaaaacgcatctgatgaccaaaaatggaaagcgttccggttccggtacggtcgtttttctgtgtgccttcgtcgagcactttttgcatcagttctaaatactgtttcatggttcctcaggaaacgtgttgctgtgggctgcgacgatatgcccagaccatcatgatcacacccgcgacaatcatcgggatggaaagaatttgccccatgctgatgtactgcacccaggcaccggtaaactgcgcgtcgggctggcggaaaaactcaacaatgatgcgaaacgcgccgtagccaatcaggaacaagccagagacagctcccattgggcgcggtttacgaatatacaggttgaggataataaacagcaccacaccttccagcagcagctcgtaaagctgtgatgggtggcgcggcagcacaccgtaagtgtcgaaaatggattgccactgcgggttggtttgcagcagcaaaatatcttctgtacgggagcctgggaacagcatggcaaacgggaagttcgggtcaacgcggccccacaattcaccgttaataaagttgcccagacgcccggcaccaagaccaaacggaatgagtggtgcgataaaatcagaaacctggaagaaggaacgtttagtacggcgggcaaagataatcatcaccacgataacgccaatcaggccgccgtggaaagacatgccgccgtcccagacacggaacagatacagcggatcggccataaactgcgggaaattgtagaacagaacataaccaatacgtcccccgaggaagacgccgaggaagcccgcatagagtaagttttcaacttcatttttggtccagccgctgcccggacgattcgcccgtcgtgttgccagccacattgcaaaaatgaaacccaccagatacatcaggccgtaccagtgaagcgccacgggtcctattgagaaaatgaccggatcaaactccggaaaatgcagatagctactggtcatctgtcaccacaagttcttgttatttcgctgaaagagaacagcgattgaaatgcgcgccgcaggtttcaggcgctccaaaggtgcgaataatagcacaaggggacctggctggttgccggataccgttaaaagatatgtatatgatccgcgctataaccctccgcgaatcagcccgcccatgccgcgacgctccataaaggctgcaacctgatggcgaacttcggtcgccagttgcgcttccagactacgctgcgcaagattttctgcttcggcataatcaatgcgccgcagcaggtattttacccgcgctacagaacgtccgttcatagacagatggcgatacccaagcccaatgaggattgccacgcacatgggatcgcccgccatttcaccgcacaaacggagatcgattccatgtatttccgcttcccgggcgatcatcgccagagctcgtaacattgcaggatgaagactgtcataaatgttcgccacccgggtattgttgcgatcaacggccagaatgtattgagtcagatcgttggtgccaacagagatgaaatcgacccgctttgccagatgcggcagcataaataccattgacggcacttccagcatgatgccgatacgtggtttgggaatttcgtaaccgatcatctcctcgacttcacgtccggcacgttcaatcaggcggcgtgcttcatcaacttcatcgaggcttgtgaccatcggcaacagaatattcaggttgcccgtagcggcattagcacgcagcatcgcccgcacctggatcaagaagatctccggctgatcgagcgtaatgcgaatcccacgccaacccaggcatggattctcttcgctgatcggcatgtaaggcagctgcttatctgctccgacatccagcgtacgcaaggtgacgggtttatcattgaacatttgcagcatcccctgatactgcgccacctgttcttcttccgacgggaaaccactttgcagcatgaatgggatttcagtgcgataaagaccgatgccatcaatacggctgcccagtttttcttcatgttccgggcttaaaccagcattgagcatgacttttatacgctcaccgctttttaactgcgcgggtaaattgacgtcatcttccgccagacggctaagctcaatctcttcactaattagccgctgatattcttgcagcagtaccggctccggatcgaccagcaattcaccgcgatagccatcaacgatcagcgtcctacgatgcagcaccgaaggctgaatatccgcgcccatcacggtagggatccccagcgcacgtaccatgatcgcagcatgggagttggctgcgccatctcgcacgacaacaccgactaagcgatcctggggcagctcagcaagagttgtcgctgacagttcatctgccaccagaatgaaacgttccggccaggcgttcggcccttgattagcgtcatcaagatgaaacagcaatcgctgacccagcgcacgtaaatcgccagcccgctctttgagatagttatcgcttagcgcggcaaactgttcggcaaatttttcaatgaccgtttttaccgcccactctgccaccgagcctttatcaacctcggcaaacaattcgcgacgcagccgggtgtccgaaagcaggtgcgagtaaagatcgaaaatagccgccgtttctttttgtgcaccggcggcaaagcgtttgctgtagcggcgaaactcgtttgccgcttcttccagcgccccggtcagtcgttcgcgttccagagccggatccagcgttgatgcctgatacacctgttccattaaaggtaacgtggcatcctgccagccttcggcaatcgccacaccaggtgctgccggtaatgcgcggattcgcgtctggcgatattgcccaaacagggcagtcaactgcgactgagaaagaatagctgccatctgggtggcaagcgtcaccaggaaggattcttcactttcgtcatactggcgcaactctcgttgctgtaccaccagtacaccaagcaactggcgacgttgaataattggtacgcctaaaaacgcgcggaaacgttcttcttttacggaggggatgtatttgaagctggggtgcttttgcgcatctgcaaggtttatcggttccgccagcctgccaaccaggccgacgatcccttcatcaaacgcgagcgttacagtgcgaccgcgtggttttttcagcccccgggtcgccatcaggtagtaacaacgtcgatcatgatcggccaggtagaccgaacagacctcggtatccatcgcaagacagatgtcggtaaccagaatatttaacgcctcattcaggcgtggtgcgctggctaccttttcgactatttcgcgcaggcgagtgagcataattggcgtgacttaacctcttttacgtcgataagcagatgcgttttgtggttttggcgtattttcctgcagtgacatcaccacactcgcgaactctttcattaccctacggtagacatcacgtttaaatgacaccacctgtctgaccggataccagtaacttacccatcgccagccgtcaaactctggtgtactgctggtttgcatattgatttctgcatcgccgctcaccagctgcaagagaaaccatttttgtttttggccgatacaaaccggcttcgtgtcccaacgcaccaaacgtttcggtaatttgtagcgcaaccagttacgcgttgaagcaaggattcgaacgtctttgcggcttaatcctacttcttcaaacaattcacggtacatcgcctgctctgcggattctccggggttgattccgccttgcggaaattgccaggagtgctgaccaaatcgccgggcccacattacctgcccctggcgattacaaatcacgatacctacgtttgggcggtagccatcgtcatcaatcaccggactacctcaaaataaagctttatatacgaatgattgtttcatactccaggaagacggtaaaccactctctgcagggcattacacactaataacaattgaataactcacagttatgtgcagagttataaacagaggaaggggtggatagccgtttttattcaccttttctgtggatagagttgtgaagaactacggaattactacgggaaaacccggagcattctgaataagcccgatatagacattttaaaatattcattattagtcaatgcattacatgtaatttgagtaatgaaaaagagtaattcgtgacccaggtcacacctctcatttacgggttggcgaaagatcaaccaatgccgtatttatccacagaatgtgccactaagttaagcactgaaccactaaaaactggagtttcgtcgcacgtcaaggctgtaaatggaaacagtagtggaggtttttcacagttatcccagctttctgtggataacatggtgtaagatcctgtttattttcagtgaccagatttggaaaacccgttgcagtgttgcgcaactcgattaccggcagcctaaaaagcaatataaatcagggaattgaacaacacatgtggaaaaagttacactgcgaatattcggcacataattgctgtttgttttttaatcaaggtatcatgacatgtcccaacctcgcccactgctctctcctcccgaaactgaagaacagttgttagcgcaagcacagcaactttctggttatacattgggagaactggcggcacttgccgggcttgttacgccagagaatttaaaacgcgataagggctggattggcgtgttactggagatctggctaggtgccagcgcagggagtaaacctgagcaagattttgccgctctgggcgtggaacttaaaactatccctgtggatagtcttggtcgtccgctggaaacaacattcgtttgtgttgccccgttaacgggtaatagcggggtgacctgggaaaccagccatgtgcgccacaagctcaaacgcgtactgtggataccggttgaaggcgagcgcagcatcccgctggcgcagcgtcgcgtaggatcaccgttgctgtggagcccgaatgaagaggaagaccgacagctacgcgaagactgggaagaattaatggatatgattgttctcggtcaggttgagcggatcaccgctcgtcacggggaatatttacagataagaccgaaagcagcgaatgcgaaagcgcttaccgaagccattggtgcccggggcgaacggattctgacgctgccacgcggcttttatttgaagaagaatttcaccagtgcactactggcccgtcattttctgatccagtagccatcgctttgacctgccgctttccgggcatataattaccgcttcatttttttggcagggctttttagatgttatttgcatggataaccgatcctaacgcctggcttgcgctcggtacgctgacgctgctggagatcgttcttgggatcgacaatattattttcctttctctggtggtggcaaagcttcccacagcacaacgtgctcatgcgcgccgtctggggttggcgggagccatggttatgcgtctggcgctgctggcatcaatcgcctgggttacgcgcctgacaaatccgctttttacaatattcagtcaggaaatttctgcccgtgatttgattctgcttctgggtggcttgttccttatctggaaagccagcaaggaaatccacgaatccattgaaggtgaagaagaagggctgaaaacacgcgtttcatcattcctcggcgctatcgtgcagattatgctgctggatattatctttagcctcgactcggtgattacggctgtgggtctgtcagatcacctgtttattatgatggcagccgtggtgattgccgtaggcgtgatgatgttcgccgcgcgctcgattggtgattttgtcgaacgccatccttcggtaaaaatgctggcgctctctttcctgattctggtgggctttaccctgattctggaaagtttcgacatccacgtaccgaaaggttacatctacttcgcgatgttcttctctattgcggttgaaagcctcaacttgattcgcaacaaaaagaatccgctctgatactccgtacgctctcctgcgggagggcgtactcactccttttaccctcacagtttaagattttcctgctttcaagatatataacgtcggtttataaacagactattatcataggtaggccaaatgaggataaccggatgaaaaaatgggcagtaataatttctgcagtcggactggcgtttgctgtttccgggtgttccagtgattacgtcatggcgaccaaagatggccgtatgattttgaccgatggaaaacctgaaattgatgatgataccgggctggtgagttatcacgatcagcaaggtaacgcgatgcaaattaaccgtgatgatgtttcgcaaattattgaacgttaacaaataaggtcagcatccggctggccttaagatttttctctttcccttttcccttccctctgccatttttatattccttatgtcgtgattataaaaaggaaacggctatgcaatatcaccgtataccccacagttcgctggaagtcagcacgctggggcttggcacgatgacgtttggtgaacagaacagcgaagccgacgcccacgcacaactcgactatgccgtcgctcagggcattaaccttatcgacgttgccgaaatgtacccagtacctccgcgccccgaaacgcaagggttaaccgaaacctacgtcggcaactggctggcgaaacatggcagccgcgaaaagttaattatcgcctccaaagtgagcggaccgtcgcgcaataatgacaagggcatccgcccggatcaggcgctggatcggaagaatatccgcgaagcgctgcatgacagcctcaagcgcctacagactgattacctcgatctttatcaggtgcactggccgcagcgcccgaccaactgcttcggcaaactcggttatagctggacggattctgcgcctgcggtttcgctgctggatacgctggacgcactggcagagtaccaacgcgcgggaaaaattcgttatatcggcgtgtcgaacgaaactgcatttggcgtaatgcgctacctgcatctggcggacaaacacgatctgccgcgtattgtcaccattcagaacccttacagtctgttaaaccgcagttttgaagtaggtctggcagaagtcagccagtatgaaggggtcgaactgctggcctattcgtgcctaggtttcggcacgctgaccgggaaatatctcaatggtgcaaaacccgctggcgcacgtaatacgctctttagtcggttcacccgctatagcggtgagcaaacgcaaaaagccgtcgcggcgtatgttgatatcgccagacgtcatggcctggaccctgctcagatggcgctcgcgtttgtacgccgtcaaccgtttgttgccagcactctgctgggcgcaaccacgatggatcagctgaaaactaacatcgaaagtttgcatctggagttaagcgaagacgtattagctgaaattgaagcggtgcatcaggtttatacttatccggcaccataagattaacgccggttaaaaccggcgttaaatattaatgacggcgctgccagatccacagcgccgttattgccagcgcaaacagcgcaccgaagccaatgccaatgggcacgaccgggatgcctatcattaccgccagcgagtaaatgcccagcatcaacaacatggcgctgttttcgccaaggttttgtactgcaatcgcattccccgccccgacgctttttttaccccgctcctgtagcaacgcattgagcggaacgacaaaaaagccccccatcacgccaatcagcatcaacaaggcataggctggcagcagctcgtgttgcagggaaaaaatcagtaccaccacgccaatcaaaatcccggctggcatacagcgtgacacggtttccagcgtaactaacttcgctgccgcacctgcgccaaccacgataccaatcgctaccatcgcgttgagataggtgggcgtagcgttatcggtaatgcccagcgccaccggtacccacagcaccaacaggaaacgcagcgtgacacccgctccccagaataaactggtgcccaccagcgaaaaacgcgtttcaccattgcgccatagcgaggtgcaggcattcaggaaactgcgggtcatgttgatgagattccaggactgccccggacgcgccgccgccagtttgggaatgtagatattggcaacgaccgcaccaccgtaggccagtgcgcatgcggccagggcgacgaggacatgccagtcagccagcacaccaccggctacggaaccgagcaaaatcgccgctatggtagaagcttccattaaaccgttagctttcactaacttactacccgtggttaattcgccgagaataccgtatttcgccggtgaataggctgcagcaccaacacccaccagcgtatagccgagaaacggattgataccaaagcagatactggctgcgcccagcagcttcaggccgttggcaaacatcatcacccggcctttggcgaagctatccgccacctgcccgacaaacggcgcaaaaagaatgtaagcacctacaaacaccatttgcaggatgggctggctccactccggatagaactgcgctttcagtaacgccagagtggcaaacagtagggcattatcgccaaacgcagagagaaactgcgccacgataaccgctttcatccccttcgaccacaacgaagtgttagtgtgcactgactcactcatcgtgttgttccgcttcgtctacccagcttttcaacgtgacaaagtcaggtttgccgctgccaagtaatggcatctgtttcagatagcgaatatcgcgcggtacagcaagctccggcacgccgtgctcgcgggcatactgttgcaacttatcgcgcgtcagttcgttatctgtggtgaaaagcaccagtgcctcgcctttgctggcatcgctcttaatcgcagtggcatggactttatctggcgaaacaccaagtgccagttgttccaccatttccagcgacaccatttcgcctgcaattttggcaaagcgttttgcgcggccctgaatctgcacaaagccctgctcgtcaaaacgcacaatatcgccagtgtcataccagccgcgctccatttcgccgcgaacattctcggcggtgggcacttccagtacacctggcttctccacccgcagatagccgttcattatgttcggccctttcagttgcaggcgtccgccctcttcgataccagggaccgacaacaggcgcgcatccattcctggtagaatacgccctaccgtaccgggtttcgccgccatcggtacgttgatagaaacgacaggcgcgcattcggtcacgccgtagccttcaaggatgcgcaggccaaatttatcctgccaaagctgtttggtactttcttgtaatttttctgcgcctgccaccacatagcgtagacgatagaagtcatacgggttggcgaaacgcgcgtagtgaccgaggaaagtcgaggtgccgaacaacacggtgcaactgcggtcatacaccaactccggcacaatgcggtaatgcagcgggcttggataaaggaacacttctgcacctgtaagcagtggcgtaaacaggcctaccgtcagcccaaaggagtgaaacagcggtaacgccgacataaagcgatcgttggtggtgaagtcggcaatcgttttaatctgctcgacattcgccagaatgcttttatggctatggacgacgccttttggatggccttcagaaccggaggtaaagaggatcagcgcctcttcttccggctgctgttttacctgcgccaggcgcggcatcagcaaatgagcgaagatccatactttgtcggcagtggtgacatctgcttttaaatcttccagatagacccagcgcacctgagtaagttgctccggcagatgccagagtttgcctttatcgagaaactggcgggaagtgaagatggttttgatttcagccgccgtaatagcactggtcagcccctttaccccagcagtgtagttcatcattgcgggaatgcggcgacgggcgatggccccaaaaatcactgccgcactgatgcctgcattgggcagcattaagccgatgcgttcgccttcaacactgtatttttcaaggatgcgtccaacaaacagcgttttcgtaagcaatttgcgataggagtctggggtaaaattgacgtcttcgacacatttcttcccggctccgaagcggtacattgcactcagtaaagattcgtacagcgtttcacgcgggcgcaccgccattcgcgcttccatcattatttgatgcagcatttcgccagcgattttgcgacggtcacgggcacgcggcgcatccggcatctccacctgcgttggtggcaaaatatgcagagtaatttgcgggaacaagcgacgtttaaccagacctttcaggcggctgaagtgcgtaagttccgccccttcaatacgcacaggaataaccgttgcaccagacttcgccgcgacaaaacccgcgccatcgtagattttcatcagcgagcctgtagtggtgatgcgtccttcagggaaaatcaccactggtcggccctgttccaccagacgtaccagatgtttaatagccataggttgcgtcgggtcgagaggaacaaagtcgataaatgatttcagccaacgcatataccactgttggcttattgaggtgtaaacggcaaacactggacgcacaggtaaaaacagtccaagcaaaatgccatcaataaaagagacgtgattaggcgtaattagaacgcgctcgcccttcagtgcctgggtgtcacccgtaacgcgaacgcgatacaaaacacggcacaaatttcgaaaaaagctaaaaagcattccaactccctttgctctgattcagtaaaagcgaatggagggagattacacgagataaagaacgcgagcgacagtaaattaggtgcgaaaaaaaacctgcgcatccgcgcaggttggtgcaagagacagggtacgaagagcgtaccgaataatctcaccaatcaatacctctgggatcttgattgtggtctgcacgacgactcttcgccagcgagaaaacgcaaaggaatgaagggaaatgcaacgaggtgtgtaaattgtcggttactgttacagattgatgaccggccaaaaaaaacctgcgcatctgcgcaggctggtgtaattcatgtgctcaacccgaagttgacttcacctatcaatacctctgggatcaccactttagcaacctgaagccaaacgccaccagcggtcaatcgcaacagcgtttcgcaaagtgtaaccaaaggtttgcaatctctttttttgtcttacttatttgcgtttggctcacattcccacgatgaaaacacgccaccccttgaaccaacgggcgttttccgtaacactgaaagaatgtaagcgtttacccactaaggtattttcatggcgaccataaaggatgtagcccgactggcaggcgtttcagtcgccaccgtttcccgcgtcattaataattcacctaaagccagcgaagcttcccggctggctgtgcatagtgcaatggagtctcttagctatcacccgaacgccaacgcccgtgcgctggcgcagcagaccactgaaacggtcggtctgatcgttggtgatgtttccgatccgtttttcggtgcaatggtgaaagcggtcgaacaggtggcttatcacaccggtaatttcttattgattggcaacggttaccacaacgaacaaaaagagcgtcaggctattgagcaactgatccgccatcgctgtgctgcgttggtcgtccatgccaaaatgatcccggatgccgatttagcctcattaatgaaacaaatgcccggtatggtgctgatcaaccgtatcctgcctggctttgaaaaccgttgtattgctcttgacgatcgttacggtgcctggctggcaacgcgtcatttaattcagcaaggtcatacccgcattggttatctgtgctctaaccactctatttctgacgccgaagatcgtctgcaagggtattacgatgcccttgctgaaagtggtattgcggccaatgaccggctggtgacatttggcgaaccagacgaaagcggcggcgaacaggcaatgaccgagcttttgggacgaggaagaaatttcactgcggtagcctgttataacgattcaatggcggcgggtgcgatgggcgttctcaatgataatggtattgatgtaccgggtgagatttcgttaattggctttgatgatgtgctggtgtcacgctatgtgcgtccgcgcctgaccaccgtgcgttacccaatcgtgacgatggcgacccaggctgccgaactggctttggcgctggcggataatcgccctctcccggaaatcactaatgtctttagtccgacgctggtacgtcgtcattcagtgtcaactccgtcgctggaggcaagtcatcatgcaaccagcgactaaccgcagttaaagcaattccagcgccagtaattcttcgatggtctggcgacggcgaatcaaccgcgcctgaccattatcaaacagaacctctggtaacagcggacggctattgtagttggatgacattgatgcgccatatgcccctgtatcatgcagtaccagataatcacctgccttcacttccggcaaggcgcgggtttcaacatttcccccttcctgctgggtaaagacatcgcccgattcacataacggtccggcgacgacggtttccaccgttggcgcgtgttccagagaacgaccatcagctgccagggcactgatatggtggtaactaccgtacattgccgggcgcatcagatcgttgaacccagcatcaaccagcacaaagtggcggctacccatttgtttgacgctccgcacctgagtaattaatacgccagactgcgctaccaggaagcgacccggttcaatttccagtttcacagggtggcccaaatggcgggcgatttgctcacgcgcggcattccacagaccataataatgttcggtatcaaccgcctcttcaccctgttgataaggaacagaaagcccaccgcccgcagaaatagcctgtaaatcctgaccgaattcgatgacctgacgcaccatagcaccacacacctgttccagatgggcataatcaacgccagaaccaatgtgcatgtgaatgccgaccagctgcagatgatgacgttgtatcacgtccagtgcggcgggcagatcggtgtaccagataccgtgcttgctgttttcgccaccggtattggttttttggctatgtccgtgaccaaaccccgggttaacgcgcagccatacccgatgccctggcgaaacctggcccagttggtcgagcatatcaacagaacccgcattcaccggaatttgcaattcactgacgcgttcaagcgtcgcctgatcgataacatctgccgtaaaaacaatatcatcggggtgcgtttgcggattgtaacccgccgccaacgcacgctctatttcgcctaacgagacggaatccactttcacgccctgctcacgcattaatcgcaaaatatgaatattggaacaggctttctgtgcaaagcgcaccacatcaaactgtttcagcgctgcaatctgccgacgaataatttgcgcatcgtagacccacaccgggcagccaaattcagcgggcaaacgcagcagattttcggcggtgagatcggtatcggtgctgaacagtgaatgtggcataacaaactccagatgagtgcttttttatgattacgccacatcataaaaagaataaaaaatatcgatttatgtcgagtctatgcaaaaatgatatggattaccggattgcgagagagcgctaatggccgccgttaacttacgtcatattgaaatttttcatgcggtaatgaccgccggaagcctgactgaggcagcacacctgctacacacctcacagccaaccgtcagccgcgaactggcgcgctttgagaaggtgatcgggctaaaattgtttgagcgcgtacgtggacgattacatcctaccgtgcaaggactgcgtctgtttgaagaagtgcaacgatcctggtacggactggatcgcattgtcagcgccgcagaaagtctgcgcgagtttcgccagggagaactgtctattgcctgcctgccggtcttttcgcaatctttttaccgcagctcctgcaaccctttctggcacgttatcccgatgtcagcttaaatatcgtgccccaggaatcaccgctacttgaagagtggctctcggcccagcgtcatgatttaggactcactgagacactccatacgcctgcgggaacagaacgtaccgaattactctctttagatgaagtgtgtgtgttacctccgggtcatccgctggcggtaaaaaaggtattaacgccggatgattttcagggtgagaactacatcagcctttcccgtactgacagctatcgccagttgctggatcagctatttactgaacatcaggttaaacgacgcatgatcgtagaaacccacagcgccgcgtcagtctgcgcaatggtacgggcgggggtaggtgtttcggtggttaacccgctcaccgcactggattatgcggcaagcggtttagtggtgcggcggttcagtattgcggttccgttcaccgtcagcctgatccgccccctgcaccgcccgtcatcagcgctggtgcaggcgtttagtgagcatttacaagcggggttaccgaaactggtcacttctcttgacgcgattttgtcgtcagctacgacagcataaaagcgacagcatcctcggcatggatcgccgcggtatcaaacacaggcaaaacactgcgctcttctggcaccagtaaaccaatttctgtgcagccaaaaatgacgccctgtgcgccctgttctgcaaggcgagcaatcacttgcgcataataagcgcgtgacgcttcggtaaattgccccagacacagttcttcaaaaataatctgattaattttcgcccgttcatccgcttcaggaataagacaattgatggaaaattgttccgtcagccgcccgcgataaaaatcctgttccatggtgtaacgcgtacccagcagcgccacacgagtcattccggccccggtaattgcacgtccggtggcatccgcaatgtgtaagaaaggcagagtgcaacgtgactcaatggcatccgccactttatgcatcgtattggtacataacacaataccttctgcgcccgcccgctgtaagccaagcgccgcctcagccagaatgtccccggttttatcccattccccgcgacgctggcactcttctatttcatgaaaatcgacgctatgtagcagcacttgcgcagagtgaagcccaccaagccgctgtttaatgccttcatttatcagacgatagtaaggaatggtggattcccagctcattcctcccagcaaaccaattgttttcattcctctctcctgatgtgtgttaccgcaacaaggctgaataaggaacgagacaaacgcctcaacggccaggtgcccgatctctattaacgaaaaaagggccggatgtacagcacatccggcccgtgaaatcagacgccgatatttctcaacttctcgcctgccatcagtttgcgttcgatatgttccagcgtgacatttttggtttccggaatgagccagaaagtgatgcccacaaacgcaatgttcagcgcagtgtagagccagaacgtaccggcagcgccaatgctatcaagcagtgtcaggaaggtcgcgccgataatcatattcgacacccagtttgtcgtcgtcgaacaggtaataccgaaatcgcggcatttcagcggctgaatttcagagcacaggatccacaccactggcgcggcgctcatcgcataaccggcaatacacatcatcgtcatgccaacagagagccaggacaagccactggaagccgtaccgttatcaaactgcatcaggcaatagcccagcaccagagtgcctaacgccatcacgctgaaaccaattttcagagccggtttacgacctgctttatctaccgtaaagaccgcaatgaaggtcgcgaacataaaggtcagtcccacgaccagagtcgcaatcatctgttgttctgtggtcgtaaagcccgccattttgaagatacgcggcgcatagtacatgatgatgttcataccggtaaactgctgcatcgcctgcaacaacataccgagaaacacagcacgacggacgttacggttgatcttaaacagtgcccaaccgccttgttttaacttcaggctttcacgaatttcgttgagttcttctcgcgctttttccgacgtatcgcgcagcatacgcaacacttcttccgcctcaatatgacgccccttttccgccagccagcgcgggctatttggcaggaagaccaccagaataatcagcaggactgctggtaaagcaagaacccccaacattgcgcgccagttaccgctataactgaacgctgtatcggataaaaacgccagcacgatgccgagtgtgaccatcaactggtacatactgatcatcttaccgcgaacgttttcacttgccatttcagaaagatacagaggagcggtgtaagacgcgatcccgacagcaatgcccagcaccacacgagcggcgattaacatctctacgctggtcgcaaaagcggaccctatagaaccgagtacaaacaggatggcccccgccatcaggctgtatttacgacccaggcggaacgacagccaaccattaaacagcgcaccaattgctgcgccgagcatcatgctactaaccacccattcctgcaaacgactggtcagcacaaagtgatcggtaatgaacggcaacgctccggcgattacgccgatatcaagaccaaataacaatcctgcgaccgcagcagctaccgaaacaaacatattcatacgccgcgtatcccgcaaagaacgtggcgttaaagcagattccgtattgatagtaaccattttttcctgccagcagagagtaagacatagtgaaaaaatacgtgaacaactcacgcaggtgtcaggtcggaaacagcataaatatggattaaattgctgcgacatgtcgttatgtgatggatattccaattttcaaattaagttgaattattgagattattattaaccacctaattttacagcagataaaattcataaagttcattaattgataattaatatggattatttcataaccatgatatggattatgatgatctacaggtataaaaaaccctgccatgcggcagggtcataaaagtaagaagaatgaattaacgcgccagccaaccgccatccacggcaatggtataaccattcacataatctgaagcgctggaggcaaggaacactatcggccccatcaggtcactcggcagtccccaacgaccagctggaatgcggtcgagaatttccgcgctacgttgttcatctgcccgtagttgttgagtattgttggtcgccatgtaacccggagctatcgcattaacattaatgttgtgtttagcccattcgttcgccatcaatcgcgtcacacccatcacgccgctttttgatgcggtataagaaggcacacggatcccgccctggaaggagagcattgacgcgatattgataatcttgccgccattgccttgcgcgataaagtgtttcgccgctgcctgagacatgaagaatacgctcttgatattcaggttcatgacatcgtcccagtctttttcgctgaactcgagagcgtcttcgcggcgaatcaatccggcgttattcaccaggatatcaatatgaccaaattcagctaccgcgcgatccagcagtccaggaatgccatcaatctttcgcagatcggcggtcaggcttaaaaaacgacgccccagcgccgtgacctgctcgatggtttcagtcggttcaacgatgttaatgccaacaatgtcacagcccgcttgcgccagccccaacgccatcccctggcccagcccagtatcacaaccagtgacgaccgcaactttaccttcgagagaaaatgcacttaaaatcataacaataccttattcgtttatgcccacaactagcgcaaatctttaacggccacatggtccatatcatcaaagacctggttttcaccgaccatgccccagataaaggtataagctttggttccgacgccggaatgaatcgaccagctcggggagatcaccgcctgctcgttatgcatcacaatgtgacgcgtttcttgcggctgccccatcatgtggaaaacgcaggcgtcatcatccatattgaaatagaaataaacttccatccggcgctcgtgagtgtgacacggcatggtgttccacaagttacctggagccagctccgtcagccccatactcaattggcaggtttccagcacatccgggacaaaatatttgttaattgtgcgacggttactggtgaggttatcgcctaacgtgactggagatacttcgtccggtgtgacttttttggtgggatacgtcgtatgcgcgggtgcgcaattgtaataaaactttgccggagtggcggtatcaatactggcaaagacaacttcttttgcacctttacccacatacagggcgtcgcggtgaccgatttcatagcattggccatcgacagtaatcgtaccggcaccgccaatattgataacacctaactcgcgacgttcaaggaaatagcttacgccgagttgtttaccaacttccccgccaacggaaaccgttttagttatcggcataatgccgccaacaataattcggtcaatgtggctgtaaaccatggtgtactcatcggcgacaaatacctcttcaaccaaaaattcattgcgcagcccttgggtatccagcgtttttgcgtgcgcactgtggatgctctgtcttacgtccacatcaacctccgataatcagtgaagcgtgaaaatagaaaacgatagtgaaacactgtttcgttttctctataaagggatgatatgcccatgggctagggttttcaattaaaaataaaacaatgtttcatttttaagttaaggattaaaaaaagtgcagtgtcgatcacgaatatgtcatgagaatggaaaaatgagggagcccagaaaatgtatgtcgacttgccagccatcattattcaacagattaatgacggcagatatttatcggtaaggaggaaatgcagagctattcgtcacgttcaatggtcaatgccacaccctggcccccgccgatacaaagcgttgccagtcctttgcgggcattacgtttcaccatttcatgaaccagagaaaccaggattcggcaaccggaagcgcctatcgggtgaccaagtgcgatcgcaccaccattgacattgacccgacgctcatcccactcaagcatcttgccaaccgaaagcgcctgtgcagcaaacgcttcattagcctcgataagatcgacatcagccaactgccagcctacacgctccaggcaacggcgggtcgcatacaccggcgcaattcccatcaatgccggatctacaccaacgctggcaaatgcgcgaatgcgggccagcacgggtaaattcaacgctcgtgctttggcttcgctcatcatcattaccgcagctgcgccatcgtttatggatgatgcattacccgctgtcacagaaccgagactatcaaatgaaggatttaaacgggctaaaccttctgcactggcgtcagtgcgtggctgttcatcggtatcaacaaccaacgtctgaccgttactttgggtcattaccgggacgatctcatctttaaatcgtccggcgtcaatcgccgctcgcgctttttgttgcgagctaagtgcgtaagcatcctgcaattgacggctgatgccatattcgcgagccagattttcggcggtgacaccaatatgataatcattgaaggcatcccataacccatcatgcacaagactgtcaaccagctggctattgccaagctgtgcaccggtgcggctatcagtcagaacatgtggtgcgcggctcatgttttcctggccaccggcgatgacaatatcagcctcgccacactgtatcgcctgagtagccagatgcagtgctttaagtccggaaccgcagacgtcattaatcgtgattgcagaaacgctattaggcagaccacctttaatagccgattgccttgccggattctgccctgcccctgcagtcaacacctgaccaagaattacttcatccaccgcatatgcaggaacgccggtacgttctattaacgctttcacgaccagactaccaagttccacggcggaacgacccgctaacgcaccgcgaaagcagccgataggtgtccgtaacgccccgacaatcacaacgtctttcatcacaacctcgcaccaattaacagtgcaatagtaaatgattgttaattacagttatcttaattgtttaaaaaaagtgatttttatcacaaaggaaatatgcctgagcagtagtcagagtcataactggcacgtaaggtttgcaaccactaacccaccaatagaggggtagatagggcgttaatctcccatacttaacctggtttatggtaaattgccctccattttgtttaatttgtagatgatacgttcagataatgtctaatatttggtctaaagaagaaactctgtggagtttcgcgctctacggcacagccgttggtgcaggcacgctcttccttcctattcagttaggttcggcaggggctgtggtcctgtttattactgctctggtcgcctggcctttaacatattggccacataaagccttatgccagttcatcctctcatcgaaaacatcagcaggtgaagggataacgggcgcagtaacacactactatggcaagaagattggtaatctgattaccacgctgtacttcatcgccttttttgtcgtcgtgttgatatatgcagtggcaattaccaactcacttacggaacagctggcaaagcatatggttattgatcttcgcatccgtatgttggtgagtctgggtgttgtattaatcctgaatctcatttttctgatgggacgccatgcaaccattcgggtaatgggttttttggtattcccattgattgcctatttcttatttctttccatttaccttgtcggtagttggcaacctgatctattaacgacccaggtagagttcaatcagaatacccttcaccagatatggatatcgattcccgtgatggttttcgcctttagccatacgcccattatttctacgtttgccatagacagacgtgaaaaatatggcgaacacgctatggataaatgcaaaaaaattatgaaagtcgcttatctcatcatctgcataagtgtactgttctttgtctttagctgcctgctttctattccaccttcgtatattgaagcggctaaagaagaaggggtcaccattttatcggcgctttctatgctgccgaacgccccagcatggctgtcaatttccgggattattgtcgcagtagttgcgatgtcgaaatcattcctgggtacgtattttggcgttattgaaggtgccacggaggtcgtcaaaacaacactacagcaggttggtgtaaagaaaagtcgtgcatttaaccgcgcactatcaattatgttggtatcgctgatcaccttcattgtttgttgcattaacccgaacgcgatttcgatgatttacgcgatcagcggcccgctcattgccatgatacttttcatcatgcctacgttgtcaacgtatctgatcccggcgcttaaaccctggcgttccatcggaaatctgattacgctgatcgtgggtatcctgtgcgtatcggtaatgttctttagctgatatccattgtgaatggttcaaaattgctacaattttgaaccattccagttttcataatgttcattcgttattattccgcactatcacttccctcatcatatcctagtattatcagttagttaaacacacaaagagatctgaacatcttaaataagactatttaagatgcataacttagattcgcaagatatcttccggtcattcaaaaacaatttgcgatatagatattctcataccatgagatagttatctgaaccaccctcaaccaggtaagattaaatcagtgaaacataatcatatttaataacgagaaatgcattttaaaatgtcttaatcagaattatagcaaatacagattaatcgcaatttttcccagcaaaattacaaaatcatggtgtattgacatcatcaatcaccaatgaaattatgcaattatatacggatagggaggttcttaacatggggctttgtagtcgttataaaagtcttacatgcaatagttgctcaatgcattgccaaataatgccagaagagtcaccgcgtttgcagtactgcgcaaactcgtgtttttgtatgtggcccgaagaaagttcatattttaatcgtggtgtggtagaaggtatcttaacaaaaaaccacaatgcgagattaagcggatatatttttgtcgatttttcagtaagttttttacgtctattccttgaaaaggactggattgactatcttgcaagtactgacatggggattgttttagtcagcgaccgcaatatgcaatcgctagctaattactggcgaaaacacaactcagcaatatctgctgtcatatataatgatgatggtcttgatgttgccaatgaaaagatcagacaactatttattggtcgttatttatcatttaccagaggtaacacattaactcagatggaattcaccataatggggtatatggtttctggttataatccatatcagattgctgaagttctggatatggatatccgtagcatctacgcgtacaagcaacgaatcgaaaagagaatgggtgataaaataaacgaattatttattcgttcacattcggtccaacattgatactcaacgaccaggcagaatcatactctgtttatacgggcatttattgaaatgtccgtattttataaataggccgtcccctcaagagtaaacaccatagtatttaaaaccatcacacgaaaaattcagaagcattacgaaatatgaatttacaaacaatagtggcataaatgttaaccatgttaatttacgtaaagttttacgttgcaacattaaagcctcatttcaatcatcatgataaatataaaattaatatatatttatgccgtaaataccaatatacttagcaaactatgtgatctccatttcgattgatttagtgtttattgacgtatgtactggattattaacgataatatcgagttctggcctgagcaccgaaaattaatatcggtacataacgccgatcttaacgtcgttctgacaacgccagccagtcgatgtttatcacttctacttgaagcttttcctgatgtggttgcacaacaagattttttcaccagagtctgggaagaagaaggtatgcgtgtgcctactaacacgttatatcagaacatatccattatcagacgcggatttcgcgctgttggtgatactacccactcgctaattgcaaccgtgccgagaagaggattcaagatccataatgacattaacatacaaaatcatgtaataaactcgtcaacagacgcacatacacacaatgccccacctgccataaaagttaatgcgggatacaaagagagcattggtggcgcaaagaatttcaataacaaaatcctcaaacatataaaaagtcatctaattatgttgagcgcatttgtcataggcgcatattctgcatattggctatggaataataatcaaccgaagccatttttcaaggattacaagactgttgcggaaattaatggctgccattttaatgtaacagacgatacaattgatgggttgaaagagttcgataaatataaaacacggatactggattcggggattaactgtaaaaaacatccgtggttatacttccctcttgcaaaatcctcaccggggatgattgttatggcatgcaataaaaactataaccaacatgaagtggcagactgtttaaccctgtcttaccgtgaggttaatcgtgattgattataaaaaaaacttattatttattttagtttttatcagtggatttattctcttcactgtctattcttacactgcagaaaaaatgatatataacgaaacatgcactgcaaattgggtaatttttaatgaccagggacgagcaaatcttaccatcgactttatgtataacaaaaaaaataaaacaggaactgttgcgttgagtggaacctggcaacaaggtaacagagaaagtaaatcaatacggcgaaatattgaatacacatggattgaaaactatgacacagcccatttaacatcaaagaaagttaataagtttgagattatggatcaagttgatgatgatagacttgcacaacttattcctgatttttatgtctttccagaaaaaagtgtaagctataatatactaaagcaaggtaagcatgcttttattttgagcattggtaacagagcaataatgcattgtgcaaggtaaactaaaatagataacaaaaagatggaacctcgttaatcataaaacaataaaattaaatattctcgcagtatatggcagtctaaagcatcaaagttttgatcaacatctttcattttagacatctccttgcaatgtaaaatatcatgtatcaacaacatctggtgcaaatccatgagtcgaactcgacattcatcttagctcgattattattccttcgtacagtcgatgtaaacaatacagaaagaggattattaagaaccagtttactcagtgaatcaatagaggaaaggactaacgtttctttaaaagaattgatttcatcatctgttaaactaaactcatcattgacagatcgtgagatataactgtttttaactttactctttacgttgactttattgacagaattaacattcacatatcttgattttaatgtccatgatgttgtttgcgtgagaacattctcagcattaaggaatttttttaacggaatccttggtttctttttcgagtccgaatttacaatatcatgcatatagaccatttcatgaatctgcgaaaattcaatgtccattgtatacctcacatttttaccgtgactcgatgttactgttcaataatcaccttccatcaatactaaaattaatacccctaatgtgccgataacaaatatagtcattctacgtaacgtctccataaggtgatatttgacattatcagaagttgcgaattcggattttgctctaatcaaatgagagaaatgtaaaatgaagccacgaaatattaataatagcctaccactgcaaccattagttcctgatcaggagaacaaaaataagaaaaatgaagagaaatccgttaatccagttaaaatcacaatggggtctggtttaaattatattgaacaagaatctcttggaggaaaatatctaacacatgatttgtcaataaagatagcggatatttctgaagagataattcagcaagcaatattatctgctatgagcatatataaattttcgataacagatgatttaatgagtatggctgtaaatgaactcataaaactgaccaaaatagagaataatgtagacctgaataaattcactactatatgcacagacgttctatccccccgcgtcaccagacataataaagaaaaaaaacaaacgacattctacccttctcaaaaatcccctttttaattttcattgaaaaaatggcaattgatactatgaatccaggtcatacacattaaggcatttatgtaatgtcgtaattaagataactaataaggtgaatattagtaaaacaactaatgatgttattagtttgtagtgaacagtacttttaccaataatgaaaaatataccataagcaatgcaagcttaaaactcataatttaaaaaagataaatgtaaaaatatcaatgagtcaatcaataataatttggcatcacgagacacatcacagaggaatattatgagcacagaaacaattgaaatattcaataatagtgatgaatgggcaaatcaactaaaacacgcattatcgaaaggagaaaatctggcattactacatggtttaactcctgatatccttgatagaatatatgcatatgcattcgactaccatgaaaagggtaatataacggacgcagaaatttattataaatttttgtgcatttatgcgttcgaaaatcatgagtatctaaaagattttgcatcagtatgtcagcccaaaaagaaatatcaacaagcatatgacctttacaaactaagttacaattactccccgtatgatgactattcagttatttatcgtatgggtcaatgtcagattggggctaaaaatatcgataacgcaatgcaatgtttctatcacattattaacaattgtgaggatgatagtgttaagagtaaagcgcaggcatatattgaactcttaaacgataattcagaagataatggctaagcattacaatcatttggttaaatttgctggttatagtgcagttaaccactataaccagcacctcttatgttttcttaaatcagcatcttaaaacagttaagagcatactataaatcattacttttcaatgcgttagagaacaatctactttataaaaattgaataaggctatttcagattacatcactgaattcctaagataaattagtgaacacaaccatagatatgtcgaatgtaatttcctgtagcattaatgacacataaatatgaatagccataatttctattgcttaagcaggatgcaagaaaccaattttttcatagaggttaactaatggacttagaaaataaattctcatatcattttcttgagggattaacgctcacggaagatggaattcttactcaaggaaatgagcaagtttatattccacagaaagagttaggtgtattaatagtattacttgaatccgctggtcatgttgtactgaaagatatgatcatcgaatcagtatggaaaaatattattgttagtgacgagtccctgacaagatgtatctattctttgcgctgcatttttgaaaaaattggctatgatcgttgcatagaaacaatctaccggaaaggttatcgtttcagcgggcaggttttcaaaactaaaattaatgaagataatacttcagactattccatagctatattccctttcactacttcattgaatacactggatccattaatacttaatcaggaattagtgcaaatcatttcaaataaaaaaatcgatggtctctatacctatccgatggctgcgacaaatttttgtaatgatcacatatctcaaaattcattcttgagcagattcaagccagattatttcgttacaggaagaataaaccagaataatgcagtgaacactttatacattgagttgatcgacgctaaaaaccttttcctcatcgccagtaatcatctccctgttgatgaactacataatacatcacaatttattatagataatatccttcaaacggtacataaaccagaacgatctgtaagattagctaagcaggaccaaggatataagaatcattatttatcagatgaaatgttagccggaaagaaagaactttacgacttcacccctgaaagcatttacagggccatgactatatttgatagattacaaaataaaagtgatatacagacgctaaaaacagaatgttattgccttctagcggaatgccatatgtctttggcacttcatggaaaaagtgaacttgaacttgctgctcaaaaagcattagagcttttagattatgtatcagacataaccactgtcgatggaaaaattttagctattatgggactgataactggtctgtctggacaagcaaaagtatctcatatcttatttgaacaggctaagatacactcaactgatatagcctctctctactactatagggcactagtccactttcataatgaaaaaattgaagaggcaaggatttgtatagacaaatcactacaactcgaacccagaagacgaaaagcagttgtgataaaagaatgtgtagatatgtatgtgcctaacccgctcaaaaacaacattaaactctactataaagaaactgagagtgaaagccatcgagttataattgacaacattttgaaattaaagcagctgacgagaatttgtatgcgataaatttttattgacgcaattttattatttagatgtatgcaacttgttatttaaacaacagagatgaaaatatctaagatattcaccttattgcaagatatttaaaatgctctagagttaaaagtatgatgtaaagaccattggcctggacaattaaaaaagggagctttatgactaatccaatcggtatcaataatttatctcaaagttcaaatatagcgaatgcaacgggtgatgaagtcgtatcattagataaacacatcaacaccagtgctactgatacagatcaaatacaagcatttatagtttcaacatggatggcgccttttcaaaatgatatgtattcagaagataatcctatctcaccttactataaaattgaatggtagacgattgaccaaataaatcataacgagatacttttataatagtatctcgttcctttcattcaatcctcacacatgaaaaaatatgcgctcaccaaaagttaaattcttaaccatcttcacgttttgtatatttattacaaaaatgtctttcgccagcaactcttgctctaatgaagcaggaacaatgttcagaatcgaaccaaatttaattaaagctatcgctcttgttgaaagcaatctaaaaaaggatagcataggcaagaacagagataagaataacaacataaagagtttagattattggttaatgcagataaaccagatgcatattcccctgttaaaaaaacgtggaataataaaagatgaacgagatttgttagataacccttgtctgaacattaaaataggaaccgagattttatataaccatttttcacgttgtggagtaacgtggcaatgcctggggacttataatgcgggttttgcaatggataaccaaaaaaagagacagcaatatgccccaaaatatatattgtatataccaggcttaatgaactagacaatcgtaaggcttcagcaaaatgagcctaaagcctctttttttatatagtgcaaacacccatacgtaaagctgttttgatcaactcgataccactgtgaacatctaatttcttcatgatattgagtctatgagtttcgactgtttttctgcttaactgcaagaaattagcgatttctttgtttgctttaccatcagctatgagttgtaatatttctgactcacgatttgtaagttgattatcagaggaatacctggaagatattttttcacaatccatatgtacactatcaaaataagtgtaaccattactaatcgaatcaatagcacgatttagtttcgccgggtgactggttttccatacgcatcctttcgcacctgcttcaagcaattttattgaatcaatatacggcatctttgctacaaatgtaataatatgagcatctatcttatgcgatttaacccattttacgagttcggaccccatcattccacctgcaaattctcctaaaataaatatttaggctgtagatttgttacactccgctatagatttcttcagatctttatagcccccaacaacctcatataaatcaggataatgtccgagaaatccaattatcccatcaatcataaacggctgctgatctgaaactacaattttaatttttcccatatattcatcctgagtgtaaatgctttaacgcattcatttataatcatcccttccattattattataagcaaaatccaaagaatacattgatgaaataataatgaaatataattaaaaataaaatttttgcgtgaaaaacaccacaggcattaaaaaatcatgagatgattaaaatattacaattagattatattcaaatcattaaacttgagccagggagctataagtcctcagggcttgccaaaacagaattattcatatccaaagaatgtgtttcaaacattttttcaactaaataatgtctggcttgttcgcagatttcgttaaccttgtcaggagagaaacaatgattattaattaaatattgctcacaattatccacaaattcctgcggactaaattcagcaataaattgatcggtaaaaaacacaaaacgcttatcatcatgaaatgtaatatggacattccatattgatttgtcgacaaaatatgactctacttcaagatacttatctttgaatctggtaggtatatagagatttacaggacctgatattgccggtaatttttttctccaactttcaaaaattttgataaaaacatcaacttcctctgaggattttaacaaaatactcttaagatcgtttatcatgtttattcttttttttctagttctgagctcaacaagcttatcaagggtataaaattatccatcacatcaataatgccttttgtatagccatcataataaccttgaataaatttttcttctatctttacctcaatgctctgaattttagcgctggtttcaagaaggatactttctttaagagaaactatttatttcaatccatcagaaatttttcttttaatcacaacaccatttgcaggagattttatcaagctcatctctattttttttcgcataaaatgtaattctctctaaaagagttgatgcaagtggtaacggcaattgtatgtgatcaacaaaatcaggaaataataaattaaatcgttgctgcattgccaatggttgttgccttatatagggtgacaacgttgaaaaaccacatgtgatgatattgtgatagctagcgatgccgggtttgtatcgtgccttttcatttattttcaccggtatagctgataaataatcccttagcacagcaggaaccttataaaaaaatccgcgttctgcaaacctttctcgataaaagtgataaccactgaataaacagaacaatggaaataaattccaattgtttatgtagtaaataagtgaactattcagattaaaatgttcaactgaaagattgtactgcagaacaatcatttcattggtaatagatctaagcaccggattgttaataggtgtattattcaagcttactcgttgaggatgaatataactaattggatcatatataatctttcttagggcaagattcataacgctctcatatgtctacttaattttcaacctgactaaattagttagaatggccctatacttccataacagccagcaagtcgctacggatattaatgcaagtaagatagaaaccggcatagccttatcataagcaaaaacaggttcgctaatttcatatgttggtgcttgctcaataatgtctcttcgttttgacaatacaacagaaatattttcatattgtacgcttgcagagctattaacaataaatctcttgatatcatttttttttatttctgggttgatatctttttcatatactgcaagtacagaaatatgaattggtaaagcagttttaccactatcgccattatcaacatcgtaactaacatgtactctcgaagaaataatgccatccataattttgagagattgctctaaccgctgctcaatagcagaatatagccttgctttttccgctcgtggagatgaaacgagtgcatctgcagggaacatctgcgatatttgaatatcaggcttacccggtagattgtagatttttagccaatccaccgcagaagcaaaatccgttggttcgacaaatattgaaaatcctgttttgccttgatccttcttttcagcattaatattatgtctttgtaaaacagcaaggacatcattagcttgctgttgatcaagatggttcaataattcctgctgcttgcagccgcacaacagcaggataaacaataataatgatatatatttcatgagcgggtcaacgtctcaactgcagcgacaatctttcttgctaatgttccaccaatgaaacctcgacattataattaagcacatgatcctgcaagactaataatttttcaggagttaacccctctttatcagaccttaatgcttgtaacgcattttgctgccaattttcagtttgtacagcatagttggcaaaagcggagatcattttatcatccgggttgtcaagattgagaacccggtcatttaaatcaatcactttcgcttgctgtatttcatgagcagttgattactcagctctatcaataggtggcatattgcttactgacataataaaatccttatccagtttagcggaagttttgtatgattgctgaatcaagatctttatacgcttttacaacgttagattgcgcatttcgatataatgtatactcagctaatgcactttgatattcggcaagaaatttcgtgtcggagggattggttggctaaatcctccaacgctttttcaacttgctggttcagatcatcaacgccctgatcaaattgattgctgatatccataatataaccattccaatctgccataagtcctcctcaattattcctgaaatgtccagttgctaccttgagacttctcgaatcggttatctccgtagctaaatgaactattatttgtgtcctgatttttcaaattcacattaaatcttacatattgtttaccccattgtttataatattcgtcaacatagttattaattttatttaattcactgtcacttaacgtaccaatgatattgaaatacacattgttagctgttttatatttttcataagaaagacctatcgctgacaacgtttcaatagcctgactttccaatacattatcatctaataccgcaatacttatattgctggcatatggcatagtttgcagtaatcctttaataagattatcgattagttgctgtgtgatagcgttccgttgcttactcactgtcaatcttagattactggcatctaatagttgaagtttaaaatattgtaaatcagggaaattatcagcaagccatgaaaaaattcgtatcgattcatcatcaggatttatcacccgtactggctttcctggttgatttttttccagtgcttgtttgacccagactgcttcatccaaaatattggtattaatatagataacatgatctctaccatataaaatttcataattcctgtttttgtttacaagaattttatcgatatgtctcagctgcggatcattactggcattaacaatataaaaagcaatgaaaatgatagcaaaaagaaaaaaagcattacatacttaaacagcttactgctaaagaaatgttgttttgtagaaataatgttattttcaataatgcctggcaatgaatactgccaaacttcatttttttcttttacagcaaatttgagacctaaaacttctatttgctgattcaatgttaacgttctatcttcaggttcttgtgctgttaattctctgaatgttactaccagatcagggtcggtagtaattattatctcaaaactacctgtaagctcgccataaggaacgactattgtgttttctggtaactcagaaaaagcatcacttcttcctaacgaaacatcattaccaatgataacaagtagacgcccattaagtatttcatactcgcatccattcaatggtccgctcaacaaacgaatggcataagattccaataattcttgtgataagaatttatcattattttccatgaataccacccgctaattccataagctctagtttagagtagtgtaacaagacggaaatatcatgaccaaattatgatgacacagaataaaaaaattataatttcgagaactattttaaatgcctctatgcataactttatttacaatttaaggtataaaccctattccctcaatgttaagcaaatataacaattacttttattttaacttttacacgtaatatttaccctaaatgattttagagtacaggttggcatatgcaagtcttttccagtgatgtctacttcactgtaggcactaatgcattattagcatcccaaaaagaatattacagcgatttagttgcgttggttgatcttgggcattcgttcgttgttattgatgagcatcaacatcgaaatctcaatccaaatacagaacctgtaaacatccttttaagcaacaatttcatcaggatcaataagaatattacattatctgatttaacgcatttcctgatttcgaatcttcatacacaaaatgtgtattccacacaagaaccacttacccatgatgagatagatatcctgcggttatgtgtttcttactcgttaaaacaaatagccattattaaaggaattgattataaaacaatatcatatcacaaaataagagccctaaataaacttaacataaaaggtactgttgagttgtttatagcactctgtgaatgggataaacattattttaaactccaatcttgcgtaagagaaagttgatatgtcattagtaggatataatagtaacatcataataaccatcgcgctgatatcgttgctctctgcatgcaccatagaaaattcattaaaggagaatcaaaataaaagaagtggcgaatcccaagcgatagtagatgcaagacagttctttagcgaacacccggaatatatatcttcagcagaactggagcaaaagctatatcgcgaatttgcacaggttactacagttccagcttataaagagatgagtatgtatcaattgcttgtcatttcacaagatcgtttaactcattaaataatgaatctacacggtttttgcgtgtagattcttataaatttctgactacgacagatgtttaattttttaaattatcgtctttattctcgatttctttctcttcaccttcaatgaatttatcttctgaagagagctgttcatctggaacaggttgtccagcattctccacatcttcaagccacagcagaagacgtaatatttcatctatattttcgaagctaacataatcgtagcgacgatgggtagcataaatttttcgtgctaattttttatctgtgataattggtattccgatttcctttgcatatttccttacggctaaggctacctcattagtttctcttacagaaatcaatggaataggtgaaagatgtggcttaaagtatattcctattgcaatgtgagtagggttggcaatcatcaaacgactattactgacatcagacttcaattgctcagaaagaatttcctgatgcgctctctgcgtttagacttaatttctggatttccttcttgcttcttgtattctcttttaacttcttgtttatccattttcatatctttcataaataaaaaatattcagcgataaaatcaaaaattaagacaattatcatactgccgagacaatacagtatgagaaggaatagcatctctccccaatctgataataaagatatgatatctccatcaagagttttaaaaagcagtgatttatgattacttcaaaatactttgatcgccaatgcaaaaaaaaaaataaaataaatnnnnaaaaaaaaataaaataaaataatataaagaattgctttaacaaattcttttacggtttttaagccaaatatacgctttaagccatttactggattcaatgaatcaaacttaaatttaacagcttcagttgctaattgcattttactttgaaaccaggagacaagtattgttgtgaacatgcaaaccagcaaaaaaggaatgatcgttttcaaccaaccaacccccatagctttaaaatagtcccaaatatctggtttagcgttatgatcaaagatgtattcaagaatcgacataatgtgatgcacatcaaaaacatatccgagatataaagtacccacaagcattattacagagatggttaagtctctactttttagaatttgcccttttttagaagcatcctggagtttcttttgtgttggcttttcagttttattggccatgaaacactctatttctcaatgtatagttgcaattgttctgggaaaaaggataacggcattactcgttcagccagtattgggccaaaataaataattaatattaaaaatgccagcgcacttttgacagtcagtgaaatggcaaaagcatttagttgtgaagcataacgtgccagcaatcccaggacagcctcaccgcccagcataacggcaatcacggggcttgcgtaaacgatagtatgagtcattatgttattaatatatgagaataaaggctctaatttaggaaaattaaaattgcctgaaggccataaattataactttgccaaagagtttccagaataaagttcaatccaccgttagtaagataaaccgctgcagagaataggttaaataatcttgctaattccgaagtatcgacaccagtagcaggatccaaagtactacttaacgttgcaccacgttggttatcgataaaactacctatagcaaggaaaatccaaaacggggatgataataagcaagcaatgaacagccctatgataatttctctggcagcaaacaaagcgatatcgatttcatttaaggtcgataattcatagtggtaatgctgaaataatgcacatgataccactattattattggatgacggactactgttggtatattcccactggcgaaaaatggtaacaaatagaaagttggtgccaatcggcaaaaaccgagcgctgtagcagccagcagactatgcaactgatagagtatcgcctcctccatcctatcctctcgcgaatgctaaattcagcatttcgataccaaacgaatataatttttcaccataccatccgctcattaaaaaaaagcaaatacttacgcataataatttgacgccaaatggcaacgtctgttcttgtaactgtgttaccgtttgaaaaagccctaccaataaaccaacaaatgtcgcaactgcgataggtcctgcagacataactaaaatcagatacagcgccctattccctgcaaaaacaatatcgttcatattttttcctcagggattaatggataggtcaaaatattgtaaaatgagtccttttgataacattgtccaaccgtccatagcgacaaatagaattaattttatcggtgtagatatgattaccgggctcatcatcatcatacctaacgttaacagaacgctggatataaccagatccactacgacaaagggtaaatagatataaaaacctataataaatgcactttttatctcactcaatgcatatgcgggcagtaacgagaaaattgaaatattatcatcatcgattatctcttcattgtcttcagaactattcaccttctgaatcttttcaaaaaagctaaccaactcaggttcagaatattttatcaaatatgatttataaccactcatgcctgtctcaacaaaattaacaaccgacgctacattattgaatgaaagattctcattctgactgttataatatatttccgtcccaaccggcatcattacaaacattgacaatagcaaagcaaccccattaagtgtcatatttgatggcacttgctgaagccccagcgcgtttcggacaataacaaaaacaatcgagaatttaataaaatatgtcccggatgctattataaacggcaatagtgtaaataatgttagtatagctatcagcgaaatggtatttgacattattatgccctgataaccaagaatgaatctctacgcccaatttatcatccacttcaacaagttcgccatagccagttagcgcgccatttacacgtatttctatatttttctcagattcaggaagcagagatattattctttttacacagagttcgtctatttcatatagattcattattttcttaccaagaacaaactcaatttttacaggcaagtcttcaaaactattaatcatctgatcgtcattttcatcataaatctcactctcgtttttttgatatcaaaatcatctgtttcaaaatcttcctcgtactcaaaatgatcagccatttttaactcctctggataaattaaatcacaaatttttgtattataaataaccgcataagccaaattatttgagattaataaaacatcaccaacttcaatatcaacaagacttctgtaacatgttttactaaatccaattacaaaatgaatggaccaatataatgattttttgtctaacactggagcgtttccgtattggcagactgtgactttatctaaccaaagattcaattcccctgttcatattcttattagtggttgagcagggctcaatactccatcaaatactttacctacgtgcaaacgattatattttagttcaggatgctttagatttaacggggaactggataaactgagccattcccctattaacctttccgtttctggcattaaagccatcccagcgagctcagatgaaattaagggaaatatttctccaagcaatacccatccagaccagctgccactctcttctgctatcggtaaccatttagcactaaattcgggcattaataatgcaacatcttcgccattttctttccaattttgaaaagtggtttcaaacgtatgagtgtttcgatttactttcctcagaccgaacattaactttcatccttctgatcgttttcgaatttgctttcattttcttgctcctcataaggctgatgtcgttgtccttgtcgttcatcttgctcagtcaatacccaacgttgtgctgtaactcattatgaaaactatttaattccctcatcattgataaggttggacatctctttcaacatgagagtcattgaagctttcgaccaatttagcggaatgatagggcttggcgcttcatgcaaagttcccgacttgtggatatagttatagctttcgggaagtgccatttcaggtacactcctgccatttgcaccaatcatattctcgcctgttatttgggccaatgatctattcataaattgcactgagtcattcaaatactcttcctttcttgattctttataaacaattgctgctgattttgcataccatgagtcaaaaaaccattctgcttctgttgatggaatgaagctcttttctcttttcgcatgtgaattttgatcggtatcggttttaatatcattgaaccaaaaatttgccgactgataattatccttctcgtatctttttataccatacggacctgctagttttttaactatttttagaacctgctcttttcttctggtgtttatctttgcaagatttgcaggataaataacattaagtaaagccgcatcggcttctctgtaatgtttatctttttccagataacctggggattctccccctaaatcaagctgtaacgttattctttcataacctttatctatgaggtggttcaacctcgttgttgaaagaggttcatccagttcattggctttagcttcgcgtagtaaatcagagacaaaaacagagtctttcttcgagagtaagttcgacaaacgttccagtccagaggtcaccagtgcaacggaagatgtgtttaatcgggcatcttcttcccatgctccggaatcttccataacatagaaattggctttatccagataagcaatcagcagcgcaaccgattttaatcggtcacctttttgccaatcttcagcgttaattgtatcagtgtcgattgcttgtataaggagatcaagataaagacctaacgcatcattttgtttatggttccacagctgcggcttgccttcttcctgcacatctgccatcacgggggagttgctgtcaaatcggatatgcacaacattcatttgcccgggaactccatccagtcgtttggggttgctaatgacgtcctgcatccgcttaatctggtcgggcgtagacatataatcccacagggtgagcagaaccttttttgcggctacactatttccctgatctgatactaatgccatatagccccataaactatccctcagccagacagcatcatagtgggtttgtgccgctgttttgtcatcttcgaaagtagaagcaagaataaacgttccccagggtttctccgtcaacgttaactttcgtgtgttttctgttaatgttagcaatccttgaatttcgtctttggtatagtggctctttatttcattttgtaatttggctgagtgaatcaaaagacgataattaggatacttatctggatttaacgataaataacttttatctgttgctgcccccgtggaattaagaatgttaaatacagattcactcgtcacttctgcccctgtcgcctggcatgtgccgcacgaaaatataccagcgagcagaagagttaatgcagatttccctttcataaaatattccatcaatcgtttgttaaaagcgtagataaccacttatttaacaactcgaaaataaggtgttttacctgggttgttacaaaaggattgcattgcgtaaacgctttttatttacaacaaaatggggaagtattacggcgattgcgaaaagtctgaagcgattgaattaagataatatagaaaatcagatacagcaaaaatggcagattgatcaggtgaagataaattggagcgggcgaagggaatcgaaccctcgtatagagcttgggaagctctcgttctaccattgaactacgcccgcttcgagatgcgtaaggcattataaaccttacgctctccttagcaagtgccgcgctgctgactgctgattaattcgccatcagcattttggcttgctgccctgcggcggcaagtaacgtagcggatcaattgccgttgcacggtaacgaatctggaaatgcaggcgaacagatgccgcatccgtgctccccatagtggcgattttttgcccagccttcacgctttgcccattatttaccagcatcgtgtcattatgggcgtaagccgtaatgtaatcttcactgtgtttaatcatgatgagattaccgtagccacgcagctggttgcccacatacaccacctttcctgcacccgcggcgtaaataggtgtaccccgtggagctgagatatcaatccctttattgccgccatctgctgtcgaatacggcatgataactttccctgtcgttggccataaccaacaacgttgccctactggcggccaggaagatttcggtaccgctgatgacggtgtaaccgatgcggttttggtcgttgatttggcggttgatttacgtgtactactgctacttttcgccccacccagttttagtttctgaccaacttcaatggtgtaagggggggaaatgccgttcagtcgcgccagttcttttacgctggttcccgtggtgcgcgaaatacgatatagcgtatccccccgtttcacggtgtaaacggagccggaatacgttcctgtatcggatgatttgctacccgaacagcccgccaaaagcagtccaaccgataacaacatcacgatacccagagatttttattcaggcgtcccgcactcaaaatctttcctcgcttaaaaaacaagacgccttatcatagcagccagcctcttgatacccaatctcttgcttctggaaaaacgtggtaatagagaaagaggttaatttcatttggcaaagggaagtatcatcagcaaaatattcgctgtagaggtatcgaacttcctgactttttaccctatttcccatcctgatgcgtaataatcccaatttatcacattgattttatcgccactcatattgatacgtatcactgcccctattcagagtcctgtttcgtatcatatctgtgtttttttaacgtcatcacacttcctacctcccctaacgcttatcgtcgtttctggcgtaaatcttgcctgcttagactaaatctttgccataagaaccaaatgttcaaatcgaggggatttctatggaagcgcgggaagcaaccgctacgggtgaatcatgcatgcgcgtcgatgccattgctaaggtcaccgggcgggcacgatatactgacgattatgttatggcgggcatgtgttatgcgaaatatgtacgtagccctatcgcacatggttatgccgtaagtattaatgatgaacaagccagaagtttgccgggcgtactggcgatttttacctgggaagatgtgcctgatattccatttgctactgctgggcatgcctggacacttgacgaaaacaagcgcgataccgccgatcgcgcactgctaactcgccatgttcgtcatcatggtgacgccgttgccatcgtcgtggcccgcgatgaactcacggcagaaaaagcggcgcaattggtcagcattgagtggcaagaattacccgttatcaccacgccagaagcggcgctggcagaagacgctgcaccaatccataacggtggcaatttactgaaacaaagcacgatgtcgacgggtaatgtccaacaaacaatcgatgccgccgactaccaggtacaggggcactatcagacccccgttattcaacattgtcacatggaaagcgtaacatcgctggcgtggatggaggatgactcgcgaattaccatcgtttccagcacccagatcccgcacattgttcgccgcgtggttggtcaggcgctggatattccctggtcatgcgtacgagtcatcaaaccgtttgtcggtggcggttttggtaataaacaggatgtactggaagagccaatggcggcattcctgaccagcaagcttggcggcattccggtgaaagtttcccttagccgtgaagagtgtttcctcgcaacccgtacccgccacgcttttaccattgacgggcaaatgggcgtgaaccgcgacggaacattgaaaggttatagtctggatgttctgtctaacaccggcgcttatgcatctcacgggcactccatcgcttctgcgggggggaataaagtcgcttacctttatcctcgttgtgcctacgcttacagttcaaagacctgctataccaacctcccctcggctggtgcgatgcgtggttatggcgcgccacaagtcgtatttgccgttgagtctatgcttgatgacgccgcgacagcgttaggtattgatcctgttgaaattcgtttacgcaacgccgcccgcgaaggagatgctaatccgctcacgggcaaacgtatttacagcgcagggttgccggagtgtcttgaaaaaggccggaaaatctttgaatgggaaaaacgccgtgcagaatgccagaaccagcaaggcaatttgcgccgcggcgttggcgtcgcctgttttagctacacctctaacacctggcctgtcggcgtagaaatagcaggcgcgcgccttctgatgaatcaggatggaaccatcaacgtgcaaagcggcgcgacggaaatcggtcagggtgccgacaccgtcttctcgcaaatggtggcagaaaccgtgggggttccggtcagcgacgttcgcgttatttcaactcaagataccgacgttacgccgttcgatcccggcgcatttgcctcacgccagagctatgttgccgcgcctgcgctgcgcagtgcggcactattattaaaagagaaaatcatcgctcacgccgcagtcatgctacatcagtcagcgatgaatctgaccctgataaaaggccatatcgtgctggttgaacgaccggaagagccgttaatgtcgttaaaagatttggcgatggacgctttctaccaccctgaacgcggcgggcagctctctgctgaaagctccatcaaaaccaccactaacccaccggcgtttggctgtacctttgttgatctgacggtcgatattgcgctgtgcaaagtcaccatcaaccgcatcctcaacgttcatgattcagggcatattcttaatccactgctggcagaaggtcaggtacacggcggaatgggaatgggcattggctgggcgctatttgaagagatgatcatcgatgctaaaagcggcgtggtccgtaaccccaatctgctggattacaaaatgccgaccatgccggatctgccacaactggaaagcgcgttcgtcgaaatcaatgagccgcaatccgcatacggacataagtcactgggtgagccaccaataattcctgttgccgctgctattcgtaacgcggtgaagatggctaccggtgttgcaatcaatacactgccgctgacgccaaaacggttatatgaagagttccatctggcaggattgatttgaggataacatcatgtttgattttgcttcttaccatcgcgcagcaacccttgccgatgccatcaacctgctggctgacaacccgcaggccaaactgctcgccggtggcactgacgtactgattcagctccaccatcacaatgaccgttatcgccatattgttgatattcataatctggcggagctgcggggaattacgctggcggaagatggctcgctacgtatcggctctgcaacgacatttacccagctaatagaagatcctataactcaacgtcatctcccggcgttatgtgctgcggccacgtccattgctggaccgcagatccgtaacgtcgctacctacggtggaaatatttgcaacggtgccaccagcgcagattctgccacgccaacgctaatttatgacgcgaaactggagatccactccccgcgcggtgttcgtttcgtcccgattaatggctttcacaccgggccgggcaaagtgtctcttgagcatgacgaaatcctcgtcgcctttcattttccgccacagccgaaagaacacgcgggcagcgcgcattttaaatatgccatgcgcgacgcgatggatatttcaacgattggctgcgccgcacattgccgactggataacggcaatttcagcgaattacgcctggcatttggtgttgccgcgccaacgccgattcgctgccaacatgccgaacagactgcacaaaatgcgccattaaacctgcaaacgctggaagctatcagcgaatctgtcctgcaagatgtcgccccgcgttcttcatggcgggccagtaaagagtttcgtctgcatctcatccagacgatgaccaaaaaagtgattagcgaagccgtcgccgcggcggggggaaaattgcaatgaatcacagcgaaacaattaccatcgaatgcaccattaacgggatgccttttcagcttcacgccgcaccaggcacgccgctctcggaattactccgcgaacaaggactgctaagtgtcaaacaagggtgctgcgtgggtgaatgtggtgcctgtacggtgttggtcgacggcacagcaatagacagttgcttataccttgccgcctgggctgaaggaaaagagatccgcacgctggaaggtgaagcgaaaggcggaaaactttctcatgttcagcaggcttatgcgaaatccggcgcagtgcagtgcgggttttgtacgcctggcctgattatggctaccacggcaatgctggcgaaaccacgcgagaagccattaaccattacggaaattcgtcgcggactggcgggaaatctttgtcgctgcacggggtatcagatgattgtaaatacagttcaggattgcgagaaaacgaagtaaaaggatatccggcctgaattcaggccggattcactgaggttatgtgtttaacaactcatatttcttaatcttgcgatagagcgtagcaatgccgatgcccagttcatcagcaacttgcttcttgctgttatgacgtgaaagcgcctcgcggatcatttgcttttccatctcctccagcgccgtgccgcccgcatcatcgagtgacaggtgcgcctcactgacctctgttacatcactttgctccgttgtgccattattcagcagatttggcggcaatagcgtgctgtcgataacttcacctgaaggaactacgttaaccagatattccatcaaattgcttaactcgcgcaggtttccgggccaacgatgcttacgcaatatttcgacgacatcgggagcaatgccaggataaaccgatcccagacgacgggtatgcagatgtaaaaagtaatgcaccaatagttcaatatcttcctgacgttcacgcagcggtggcagagttatcgggataacattaagtcggtagaagagatcttcgcggaatttaccttcggcaatgaactgggccaaattctgattagttgcagaaatgatgcgaatgtcgacttgtattgggctactggcaccaatcggcagaatttcacgcgcctcaatagcgcgcagtaatttagcctgcaacattaatggcatatcacctatttcatcgagaaacagcgtgcccgtattcgccgcctgaatcaaccctgttttaccgttggcagaagcgccagtaaatgcgcctttaacataaccgaacagttcgctttccagaagctgctccggaatcgcggcacagttgatagcaataaagggtttattccgtcttccgctcaacttatggattgctcgggcgacgacttctttacccgtgccgctttcaccaaccaccataacgctggatgggctgggtgcaatacggctaatgagtcgttttaattgccgcataacacggcactcgccaaccaattgttcaatatgtggttcatcaggtgcatttgctacagaaaaactggtatgcgattggtgaaatgccattaaaaataattgtcggccctgaatgttatgcaattgaccaatgattaattcacttttatcgtcccacgaaacaatatgctgcatatgtccatgagtaaaattactctcaaatgttaatggtctgaaacggataggtttcccaataatattattttgtacaacaccaagtgtttttaaggcagtctgattaacaaactgaacccgactttcatcatcaacaactaatacgccctgatccatattatcgatcatggtcgcgaatattttactgatgttatctcctggcccctgatcctccagaagtttcgaaacaaaaatggtggatatatggcgaacataatcagaaaattcgcgtaaattatcactgatatgctcttgttgctcgtgggtaacggcaatcaaacttatcaccccaacacaacgatcctgtaaaatgacaggcgtacccagaaatgctttttcacggcaattttctttactatcgcaaccttcgcaaaggggatcgaagcgagactgtgtcacaactttttcagttttcgtttccaggacgtggcggagcaggcgtgagttgccgctcaactggcgaccaagaaacttcccatacgcgcccgttccggcgacgcgacacaagttttcatcaacgatctcaacctcaagctgcaaaacgctggcaagcattctggcaaaacgctgaattgtcggttgaatttgcatcaatactgactgcgtagtagcaagctccatagctttaccttccagacttacttaaaagtcgatcattgaagacgttgatggttcacagatcatgatgatattaactcaggcgaaattggctttgataaaaacataagatttttatcattttctaatgaaattatggaagagatatcacatttctatatcaatatgagaattacggcggtgagtttatcaaactgaagagagatagcctgcccctttatcttatttctgatacttagcagcaaataaataacgcgataaaaaaagccaaacgttttcgtattttacaaacaaccggaagctggcatcaatttgtgatcaaccccacacattatccgtcaaattagtcttttgcagccccgtggataattctggcacacttattgttagtcccaggtatagctgtgaaaacaccaatcactttggcaagtcacagtgaaataaaccactttgcctgtcattccactaccgggactttatgatgaaaactgttaatgagctgattaaggatatcaattcgctgacctctcaccttcacgagaaagattttttgttaacgtgggaacagacgccagatgaactgaaacaagtactggacgttgccgcagcattaaaagcactgcgtgctgaaaacatctcaaccaaagtctttaatagtggattaggtatttccgtattccgcgacaactccacccgtacccgcttctcttatgcttccgcgcttaacctgctcggccttgcacaacaagatctcgacgaaggcaaatcacaaatcgctcacggcgaaaccgtgcgtgaaaccgccaatatgatctccttctgcgccgacgctattggtattcgcgacgatatgtatctgggcgcaggcaacgcctatatgcgtgaagttggcgctgcacttgatgacggttacaagcagggtgtactgccacagcgtccggctttagtgaacctgcaatgcgatattgaccacccgactcagtcaatggctgacctcgcgtggttacgtgaacactttggttcactggaaaacctgaaaggtaaaaaaatcgccatgacctgggcctactctccaagctatggcaaaccgctctctgtaccacaaggcatcatcggtctgatgactcgcttcggtatggatgtcaccctggcccatccggaaggctacgacctgatcccggatgtggttgaagtggcgaaaaacaatgctaaagcatctggcggtagcttccgtcaggtcaccagcatggaagaagcgttcaaagatgcagacatcgtttatccgaagtcatgggcaccttacaaagtgatggaacagcgtaccgaattgctgcgcgctaacgatcacgaaggcttaaaagcactggaaaaacagtgtctggcacagaacgcgcaacacaaagactggcattgtactgaagagatgatggaactgacccgtgatggcgaagccctgtacatgcactgcctgccagctgatatcagcggcgtatcctgtaaagaaggtgaagtgactgaaggcgtattcgaaaaataccgtatcgcaacctacaaagaagccagctggaagccttatatcatcgccgcgatgatcctgtcccgtaaatacgccaaaccaggtgcactgctcgagcaactgctgaaagaagcgcaagaacgcgtgaaataacccctcgggccgatcagctggtcggccctctatttccagaggccaaaaggataggatatgtccgttttctcattgaagattgatatcgccgataacaaatttttcaacggcgaaacatcaccgctcttttcgcaaagccaggccaaactggcgcgccagttccaccagaaaatagctggttatcgcccaacaccgctttgtgcgctggacgatctcgcaaacctttttggtgtgaagaaaattctcgtcaaagacgaatcaaaacgattcggtctgaacgccttcaaaatgcttggcggtgcgtacgccatcgctcaattattgtgtgaaaaatatcatcttgatatcgaaacgctgtcatttgagcacctgaaaaatgccatcggcgaaaaaatgactttcgcgaccaccaccgacggcaaccacgggcgcggtgtggcgtgggcagcacagcaactcggacagaatgcggtgatttacatgccgaaaggttctgctcaggaacgcgttgacgccattctgaacctcggtgccgagtgcatcgtcacggatatgaactatgacgataccgttcgcctgaccatgcaacacgcgcagcagcacggctgggaagtggtacaggacacggcatgggaaggttacaccaaaatcccaacctggatcatgcaaggctacgcaaccctggcagatgaagccgtcgagcaaatgcgtgaaatgggcgtaaccccgacgcacgttctgctgcaagccggtgtcggagcaatggccggtggtgtgctgggttatctggtcgacgtctacagcccgcaaaatctgcacagcattattgttgaacctgacaaagctgactgtatttatcgctccggcgtcaaaggcgacatcgtcaacgttggcggtgatatggccaccatcatggcgggcctggcctgtggcgaacctaacccgctgggctgggaaatcctacgtaactgcgccacccaattcatctcctgccaggacagcgttgccgcattaggtatgcgcgtgctgggtaatccgtacggcaacgacccgcgcatcatctccggtgaatccggcgctgtcggtttgggcgttctcgcagcggttcattatcacccgcaacgtcaaagcctgatggaaaaactggcgctgaacaaagatgccgtggtgctggttatcagcactgaaggcgacaccgacgtgaagcactaccgcgaagttgtctgggaaggcaaacacgctgtagcaccttaatcaccctattggaactactccctgcaaaacggggagtaaaaatctggagaaaaataatggctaagaatattccattcaaactgattcttgaaaaagcaaaagattaccaggcggacatgactcgcttcctgcgcgacatggttgctattcccagtgaaagctgcgacgaaaaacgcgtagtacatcgtattaaagaagagatggaaaaagtcggcttcgataaagttgaaatcgacccgatgggcaacgttctcggttatatcggccacggcccgcgtctggtggcaatggacgctcatatcgataccgtcggcattggcaacatcaaaaactgggacttcgatccgtacgaaggcatggaaactgatgagctaatcggtggtcgcggtacttccgaccaggaaggcggcatggcatctatggtttatgccggtaaaatcattaaagacctcggtctggaagatgaatataccctgctggttaccggtactgtgcaggaagaagactgcgacggtctgtgctggcagtacattattgaacagtccggcattcgcccggaatttgtggtcagtaccgaaccaaccgactgccagatataccgtggtcagcgcggtcgtatggaaattcgtattgatgttcagggtgttagctgccacggttctgcgccagaacgcggtgacaacgccattttcaaaatgggtccgattcttggcgaattacaagaactctcccaacgtctgggttatgacgaattcctcggcaaaggcaccctcaccgtttctgaaatcttcttcacatccccaagccgttgcgctgtagcagatagctgcgccgtctctattgaccgccgtctgacctggggcgaaacctgggaaggcgcgctggacgaaatccgcgccctgcctgcagtacagaaagctaacgcggttgtttctatgtacaactacgaccgtccgtcctggactggcctggtttacccaaccgaatgctacttcccgacctggaaagtggaagaagatcacttcaccgttaaagcactggtgaatgcctacgaagggctgtttggcaaagcgccggttgttgataagtggaccttctcaactaacggcgtatctatcatgggccgtcacggcattccggtgatcggctttggcccgggtaaagaacctgaagcgcatgcacctaacgaaaaaacctggaaatctcacctggtgacctgtgctgcgatgtacgctgcaatcccgttaagctggctggcaaccgaataattactcttcacttattcccctccggttcgccggagggtttttggagtttgctatgcgcgtattgatcaaaaacggcactgtcgttaacgcagatggacaagccaaacaggatttgctgattgaaagcgggattgttcgccagttgggcaacaatatttcgccgcagctcccgtatgaagaaattgatgccactggctgttacgttttccctggcggcgtggatgtccatacgcatttcaatattgatgtcggcatcgcgcgcagttgtgatgatttttttaccggtacccgcgcagctgcgtgtggcggtacaacaaccattattgaccatatgggatttggcccaaacgggtgtcggttacgccatcaactggaggtttatcgtggctatgccgcccataaggcggtcatcgactacagctttcatggtgtgatccagcacattaatcacgccatcctcgacgaaatccctatgatggtcgaggaagggctgagcagttttaaactctatttaacctatcaatacaaactcaacgatgacgaggttttgcaggcattacgccgtctgcatgaatccggcgcgctgaccaccgtgcacccggaaaatgatgcggctatcgccagcaagcgggcggagtttatcgccgcagggttaaccgcgccgcgctatcacgccttgagtcgccctctggaatgcgaagcggaagccatcgcccgcatgattaacctggcacaaattgccggtaacgccccgctctatatcgtgcacctgtctaacggcttaggtctggattatctgcgtcttgcccgtgcgaatcaccagccagtctgggttgaaacctgcccacaatatctcctgttggacgaacgcagttacgatacagaagatggcatgaagttcattcttagcccaccgctgcgtaacatacgcgagcaggacaaactgtggtgtggcatcagcgatggtgcgattgacgtggtggcgaccgatcactgcacgttctcaatggctcaacgcctgcaaatttctaaaggcgatttcagtcgctgcccaaatggcttacccggcgtggaaaaccgcatgcagttactgttttccagtggcgtgatgacgggacgtataacaccggaacgctttgttgaattaaccagcgcaatgcccgccaggctgtttggcctgtggccacaaaaaggattattagcgcccggttccgatggcgacgtggtgattatcgacccacgtcagagccaacaaattcagcatcgccatctccacgacaacgccgactactcgccatgggagggttttacctgtcagggcgcgattgtcagaaccttatcccgtggtgaaacgattttctgtgacggcacctttacaggcaaagccgggcgaggtcgtttcctgcgacgcaaaccgtttgtccctcccgtgctctaaccactgccagggatctatacacaatcaagaatgatgagtgaggaaaaatgagtaagaaaattgttctcgccctgggcgggaatgcgctgggcgatgatctggccgggcaaatgaaagcggtaaaaattacttctcaggcaattgttgatttaattgcccagggacatgaggtcatcgtcactcacggtaacgggccgcaggtgggcatgattaaccaggcctttgaagctgctgcaaaaactgaagcgcactcgccaatgctgccgatgtctgtctgcgttgccttaagccagggttatattggttacgatctacaaaacgccttaagagaagaactgctttctcggggcattaataaaccggtagcaacgctggttactcaggtcgaagtcgacgctaacgatccggcattcctcaacccgaccaagccgatcggttcgttctttaccgagcaagaagcagagcaactgacaaaacagggttacactctgaaagaagatgctggtcgcggctatcgccgtgttgttgcctcgccaaaaccggttgatattattgaaaaagaaacggttaaagctctggtagatgcaggccaggtggtgatcaccgttggcggtggtggtattcctgttattcgtgaaggtaaccatctgcgtggtgccagcgcggttatcgataaagactgggccagcgcccgtttagcagaaatgattgatgccgatatgctgatcattctgactgcggtagaaaaagtggccattaacttcggtaaagagaatgaacagtggctcgatcgcctgtcattaagtgatgctgaacgctttatcgaagaaggtcattttgcgaaaggttctatgctgcctaaagtggaagctgccgcctcgtttgctcgctctcgcgcaggtcgtgaagcactgattaccgtattgagcaaagcgaaagaggggattgaaggcaaaaccggaacggtgatttgtcagtaattttaaggccgggtgggtaataccatccggccattttcatttaagccacttccagcacttcttttgtcgctttcacgccctgatgcatcaacatcattaacgcctcaagtacgccgccgccaatcgcccgggctttatcagaaacgctggtgaaatcagccgtttcaccacgaggatcgatatcaccaattttaaaaccaccgaccactgccaggccgtcgttcaacaagccacgcaccatccccgtcaacggtgctttaatttcatgctcaccaatccaggcaatcacatcgccctctttcaccagatcgcctaatttcacgttggatcgcataatgcctgcagcaggagcacggatcacccgtcgggtggtatgccccataatattgccaggaacaccggtattctcctgcgcacaaccagagtaaatcacctgaccgagccagtgcccgcgatttgtttcaattaccgcatgacaatccttccctgcagtaaagcccggcccaagcgcgattgttactggtgccatatctgcccgcgttcccaaattctgtttcgccagaatagcgtccaccacgcaaagcggtttcagttcatcaagcaatgaacaggcgggatctgccatcacagggatgaatccgcgttcggtaagtttcatcgcttccgcagagctggttgccaggcgagcagtaacgccttcgaccgtcatttcgccatcgaacacggcctgggcaaacgccacggtacaacgaatcactgtcggtttttccacttccagcatgatcactttaaaacccgcatgatacagacgtagcgccacaccactggcgatatctcccgcaccgcgaatcaccaccagctggtgtccggaaggatgagaaggtttcatcatcagcccacccggcgcgttatttttcacctgtaatatttctgccagcacgctgatggcgatctcctgcggcgtttccgcacctatgttgtaaccaacgggcgcatgtaaacgggcaatatgttcttcagccacgcctttctcacgcaattgacgcaggaaaagctgaaccttgcggcgacttgccagcaaccccaaccatgcaatgggctgttcaatgagtttgtcgagggcttcacgatcctgattattcgtggcaatcaggacaaaattatcagggcgaatatccagtgcttccactgctgcaccaaacgactcagcatggagaagcgtggttgatggagggaatagttcaggattgaggctttcgcgataaatatcggcaacggcaatatcaaatcctaatagcgccgcactctgggctatcgcccggttgacatgccccgcgccaatcaacaccagacgtggacgcataccatggacgctgataaatactgacattgcacctccacaatctgacccgacagcatccgcaccgttacgagccatacgtccatggaataatcgcggcttacgttcctgcaatgcctgaagtgactcttcaatcaccttccgctcaaccattccgccaccaattgtaccgacgatagaaccatcggcgcgcactaacatttgtgcagaatggcggggagtcgagcctcggctatcaacaatttgcgccatcgcaaacggacaattttgctcttcgagttttgcagcctctgtgaaaatattcataccaacctcaatggatatcctttcagtaacccggaatacccgggccgctaattcacaaatctgcgcgcgattgcaggatgttcttgtatatcgcccagccagattgcctctacgtcgtgttgttgcagcggttgaaggagctcgctttgtgcaatcgcattctcacattgagaaaaacggttaatgaaccagactcgccgacaaccttgcggtacgtttttaaacgccccctgagggtggcgaaccagcgcaacgagatcgctcagttgcaaggttgcatcaggtgttaacccggtaatatcagcaaactgcgaccagcgatggacattttctgtgctcactttcgcgcccaaagtatgtcctcccatcacagcaatcacgcagcaactgcttttgggtatgcaaggttcgtgctcatcaggcgcttttaacggcattccacgcgagccatctgcttcaatgagaattacgtcacactctggtcgttgcaccagtgcatcaatcgcttctggcgtaaatccctgcacttttccctggttcgctttccagctgtgaaaacaaaatgaaatgggggatgtaagagacgcatgaggaagcatggcgggatcacgacagaaaaccacgggccagtgagacgttggcataaacatatgtgtcgtcgtcgtgattaacacacgcctgccgctagcctggagcagttctgccagccaaaaaagcaagctggttttccccccagcaccaacaacagaaatcacagtgggacgtttctgcgcacctaaatcaatgactaatgccgatgggtcaactatacttttcacgagtctttatgacctctctgggataaattatccccaacttaatccatcaggaagtaacgcaattatcaggcgttattagcccctataaataatggaaccactatgtcagccatcgactgtataattaccgctgccggattatcatcaagaatggggcaatggaaaatgatgttaccctggcaacaggggacaattcttgatacaagtatcaaaaatgcgttgcagttttgtagccgaattattttagtcaccggctatcgtggtaatgaactgcacgaacgttatgcgaaccagagcaatatcactattatccacaacccagattatgcgcagggtttactaacatcagtaaaggccgcagtacccgcagtgcaaacagaacattgttttctcacccacggtgacatgccaaccctcaccatcgatatttttagaaaaatctggtcgttacgaaatgatggcgcaatactgccactccataatggcatccccggccatccgattttagtgtcaaaaccatgcttgatgcaggcaatccaacgacccaatgtcaccaatatgcgtcaggcactccttatgggagctcattattccgtcgagatagaaaatgcagaaataattttagatattgatactccggacgactttattacagcgcaaaaaaggtatactaaaatttagaaaatgtagttaaacgattgcgttcaaatatttaatctctccagcactctttatcataatgataaggaatcactgattttgagaaaagagaaaaagtgataaatgggctgacaataataattttcaggagtgattttaattctcatttggcacctgtgagttcattcacaaaaagcctttaagtttcgagccgcctcacatttttttatatttcccgccaaacctggcaagagtggtgcgattgttgctctatcccctaaaccaccggatttctcaacaccggtcactcaatgatatctgtataagctaaggagagggttatgggggatattatgcgtcccattccgtttgaggaacttttgacgcgcatatttgatgaataccaacaacaacgctcaatctttggtattcccgagcaacagttttactcacctgtaaaaggtaaaactgttagcgtcttcggtgaaacctgtgccactcccgtcggccctgccgctggcccgcacacgcagctcgcgcaaaatattgtcacttcctggctgactggcggacgcttcatcgaactaaaaaccgtccaaattcttgaccgcctggagctggaaaagccctgtatcgatgccgaagacgagtgctttaacaccgaatggtctaccgaatttaccctgcttaaagcctgggatgaatacctcaaagcctggtttgccctgcaccttctcgaagcgatgttccagccttctgattccggtaaatcgttcatctttaatatgagcgtcggttacaacctcgaaggtattaagcaaccgccaatgcaacagttcatcgacaatatgatggacgcatctgaccatccgaaattcgcgcaatatcgcgatacgctgaataaattactccaggatgacgcatttttagcccgccacggattgcaggaaaaacgcgaaagcttgcaagccttacccgctcgcatccccaccagtatggtgcagggcgtcaccctctccaccatgcacggctgtcctccgcatgaaatcgaagccatttgccgctacatgctggaagaaaaagggctcaacacctttgtgaaacttaacccgaccttactgggatacgcgcgtgttcgtgagatcctcgatgtctgcggtttcggttacataggcttaaaagaagagtcatttgatcacgacctcaagctgacgcaagcactggaaatgctggaacgcctgatggcactggcaaaagaaaaatcactcggctttggcgtaaaactgactaacactctcggcaccatcaacaataaaggcgcactgcctggtgaagagatgtatatgtcaggccgtgcgctgttcccgctctccatcaatgttgcagcagttctctctcgcgcctttgacggcaaactgcccatttcttattccggtggtgccagtcagctgactatccgcgatatttttgatacaggtattcgccctattactatggcaaccgacctgctgaaacctggcggctatttgcgcttaagtgcctgcatgcgcgagctggaaggctccgacgcctggggacttgaccatgttgacgtcgaacgactgaacagactggcagcagatgcgttaaccatggaatacacccagaaacactggaagccagaagagcgtattgaagtggcagaagacctgccgctgaccgattgctacgttgccccctgtgttactgcctgcgctatcaagcaagatattccggaatacatccgtctgcttggcgaacaccgctatgccgacgcgctggaactcatctaccaacgcaacgctctgcccgccattaccggtcatatttgcgatcaccagtgccaatacaactgtacccgcctggattacgacagtgcgctgaatatccgcgaactgaaaaaagtcgcgctggaaaaaggttgggatgaatataagcaacgctggcacaaaccagccggttctggttcacgccatccggttgccgtgattggtgcaggtccggcgggtctggcagcaggttacttccttgccagagcgggccatccggttacgctgtttgaacgcgaagccaatgcgggcggcgtggtgaaaaatatcattcctcagttccgtattccggctgagttaattcagcacgatatcgattttgttgccgatcacggcgtgaaatttgagtatggctgctcacccgatttgaccgttgaacagttaaaaaatcagggcttccactatgttctgattgccaccggcactgataaaaatagcggtgtgaaactggcgggcgacaaccaaaatgtctggaaatcactccccttcctgcgtgaatacaacaagggtacagcgctcaagctgggcaaacatgtggtcgttgtcggggcgggtaacaccgcaatggactgcgctcgtgcggcgttacgcgttccaggcgtagaaaaagcaacgatcgtttaccgtcgttcactgcaagagatgcccgcatggcgcgaagagtatgaagaagcgttgcacgacggcgtggagttccgtttcctgaataatccggaatgtttcgatgctgatggcaccttaaccttgcgcgttatgtcgcttggcgaacccgatgagaaaggtcgtcgccgtccggttgaaaccaacgaaacagtaacactgcatgtagacagcctgatcaccgccatcggtgaacagcaggatactgaagccctgaatgcgatgggcgtaccgctggacaaaaacggctggccagacgtcgaccataatggcgaaactcgtctgactgacgtctttatgatcggcgacgtacagcgcggaccatcctccattgtcgctgctgtcggaaccgcgcgtcgggcgaccgatgccatccttagtcgggaaaatatccgttcccaccagaacaataaatactggaacaacgtcaatccggcggaaatctatcaacgtaaaggcgatatctctatcacgctggtgaacagtgacgatcgtgatgcgtttgtcgcccaggaagccgctcgctgcctcgaatgtaactacgtttgcagcaagtgtgtggatgtctgcccgaaccgcgccaacgtctccattgcggtcccaggcttccagaaccgtttccagacgctgcacctcgacgcttactgtaacgaatgcggcaactgcgctcagttctgtccgtggaacggtaaaccgtacaaagacaaaatcaccgtcttcagcctgtcgcaagactttgataacagcagcaacccaggcttcctggtggaagattgtcgggtacgcgtacgtctgaataaccaaagctgggtgctgaacatcgacagcgaaggccagttcgacaacgtaccaccggagctgaacgatatgtgccgcatcatcagccatgtccaccagcatcatcattatctgctgggccgcgtggaggtgtaatcatgttgattctgaagaatgtcaccgcagtacagttacacccggcgaaagtgcaggaaggcgttgatatcgccatcgaaaatgatgtgattgtcgctatcggcgatgccctgacgcaacgctaccccgatgccagctacaaagagatgcatggtcggattgtgatgccgggaattgtctgctcgcacaaccatttttactcggggctttcccgcggaattatggcaaacatcgccccctgcccggatttcatctcaacgctgaaaaatctctggtggcggctcgatcgcgcccttgatgaagagtcgctctattacagcgggctgatttgttccctggaagcgattaagagcggatgtacatcggttatcgatcaccatgcctctccggcgtatatcggcgggtcgctctccacattgcgcgacgcatttttaaaagttggcctgcgcgcgatgacctgttttgaaactactgaccgtaacaacggcatcaaagagttgcaggaaggtgtagaagaaaacatccgcttcgcccgtcagattgatgaggcgaagaaagcagcaaccgagccgtatctggtggaagcacatatcggtgctcacgcgccgtttaccgtgccagatgccggtctggagatgctacgtgaagccgtgaaagccacaggccgtggtttgcatattcacgctgcggaagacctttacgacgtttcctacagtcaccactggtacggcaaagacctgctggcacgactggcgcaattcgatctcatcgatagcaaaacgctggtcgctcatgggctgtacttgtcgaaagatgacatcgccctactcaatcagcgcgatgcgttcctggtgcataacgcccgttcaaacatgaacaaccatgtcggctacaaccatcaccttagcgacatccgcaatctggcgttgggaacggacggcattggttcggacatgtttgaagagatgaaatttgccttctttaaacatcgcgatgcgggtggtccgctgtggcctgacagttttgccaaagccctgactaacggtaacgaactgatgagccgcaactttggcgcgaaatttggacttctggaagccggttacaaagctgatttaaccatttgcgattacaactcaccgacgccgctgctggcagacaatatcgccgggcatatcgctttcggtatgggctcaggcagcgttcacagcgtgatggtcaatggtgtgatggtctatgaagaccgtcagtttaacttcgattgcgattccatttatgcacaagccagaaaagccgctgccagtatgtggcgtcggatggatgcgctggcataaatgacagatgccctcttcccgcagggaagagggttaaataaggaaagaagatgattgaacaatttttcaggcccgactctgtcgaacaggcgctggaactgaagcgccgctaccaggatgaagccgtctggttcgccgggggcagcaaactcaatgctacaccaacccgtaccgataaaaagattgccatttccttacaggatctggaactggactgggttgactgggataacggtgcactgcggattggcgcaatgtctcgcttgcagccactgcgtgatgcgcgatttattcctgcagcgctgcgtgaagccctcggttttgtttactcacgccatgttcgtaatcagtcgaccattggtggtgaaatcgccgcccgccaggaagagtcggtgctgcttcccgtcctgttggcactggatgctgaactggtttttggcaacggcgaaacgctgtcaatcgaggactacctggcctgcccatgcgatcgcctgctaaccgaaattatcattaaagatccgtatcgcacctgtgcgacccgcaaaattagccgttctcaggcaggtttaaccgtcgtgacggcagccgttgcaatgacagaccacgacggtatgcgaattgcgctggatggcgtcgccagtaaagcactgcgtctgcatgatgtcgaaaaacaaaatctggaaggcaatgcacttgaacaggctgtcgccaacgccattttcccgcaggaagatttgcggggcagcgtggcctataaacgctatatcacgggagttctggtagccgacctgtatgccgactgccaacaggctggggaggaagccgtatgatcatccactttactttaaatggcgcgcctcaggagctaaccgttaatccaggcgaaaacgtgcaaaagctgttgtttaacatgggaatgcactctgtacgcaacagtgatgatggcttcgggtttgccggttctgacgcaataatctttaacggtaatatcgttaacgcgtccttgcttattgccgcacagttagagaaggcagatattcgtaccgcagaatctttgggcaaatggaacgagttaagtctggttcaacaggcaatggttgatgttggcgtggtgcagtctggttataacgatccagctgcagctctgattatcaccgatcttctcgatcgcatcgccgcacctacccgcgaagagatcgacgacgcgctttctggtttgttcagccgcgatgcaggctggcaacaatactatcaggtcattgaactggcggttgcacgtaaaaataatccgcaggccaccattgatatcgctccgactttccgtgacgaccttgaagtcattggcaagcattatcctaaaactgatgccgcgaaaatggtgcaggcgaaaccctgctatgttgaagaccgcgtaacggctgacgcctgcgtcattaaaatgttacgtagcccacacgctcacgcactgattactcatctggatgtcagcaaagctgaagccttaccgggcgtcgttcacgttattactcacctgaattgcccggatatctactataccccgggtggtcagagcgcaccggaaccgtcaccgcttgaccgccgtatgttcggcaagaaaatgcgtcacgtcggcgatcgtgttgctgcggtcgtcgcagaaagtgaagaaattgcgctcgaagcattgaagctcatcgacgttgaatatgaagtgcttaagccggtaatgtcgatcgacgaagcaatggcggaagatgcgcctgtcgtgcacgatgaaccggtggtgtatgttgctggtgcgccagatactctggaagacgataacagccatgcagcccagcgcggcgagcatatgatcatcaacttcccgatcggttctcgccctcgcaaaaatatcgccgccagtattcatggtcatattggcgatatggacaaaggctttgccgatgccgatgtgatcattgagcgaacctataactcaacgcaggcacagcagtgcccgactgaaacacatatctgctttacccggatggacggcgatcgtctggttatccacgcctccacccaggtaccatggcacttacgccgccaggtcgcgcgcctcgtgggcatgaaacagcataaagttcatgtcattaaagagcgagttggcggcggttttggttccaaacaggacatcctgctggaagaagtgtgcgcctgggcaacctgcgtgaccgggcgtccggtactgttccgctacacccgtgaagaagagtttattgctaacacctctcgtcacgtcgcgaaagtcaccgtcaaactgggagcgaaaaaagatggtcgcctgacggcagtgaagatggatttccgcgccaacactggcccttacggcaaccactcactcaccgtaccgtgtaacggaccggcgctgtcgctgccgttatatccgtgcgataacgtcgatttccaggtcaccacctactacagcaacatttgcccaaatggtgcttatcagggttatggcgcaccgaaaggtaacttcgctatcaccatggcattagcggaactggctgaacagttacagatcgaccaactggaaattatcgaacgtaaccgggtacacgaagggcaagagctgaaaattctcggtgcaatcggtgaaggtaaagcgccgacctccgttccttccgccgccagctgtgcactagaagagatcctgcgtcagggtcgcgagatgatccaatggtcgtcaccgaaaccgcaaaatggtgactggcacatcggtcgcggcgtcgccattatcatgcagaaatcgggtatcccggatatcgatcaggctaactgcatgatcaaactggaatcggacggcacctttatcgttcattctggcggtgcggatattggtactggtctggatactgtagtgacgaaactggcagcagaagtgctgcactgcccaccgcaggacgtgcatgttatctccggtgataccgatcatgcgttgtttgataaaggcgcatatgcctcgtccggtacttgcttctcaggtaacgcggcgcgtttggcagcggaaaatctgcgggagaaaattctgttccacggcgcgcaaatgttgggtgaggcagtggcagatgttcaactggcaacgccgggcgtcgtgcgcggcaagaaaggcgaagtcagcttcggggatattgctcataaaggcgaaaccggcaccggctttggttcactggtgggaactggcagttatatcacgcctgatttcgccttcccgtatggcgcaaacttcgctgaagttgccgtcaacacgcgtacgggtgaaatccgcctggataaattctacgccttgctggactgcggtacaccggtcaacccggaattagcattgggacaaatctacggtgctaccctgcgagctatcggccacagtatgagcgaagagatcatttatgacgccgaaggtcacccgttaacgcgtgatttacgcagttacggcgcaccgaaaattggtgacattccgcgtgatttccgcgctgtgctggtgccgagcgacgataaagtcggcccgttcggggcgaaatcgatctcggaaatcggtgtaaatggcgcagctccggcgattgctaccgcaattcacgatgcatgcggcatctggttacgcgaatggcatttcacaccggagaaaatactcactgcgctggaaaaaatataaataataaatggccgcttcggcggcctgtttctctgtttggacgatgactaaatagtgactgcgaaaatgagataagccgttctcaaggcgtcctgcgccccaaattcgtgggaatttattttactaattcagatgatcaaatttactttaaaaggagtgaagggatgtctgatataaacaatgcaggttctgaccttatatttgaactggaggatcgccctccctttcatcaggctctcgttggtgccattacccatctgttggcaattttcgttccgatggtaacccccgcgttaatcgtgggggcggccttacagctttccgctgaaacaactgcctatcttgtttctatggcgatgatcgcctctggtattggtacctggttacaagtaaaccgctacggcatcgtcggttctggcctactctcaattcagtcagtcaatttttcatttgttacggtcatgattgcgctgggcagcagcatgaaaagcgacggttttcacgaagagttaatcatgtcgtcgcttctcggcgtctccttcgttggcgcatttctggttgtcggatcttcatttatcttgccctatttacgtcgggttattacgcctaccgtcagcggtattgtggtactgatgatcggcttaagcctgattaaagtcggcattatcgattttggtggaggatttgcagccaaaagcagcggtacgttcggcaattacgaacatctcggcgttggtttattggttttaattgtggtgatcggctttaactgctgtcgcagtccgttgctacgcatgggagggatcgccattgggctatgtgtcggctatatcgcatcgttatgcctgggcatggtggatttcagcagtatgcgcaatttgccgttaatcaccatcccgcatccgttcaaatacggctttagttttagcttccatcagttcctggtggttggcacgatttatctgcttagcgtgctggaagcagtcggcgatatcaccgccacggcaatggtttcccgccgacccattcagggagaagagtatcagtcccgactgaaaggcggcgtgctggcagacggtctggtttctgttatcgcctccgctgtcgggtcattacccttaaccacgtttgcgcaaaataatggggttattcagatgactggcgtcgcttcacgttatgtcgggcgaaccatcgcggtaatgctggttatcctcggtttgtttccgatgattggcggcttcttcacgaccattccctcggcagttctgggaggcgcaatgacgttgatgttttccatgattgccatcgctgggattcgcataatcatcaccaacggtttaaagcgccgagaaacacttattgtcgccacttctttaggtttaggacttggcgtctcctacgatcccgaaatttttaaaatattgccagcctctatttatgtactagttgaaaaccctatttgtgctggcgggttaactgcgattttattaaatattatcctccctggtggctaccgacaggaaaacgttctgcctggtattacctcagcggaagagatggattaacagtaaaggagtcaatgatgtcaggagaacacacgttgaaagcggtacgaggcagttttattgatgtcacccgtacggtcgataacccggaagagattgcctctgcgctgcggtttattgaggatggtttattactcattaaacagggaaaagtggaatggtttggcgaatgggaagacggaaagcatcaaattcctgacactattcgcgtgcgcgactatcgcggcaaactgatagtaccgggctttgtcgatacacatatccattatccgcaaagtgaaatggtgggggcctatggtgaacaattgctggagtggttgaataaacacaccttccctactgaacgtcgttatgaggatttagagtacgcccgcgaaatgtcggcattcttcatcaagcagcttttacgtaacggaaccaccacggcgctggtgtttggcactgttcatccgcaatctgttgatgcgctgtttgaagccgccagtcatatcaatatgcgtatgattgccggtaaggtgatgatggaccgcaacgcaccggattatctgctcgacactgccgaaagcagctatcaccaaagcaaagaactgattgaacgctggcacaaaaatggtcgtctgctatatgcgattacgccacgcttcgccccgacctcatctcctgaacagatggcgatggcgcaacgcctgaaagaagaatatccggatacgtgggtacatacccatctctgtgaaaacaaagatgaaattgcctgggtgaaatcgctttatcctgaccatgatggttatctggatgtttaccatcagtacggcctgaccggtaaaaactgtgtctttgctcactgcgtccatctcgaagaaaaagagtgggatcgtctcagcgaaaccaaatccagcattgctttctgtccgacctccaacctttacctcggcagcggcttattcaacttgaaaaaagcatggcagaagaaagttaaagtgggcatgggaacggatatcggtgccggaaccactttcaacatgctgcaaacgctgaacgaagcctacaaagtattgcaattacaaggctatcgcctctcggcatatgaagcgttttacctggccacgctcggcggagcgaaatctctgggccttgacgatttgattggcaactttttacctggcaaagaggctgatttcgtggtgatggaacccaccgccactccgctacagcagctgcgctatgacaactctgtttctttagtcgacaaattgttcgtgatgatgacgttgggcgatgaccgttcgatctaccgcacctacgttgatggtcgtctggtgtacgaacgcaactaataataaaactttaacatcctcgtgaggacatcattatgtctggagacatcctacaaacaccggacgcaccaaagccacagggcgcgctggataattattttaaaattaccgctcgtggcagtaccgttcgtcaggaagtactggctggcttaacgacctttctggccatggtttattccgttatcgtcgttccgggaatgctgggcaaagcaggttttcctcccgcagctgtgtttgttgccacctgtctggtcgcgggcttcggctcgttgctgatggggttgtgggccaatttgccaatggcgattggttgtgcgatttccttgacggcatttaccgcattcagtttggtactcgggcaacaaattagcgttcctgtcgcactgggcgcggtctttctgatgggcgtcatcttcaccgctatttccgtaaccggtgtgcgtacctggatcttacgtaatttaccgatgggtatcgctcacggtacaggtatcggtatcggcctgtttctgctgctgattgctgctaacggtgtgggtatggttatcaaaaacccgattgaaggcttgccagtggcgctcggtgcgtttacctccttcccggtgatgatgagcttgctggggctggcggtcatcttcggtctggagaagtgccgcgtacccggcgggatcttgttggtgattatcgcaatttcgattatcggcttaatctttgacccagcggtgaaataccacggtctggtggcgatgccaagtctgactggcgaagatggtaagtctctgattttcagcctcgatattatgggcgcactccagccaaccgtacttccgagtgtactggcattggtgatgaccgcagtgttcgacgccactggcaccatccgtgccgtcgccggtcaggcgaatttgttggataaagacaaccagatcatcaatggcggcaaagccctgaccagtgactcagtaagttcaatattctccggtctggtgggcgcagcgcccgcagcggtttatatcgaatcagcggcaggaaccgccgccgggggtaaaacagggttgaccgcaaccgtagtgggggcgttattcctgctgattctgttcttatcaccgctgtcatttttgatccctggttacgccactgcacccgctctgatgtacgtgggtttgctgatgttaagtaacgtctcgaagctggatttcaacgattttattgacgcaatggctggcctggtgtgtgccgtgttcatcgttctgacttgtaatatcgttaccggtattatgctgggctttgtgacactggtcgtaggccgtgtctttgctcgcgaatggcaaaagttgaatattggtacggtgatcattactgccgcactggtcgcattttacgcgggtggttgggcaatctaatagattctccgcgcctttcagcgcggagatttctttcacagaggattctcaccgctggcaacaatacgctgctggcggactcgcctgagttctctttcagtaagcaactgcagcgcctgtgtcgggcaagattcaacacaggctggcccctcttcccgctgttcacagagatcgcatttcacaatttgttgtcgggtatcccccggcaacgactgaatggtgatcattccaaacgggcacgcactgacgcaactctgacagccaatacaacgggcagaattggtctgcaccacctgctcgcccatcgtcagcgcccccacggggcaagcgccaacacaaggggcgttttcacactgatggcacatcaccggcgcactgatgctgtccagtcgctgtaccttcagccggggtaaaaagacatcggcattcaactcctgttctgaagggtgagcgaccacacaggctacttcacaagtacggcagccaatacagtcagccggattaacgataattaacgatttcatcacgatgccttcgtatcaaacagagttaacatatcgcgcgccgcctgccttcctgcggccattgcagtgacaaccagatccgcgccatgaactgcatcaccaccagcaaagacttttttcagatgcgtctgggtaggtaaatacccgacgtcaccggtttgaatcaggccccatttatcgagtttaattccgctgccctgcaaccacggcatggcatgcgcctggaaaccaaaggccataatcagaacatcggcgggcaattcaaactctgaacccgctaccggacgaggacgacggcgaccatccggccccggctcacccatggcggtacgaatcaggcccaccgcagttaaacgcccatcttcgtcacaagcgatatattgcggttgaacattgaactgaaactcgacaccttcctcgcgcgcattaaccacctctttgcgcgagcccggcatactgacttcatcacgacgatacgcgcaggtcacgctggcggcattgaggcggatggaagtccgcaaacaatccattgtcgtatcgccaccgcccaataccacgactcgcttaccttccacgtccgtcagcggatactcttcagactccggcaatcccatgagctggcgggtatgggcagtcaggaacggtagagcctgaatgacaccgggcgcatcttcatgcggcagatctgctcgcatcatcccgtaagtccccacgccgatgaaaactgcatcatattcagaagttaaatcgctaaaggtaatatcgcggccaatttcacagttaagatgaaagtcgattcccattgcggtgaatatctctcgccgctggcttaataccgttttatcgagtttgaaaggaggaatgccaaaagtcagcataccgccaatttctggatggcgatcaaagacatcaacctgaactcccgcgcgcgccagaatatcagcacaccctaaccctgctggcccagcgccaatcaccgccactttttcgctacggggaacaactttgctgacatcgggacgccagcccatcgccagcgcggtatcggtgatgtagcgttccagattaccgatagagactgcgcccgagtgatctttcaaagtacatgcgccttcacaaagacggtcctgtggacataccctgccgcaaatttctggtaaggaactggtctggtggcaaagttctgccgcttcaataatctttccttcctgtaccagacggatgtaatccggaatagcgttatgcagcgggcaatgccagttgcagttagctttttcggcacaataaacacagcggtcactctcataagtcgcttgcagtggatccagcccgcaatatatttcgccaaagtgggttttccgttcactcgctgaaattttatctgcgcctttacgcgagttaacggggagcaacgctgcactgcgagatggctgagcgtctgatgacgcttttcctgctgccgttttgcgctggcgagccacctttatccactgtaaccctttatcgtccatcagtcgtaacgcctgtgttgggcagacttcaatacaggcttgcgtgccggaactgcgctggttacaaaggtcgcatttctgcgcaatcgtatcgaccatctcaacgacgccaaaggggcaagcgattgcgcatcttttacagccaatacatttttgctcgtccagttgtacgctatcggactggaaagtcagagcattaaccggacaagccgtaacgcaaggggcattgttgcagtgatggcaggccaccggattcgcagcctggcctttccctacaacgtggatacgcggtcgaaagtcactgtgactcagcggccagttttcttgattgtgtgccaccgcacaggcaatttcacaagcatgacagcctatacattccgcagcttcagcagcgataaacttattcatttgcatccctttcatttaatgagttatgtcttctcaaatttcgcgatgcaataaacgggcatatattaggtagcatgaccgttttaattataattttgcgactgagttcaaattattgcccctcaatctatgccgctttcattatttcaacattgccgatcaaaagagcgctatccagataaaaacgattaaatgcgagagtgcgacatgccagaatgattaatgaaatatcaatatgagaaaattacagataattccattgtcaggttctcttctcattttcgtggtttaaccacgattatgtgattgcctccgcaattcctgtctctaactccccttcctcgcaaaaactggcactccacgagcatgtgtttagacagtttcattaacgtaaacggttgctttttactctggcgggcgaaaggagaaacactgatgagcgccatagattcccaacttccctcatcttctgggcaagaccgcccaactgatgaggttgaccgcatattatcaccaggaaagctgatcatactcggtctgcaacacgtccttgtcatgtacgcaggtgcagtcgctgttcctcttatgattggtgaccgactgggcctctcaaaagaagctattgcgatgctcattagctcggatctcttttgctgcgggatcgtcacattattgcaatgtatcggtatcggccgctttatggggatccgcctgccggtgattatgtcggtgacctttgctgctgtaacaccaatgatagccattgggatgaacccggatatcggcctgctggggatatttggtgccactatcgccgcgggttttatcaccacattattagcgccacttatcggtcgcttgatgcctttattcccgccactggttaccggtgtggttattacttctattgggcttagcatcattcaggtgggtattgactgggccgccggaggtaaagggaatccgcaatatggtaatcccgtttatttaggtatctcctttgctgtcttaatttttatcttgctcattactcgctatgcgaaaggatttatgtccaacgtcgccgtattactggggattgtatttggctttttactttcgtggatgatgaatgaagtcaatttatccgggctacatgatgcttcatggtttgcgattgtcacgccgatgtcatttggtatgccgattttcgatcccgtttccattctgaccatgactgccgtgttaatcatcgtgtttatcgagtcgatggggatgttcctggcactgggtgaaatagtcggtcgtaaactctcttcacacgatattattcgcgggctgcgtgtcgatggcgtagggacaatgataggcggaacgtttaacagcttcccccacacgtcattttcacaaaacgttggcctggttagcgtgacgcgcgttcatagccgctgggtgtgtatttcttcgggaattatattaatcctgtttggcatggtgccaaaaatggcggtgctggtcgcctccattccgcaatttgtgctgggcggtgctgggctggtgatgttcggcatggtactggcgacagggattcgaattctgtcgcgctgtaactacaccaccaaccgttacaacctctatattgtggcgatcagtctcggcgttggcatgactccgacgctctctcacgatttcttttctaagttaccggccgtactgcaaccgttgctgcatagcggcattatgctcgcaacccttagcgccgttgtgctgaatgtcttctttaatggctatcagcatcatgctgacctggtgaaggaatccgtctctgataaagatttaaaagtcaggacagtacgtatgtggcttctgatgcgcaagctgaagaaaaatgagcatggagaataatatgaattttttaatgcgcgctatattcagtctgctgttgctttttactctctctattcctgtcatttctgactgtgttgcaatggccattgaaagtcgcttcaaatatatgatgctacttttttaaatggtttttacctgtcggcatccgctcaaaacgggcggttgtcgataaacgctcacttggttaatcatttcactcttcaattatctataatgatgagtgatcagaattacatgtgagaaattatgcaaacggaacacgtcattttattgaatgcacagggagttcccactggtacgctggaaaagtatgccgcacacacggcagacacccgcttacatctcgcgttctccagttggctgtttaatgccaaaggacaattattagttacccgccgcgcactgagcaaaaaagcgtggcctggcgtgtggactaactcggtttgtgggcacccacaactgggagaaagcaacgaagacgcggtgatccgccgttgccgttatgagcttggcgtggaaattacgcctcctgaatctatctatcctgactttcgctatcgcgccaccgatccgaatggcattgtggaaaatgaagtgtgtccggtatttgccgcacgcaccatcagtgcgttacagatcaacgatgatgaagtgatggattatcaatggtgtgatttagcagatgtattacacggtattgatgccacaccgtgggcgttcagtccgtggatggtgatgcaggcagccaatagtgaagcaagaaaattgttgtctgctttcgcgcagcacaattaaaaaaccccgacatttgccggggttgtgagcataacgtaatgcttattttaccggacgcatcgccgggaacagaataacgtcgcggatggtatggctgttggtgaacagcattaccatacggtcgatgccaatccccagacctgctgtcggcggtaagccatgttccagtgcggtaacgtaatcttcatcgtagaacatcgcttcgtcgtcacctgcgtctttcgcggcaacctgatccaggaagcgttgcgcctgatcttccgcgtcattcagctcgctaaagccgttaccgatttcacgaccaccgatgaagaactcaaagcggtctgtgatttccgggttaatgtcgttacgacgcgccagcggagaaacttctgccggatattcagtaatgaaggtcggctgaatcagatgtgcttctgccacttcttcgaagatctcggtaacgatacggcccagaccccagctcttctcaacgtggataccgatagattcagcaatcgctttcgcagagtcgaagttatccagatccgccatgtcggtttccgggcgatatttcttgatcgcttcacgcatggtcagtttttcgaacggtttaccgaagtccagcgtcacgtcgccgtaggtcacttccgtcttaccgagaatatcctgtgccagagtacggaacagcgattcggtcagctcgatcagatctttgtaatctgcgtaagccatgtagagttccatcatggtgaactctgggttatgacgtacggaaataccttcgttacggaagttacggttgatttcgaatacacgctcgaagccaccgaccaccagacgcttgaggtacagttccggcgcgatacgcaggtacatgtcgagatccagcgcgttatggtgggtgataaacggacgcgcagcggcaccgcctgggatcacctgcatcatcggcgtttcaacttccataaagccgcggttcaccatgaactggcgaataccagagaggatctgcgagcgtactttaaaggtgttacgggattcatcgttagagatgagatccagataacgctgacgatagcgcgcttcctgatcctgcaagccgtggaatttatccggcagcggacgcagtgctttggtcagcagacgcagctcggtacagtggatagacagttcgccggttttggttttgaacagtttacctttcgcgccgaggatgtcgccgaggtcccattttttgaactgctcgttgtaaacgccttccggcagatcgtcacgggcaacgtacagctgaatgcggccacccacatcctgcagggtaacgaaagacgctttacccataatacggcgggtcatcatgcggccagcaacggcgacttcgatgttcagcgcttccagttcttcgttctctttaccgtcgaattctgcgtgcaattggtcagaggtatgatcgcgacggaaatcgttcgggaaggcaatcccctgctcgcgcaggttcgccagcttctcacgacgcgttttcagttcattgttaagatcgactaccgcgtcagcgccctgtgcgtgttgttcagacatgttggttcctcataaccctgctttcaaacttgcttcgataaattgatccaggctgccgtccagcacggcctgcgtgttgcgggtttctaccccggtacgcagatctttaatgcgggagtcatcaaggacataagaacgaatctggctgccccagccgatgtcggatttgttatcttccatcgcctgtttctcggcatttttcttctgcatctccagttcataaagcttcgctttcatctgcttcatggcctggtctttgttcttgtgctgggaacggtcgttctggcattgggtcacgatcccggttgggatgtgggtaatacgcaccgcagattcggtacggttaacgtgctgaccgcccgcgccggacgcgcgataaacgtcaatgcgcagatccgccgggttgatttcgatatcaatatcatcatcaacttccgggtaaacaaacgcagagctgaacgatgtgtggcgacgaccgccggagtcaaacgggcttttacgcaccaggcggtgaacgccagtttctgtacgcagccagccgtaagcgtaatcgccggagattttgatcgtcacggatttaatacccgccacttcaccttccgactcttcgatgatttcagttttgaaaccacgcgattcagcccagcgcagatacatacgctcaagcatgctcgcccagtcctgtgcttccgtaccgccagaccccgcctgaatatcgaggtagcagtcggcgctgtcatattcgccagagaacatacggcggaactcaagctgcgccagtttttcttccagggcgtcgagttcagcaacggcttcgttaaaggtttcttcgtcgtcagcttctacagccagttccagcagaccagaaacatcttccagcccctgtttcatttggtcgagggtgtcgacaacggcttcgagggaggaacgctctttacccagcgcctgtgcgcgttcgggttcgttccagacatccggctgttccagctcggcgtttacttcttccagacgctctttcttggcgtcgtagtcaaagataccccctaagaacgtcggagcgttccgtgaggtcctgaatgcgattatttaccggattaatttcaaacatggtctgatttcttttattgagctagtcaaaatgcggtgataagagcgggattgtacccaatccacgctcttttttatagagaagatgacgctaaattggccagatattgtcgatgataatttgcaggctgcggttgccgcgaaactcgttgatatcgagcttataagccagttgcacttcacgcacgccgttatccggccagagggcggtatcgacattaaaagcaataccatccagcagtggaccgccgccgaccggttcgaccatcaccttcaaatgacgttcgcccaccagccgctgttgcagcagacggaaatgaccgtcaaacagcggctccgggaacatctgcccccacgggccagcatcgcgcagcaactgcgccacttccatggtcatttcggccgggcttaacggaccgtctgacaccacttcgccttgcaatagcgaagggtccagccactctgtaaccagttcgccaaaccgttgttgaaagagttcgaatttatcctcttccagcgacaaacccgccgccatcgcatgaccgccaaacttcagtatcatgccagggtagagtgtgtctaatcgctccagtgcatcacgcatatgcagcccctgaatggagcgacctgaacctttcagcgtaccatcacctgctggcgcaaaggcgataaccggacggtgaaaacgctctttgatgcgcgaagccagaataccgacaacgccctgatgccattcggggtgatacattgccagcccgccgggtagcgtgtcgcgacttcgctccagtttctcgcacagggtcagggcttcaacttgcattccttgttcgatctcttttcgcgtctggtttagcgcatcgagttcatttgccagcacgcgcgcttcgccgatgttgtcgcacagcaacagcgccacaccgacggacatatcgtccagtcgcccggcagcattgagacgtggccccagcgcaaaacctaaatcgctggcggcgagtttttgcgcatcgcgatttgccacttccagcagcgctttaatccccggacggcactttccggcacggatgcgactcatcccctgccaggtcagaatgcgattattagcgtccagcggcacgacgtccgccactgttcccagcgcgaccagatccagcagttctgccaggttaggaattgcgatgccacgctcatcaaaccagccctgatcgcgcaaaaaggtgcgcagcgccagcatcagataaaacgccacacccacgcctgccagtgatttcgacgggaaattacagtcgcgcaagttagggttaatgatcgcttccgccgcgggtaatgtttcgcctggcaaatggtgatcggtaacaataaccggaatgcccaacgagcgagcgtgtacaacccccgcatgggaggaaataccgttatccaccgtgacaattaactgcgcgccacgggcatgggcctgatcgaccacttccgggcttaagccgtaaccgtcttcgaaacggtttggtaccaggtagtcgatattgctgcaaccaagcgagcgcatcgccagcacgcttagagccgtgctggtcgcgccgtcggcgtcgaaatcaccgaccacaataatccgcgttccttcgcgaaaagcgttgtaaaggatctcaacggccttttcgacaccgctcagttgctgccagggcaacatacctttaacactgcgttccagttcttgcgcactgcgcacgccccggctggcgtataaacggcgcagcaagggaggcaattcagcgggcaagtctgccgtttcatcgacttcacggcgacgaagttgtatctgttgtttcacgcgaattatttaccgctggtcattttttggtgttcgtcgaggaattctttcatctctttcggcggctggtaacccggaacaagtgtgccattgctcagcacaactgccggagtaccgctaacgccaagctggacgccaagtgcgtaatggtcggcaatatccacgtcgcagctggctggtgcggcgcttttacctgccatcacatcatcaaacgctttgtttttatctttcgcacaccagatagctttcatttctttctctgcatcgctgtccagcccctggcgcgggaaagcaagataacgcacggtgatccccagcgcgttatagtctgccatttgctcatgcagtttgtggcagtaaccacaggtaatatcagtaaacacggtgatgacgtgtttttcctgcggcgctttataaacgatcatctctttttcaagcgcattcaactgctttaacagcatcttattggtgacattgaccggagccgtgccgctaacgtcatacattggcccctgaatgatatgtttaccatcatcggtgatgtacaacacgccgctgttagtcagaactgtcttcatgccagctacgggcgcgggctgaatatcgctgcttttgatgcccattttggctaacgtttgttgaattgccgcgtcatcagcctgagcaaaacctgaaaacgccgctaacaaagtaaacaacataaaacctttcttcataaatcttcccgttcttttcagacatcacgcccgcgggtgatgctgttgatgaagttgccgcagacgctcggtagcgacatgcgtataaatttgcgtggtggagaggtcgctgtggcccagtagcatctgcaccacgcgtaaatccgcaccatgatttaataaatgggtggcaaaagcgtgacgcaatacatgcggtgacagcttttcgctgtcgatacccgccagcacagcataatgtttaatgcggtgccagaaggtctgtcgcgtcatctgctgcgcacgctggctgggaaacaacacgtcaattgacacaccattcagcagccacggacgcccatgttccagataggtttccagccagtaaaccgcctcttcacctaacggtaccaggcgctctttgttgcctttaccaatgacccgcactacgccctgacgcaggctgatatcactcattgtcagtccgaccagttcagagacacgcagcccggtagcatacaacacttcaagcatggctttatcgcgtagctccagtggctgatcaattaatggtgcctgtaataaacgttcgacctgcgcttcgcttaaatcttttggcaaacgctggggcaatttcggtgaagcgagatgcgcactgggatcgtcttcacgaaacttttcgcgataaagatactggaacaatcggcgcactgcactcagcaaacgcgctgagctggtggctttatacccgccctccagccgttctgccagtaatgcctgcaaatcgtcactttgcgccgtcgccagcgtcaacccgcggtgatgcaaccactccaccatcattgacagatcgcgacggtaagcgttcaacgtattttcagccagatttttttccagccacagagcatcaagaaactgctcgatgcgtgccagatcctgtttcacttgcgccccttatggtcactcatttgatccattatgccttattgtgccgtgactaaagcgattctgatacactagctgcaaaagccacagcagaatcgagaagcttacgttatgaatatgggtcttttttacggttccagcacctgttacaccgaaatggcggcagaaaaaatccgcgatattatcggcccagaactggtgaccttacataacctcaaggacgactccccgaaattaatggagcagtacgatgtgctcattctgggtatcccgacctgggattttggtgaaatccaggaagactgggaagccgtctgggatcagctcgacgacctgaaccttgaaggtaaaattgttgcgctgtatgggcttggcgatcaactgggatacggcgagtggttcctcgatgcgctcggtatgctgcatgacaaactctcgaccaaaggcgtgaagttcgtcggctactggccaacggaaggatatgaatttaccagcccgaaaccggtgattgctgacgggcaactgttcgtgggtctggcgctggatgaaactaaccagtatgaccttagcgacgagcgtattcagagctggtgcgagcaaatcctcaacgaaatggcagagcattacgcctgatctcactgacggcttagcgcatatgctttgccgtcatctttatctttgcgtctcttgttgcaacaaaatccgccgtaaatcccgccattcggcttcgtccatgctgtcggctgccagccataaatgttgccgtttaccgccatcagaacgtaaacgcagcatcatgccgctcttaatcatccacggtgctttgacgatgcaccactcctgcccttgccaacgcaaacgcccgtccatcaacaagcgaatttccccctggcgagcattaatacgccgctggctgcgaacgcaatcaaacaccaccagcgaaagtaacaccatccataacggggtgtaactgagtggccagggcatgagtaaaataacagcggcaaccagcccatgaatcagcaaggaaagccactgtgcgcgccaggagacgcgcaaatcagattgccacaggaccacgttcccggttccgtgtctggatgagtcggaccatcatttccagttctgcatcggccggtttaccgtgattcatcagccagttaaacaggtccggatcgtcacattccagcagacgaataaagatgcgtttttcgtcatcgcttaagctgtcgtactcatgttcgaaaaacggcatgattgaaatatcgagttcgcgcataccacggcggcatgcccaatgaatgcgggctttgttgttaatgtccatcttcttcctgtctcacgaaaatccagtacccggctattgtaacgtgtttttcgccttcttttacgggaatatcagtaaacaccatcgcgatcgcgaaattaattcacaacaattcaatggcttcatttttttggaagtcgcctcgcagaaggcacagatcgcgtagtgaaagcacttgcattgcctcatagctcttttaccattagtcattaatacgccgttaagcaactcaggactctattatggcttttacaccttttcctccccgtcagcctacggcttctgcccgtttaccgctgacgctgatgacgcttgatgactgggcgcttgccaccattactggcgcggacagcgaaaaatatatgcagggtcaggtgacagcagatgtcagccagatggcagaagatcagcacctgctcgccgcccattgcgacgccaaaggtaaaatgtggagcaatttacgtctgttccgcgacggcgatggctttgcatggattgaacggcgcagcgtgcgtgaaccgcagctgactgaactgaaaaaatatgcggtattctctaaagtgaccatcgcgccagacgacgagcgtgtgctgcttggtgttgccggttttcaggcgcgcgccgcgctggcaaatctctttagtgaactgccttcgaaagaaaaacaggtagttaaagaaggcgcgaccactttgctatggtttgaacacccggcagaacgtttcctgatcgtaaccgatgaagctactgctaatatgctgaccgataaactgcgcggtgaagcggaactgaacaatagccaacagtggctggcattaaacattgaagcgggtttcccggtgattgatgccgccaacagcgggcagtttatcccacaggcgaccaacctccaggcgctgggcggcatcagctttaaaaaaggctgctataccggacaagagatggtggcgcgagcaaaattccgtggtgccaataaacgtgcgctctggttgctggcaggtagcgccagccgactgccggaagctggtgaagacttagagctgaaaatgggcgagaactggcgtcgtaccggtacggtgctggctgcggtaaaactggaagatggtcaggtcgtggtacaggtcgtcatgaataacgatatggaaccggatagcatcttccgcgtacgcgacgatgcgaatacactgcatatcgagccgctgccgtattcgctcgaagagtaaatctctttatcgcatcaggcatttatcgcctgatgcgacgctggcgcgtcttatcaggccttgtattatccctccagtgcagagaaaatcggccagttttctctgcctgcagtccgcatgccgtatcgggccttgggttctaacctgttgcgtagatttatgcagcggactgcctttctcccaaagtgataaaccggacagtatcatggaccggttttcccggtaatccgtatttgcaaggttggtttcactatggagcatgaacttcattatatcggtatcgacaccgctaaagagaaactggatgtcgatgtgttgcgtcctgatggtcgtcatcgcaccaaaaaattcgctaacaccactaaagggcacgatgagctggtgagctggctgaaaggtcacaagattgaccatgcgcatatctgcatcgaagcgaccggcacctatatggaacctgtcgctgagtgcctttacgatgctggctacatagtgtcagtcattaatcctgcgctgggtaaagctttcgctcagagtgaaggactgcgtaacaagactgataccgtggatgcgcgcatgctggcagagttctgtcgtcagaagcgccctgcagcctgggaagcgcctcacccgcttgaacgcgcgttgcgtgccctggtagtccgccaccaggcgctgacagatatgcacacgcaggaactgaatcgcgctgaaacggcgcgggaagtccagagaccgagcattgatgctcaccttctgtggcttgaagcagagctgaagcgtcttgagaagcagataaaagacctgacagacgatgatccggatatgaaacaccgcaggaaactgctggaaagcatcccgggtatcggagagaaaacatctgcggtattgctggcttatatcggtctgaaggaccgcttcgcccatgccagacagttcgccgcttttgcgggtctgacaccacggcgttatgaatcaggtagcagtgtgagaggggcgagccggatgagtaaggccggacatgtgtcgcttcgcagggcgttgtatatgcccgcaatggtagccaccagtaagactgagtggggacgggcgttccgcgaccgtctggcggctaatggcaagaaaggaaaggtgattctcggcgcgatgatgcgcaagctggcacaggtggcgtatggagtgctgaagtcaggcgtgccgttcgatgcgtcacggcataatccggtagcggcgtaaaaatcgcggaagggatgaaaaaaacagcgcctgacggcgctgtgtctggcatgcctgcaatccgggaaaccggaccaggaaaaaacttgcaggccataacagtatctacaaaggcatacccattacgcctgcccaatatacaaatagatcgccagaaagtggcacacactaccgccgagcacgaagccgtgccagatggcatggttgtatggaatgcgtttgcagacgtagaaaatcaccccgagcgaataaaccacgccgcctaccgccagtaaggtaacgctgcccgccgcgagcttaactgccatttcataaattaccaccagcgacagccagcccatcgccagataggtcaccagagataaaattttgaatcggtgcgcgatggtcagtttaaacagaatacccagcaatgccaggctccagataacaatcatcaacccgcgcgctaacggagaatccagccccaccagcaaaaacggcgtgtaggttccggcaatcaacaggtaaatagcgcaatggtcaaatttcttcagccacatttttgcccgttgatgaggaatggcgtgatagagcgtcgaagcgaggaacagcaggatcatactgccgccatagaggctgtaactggttatcgctgtggcgctggcattgagatccaccgcctgaaccagtagcaacaccagcccaacgataccaaacaccaacccaatgccgtgactgacgctgttggcaatttcctctgccagcgaatatccctgcttaatgaggggcttctgaaccataacttactccggagaaacgtacacgcacatgtatacctctccagcgtaactgagaatagttccagtgaacacctgttagctaaaataaattctgatttgagactaatctcctaaaaatcatgaaattaaatgcgaaatttcaactaacaggcgtgagttcaatttaaagacatttaaattcaatcacataaaactgtgtctgaccgggatagatgtcggcaatgacctttatcagttcagtcagggtcatattttcctgctctgcatgtttttccgtcagcgtatccagcgttacggttgaggttgcggtgacttcaatcgtgcaaaaataaccgtcatcttcaaaacgcccgacacgaagcacatcacccgttttgaagtgcgattcagactcgtcgcggatggtgatggttttacgcccagccagaatgtcatcctggaaacgttgaaaaaaagtgatgtcgtttggctgcatggtactatttcctgtaagaattgactcatctggagcctatgatagtgaaaaaactcaccttaccgaaagatttcttatggggcggcgcagttgccgctcatcaggtcgaaggcggctggaacaaaggcggcaaagggccgagcatttgtgacgttctgaccggtggcgcacacggcgtgccgcgcgaaatcaccaaagaagtcttgccaggcaaatactatccaaaccatgaagccgttgatttttatggtcactacaaggaagacatcaagctatttgccgaaatgggcttcaaatgttttcggacttccatcgcctggacgcgtatttttccaaaaggtgatgaagctcagccaaacgaagaagggctgaagttctacgatggtatgttcgatgaactgctgaaatacaacatcgaaccggtgatcaccctctcccactttgaaatgccgctgcatctggtgcagcaatacggtagctggaccaaccgtaaagtggttgatttctttgtccgtttcgcggaagtggtgtttgaacgctataagcataaagtcaaatactggatgaccttcaacgaaattaacaaccagcgtaactggcgtgcaccgctgttcggttactgctgctccggcgtggtttataccgagcatgagaacccggaagagacgatgtatcaggtgctgcatcaccagtttgtcgccagcgccctggcggtgaaagctgcgcgtcgcattaacccggagatgaaagtcggctgtatgctggcgatggtgccgctctatccctactgctgtaacccggacgatgtgatgttcgctcaggagtcgatgcgcgaacgctacgtctttaccgatgtgcagctacgcggctattacccgtcctatgtgttgaacgagtgggagcgtcgcggatttaacatcaaaatggaagacggcgatctcgatgtactgcgtgaaggcacctgcgattatcttggtttcagctattacatgaccaacgcagtgaaggccgaaggcggcaccggcgatgcgatctctggttttgaaggcagcgtaccgaacccgtatgttaaagcgtctgactggggctggcagattgatccagtaggtctgcgctatgccctttgcgaactgtatgagcgttatcagaggccgctgtttattgtcgaaaacggttttggcgcttacgacaaagtggaagaagatggcagcatcaacgacgactaccgcattgactacctgcgcgcccatattgaagagatgaaaaaagcagtgacttacgatggtgtggatctgatgggctacacaccgtggggctgcatcgactgcgtgtcattcactaccgggcagtacagcaaacgctatggctttatctatgtgaataaacatgacgacggtactggcgatatgtcgcgttcacgtaagaagagctttaactggtacaaagaggtgattgccagcaacggcgagaagctttaagtcgatgaagtaccggatgcaatacttgttgcatccggtcagacaacttccctgttttatttcccgcccgccaaatcgataaaacttcccgtgacgtaagaggctttatcacttagtagccagacaatggcctgcgcgacctcttctgcctgtccaccacgctgcatggggatgttcgacttaacgcgatcgacgcgtccaggctcgccgccgctggcgtgcatttcggtataaataaaccctggccgcacgcagttaacgcggatcccctgcgcggcgacttccagcgatagtccggtggttaacgtatcaatcgcccctttcgatgccgcgtaatcaacatattcccctggcgaacccaaccgtgaggccaccgaagagacattgacgatagcgccgccactgccaccatttttaagcgccatgcgttttaccgcctcgcggcagcagagaaaatatcccgtcacgttggtggaaagtactcggttgattcgctctgcggtaaggttttcaacggtgcactgggtaaacaagatcccggcgttattgaccagcgctgctagcggttcatcgtgctgatcgattgctgtaaacatcgcaacgacctggttttcgtcgctgatatccgcctggagcacgaatgctttgccaccggcttgcgttattaagttcatcacttcctgcgccgcgtggaggttttgctgataattaaccgccaccgtatacccttcttgcgccaacagtaatgcagttgcccgcccgatgccgcgactgccaccggtcacaagtgctatagccatttgtttttccgagaaaaattcattcgttgacgtatctttgagattgctaacaaactggctcaatcttcaatgttggcacgcttttccccctcgcctttcagggagagggccggggtgagggtaaatattcgcgccagtgccggcctgttcccctcaccctctccccaaaggggcgaggggactgtctgagcacttttgtactttgtcatctgactaaaaaggcgccgaagcgcctttagaaaatagtcgaatcagtgaattactggtattcgctaatcggtacgcaggagcagaacaggttacggtcgccgtaaacatcatccagacgtttcaccgtcggccagtatttgtctgccacacctgccgggaatactgcaacctcacggctgtacggatgcgcccactcggcgaccagttcgttctgaatgtgcggcgcgttcaccagcgggttatcttccagcggccagacaccggctttaacctggtcgatttctgcgcggatagccagcatcgcgtcgataaagcgatccagttccactttgctttcagattcagtcggttcaaccatcagcgtacccgccaccgggaacgacatggtcggcgcgtggaaaccgtagtcgatcaggcgcttggcaatatccagctcgctgatgccggtttcttctttcagcgggcgaatatcgagaatacattcgtgcgccacgcgaccgtcgcgaccggtatacagcaccgggaaggcatcctgcaggcggctggcaatatagttggcgttgaggattgccacctggcttgcttttttcagcccttctgcgcccatcatgcggatgtacatccagctgattggcaggatagaggcgctaccgaacggtgccgcagaaactgcgccctgacgggttaacatgccttcgatttgcaccacgctatgacccggtacaaacggtgccagatgcgctttcacaccgatcggtcccatacccggaccaccaccgccgtgcggaatgcagaaagttttatgcaggttgaggtgcgaaacgtccgcgccaataaagcccggcgaggtgatgccaacctgggcgttcatgttcgcgccatcaaggtaaacctgaccgccgaactgatgcacgacttcacacacttcacggatcgtttcttcatacacgccgtgggtagaaggataagtcaccatgatacaggagaggttatcgcccgcctgttccgctttcgcgcgcagatcagtcagatcgatgttgccgtttttatcacacgccacaaccaccacctgcattcctgccatatgtgcagaagcggggttagttccgtgcgcagaagccgggatcaggcagatatcgcgatgcccttcgttgcggctttcatgataatgacgaatcgccagcaggcccgcgtattcgccctgtgcgccggagttcggctgcatacaaacggcgtcgtaaccggtcagtttcaccagccagtcagccagctgcgcaatcatctgctgataaccttcagcctgttccggcggacaaaacgggtgcagttcggcaaattccggccaggtgattgggatcatctcggcggcggcgttcagtttcatggtgcaggaacccagcgggatcatcgcctgattcagcgccagatctttacgctccagcgagtgcatatagcgcatcatttcggtttcgctgtggtagcgattaaacaccggatgggtgaggatttcgtcgtcgcgcagcatcgcaggctggatagagcggctgtcgtgagccacgtctttgtccagcgtgtcgatgtccaggccgtggttatcgcccagcagcacgttgaaaagctgcattacgttttcacgcgtggttgtttcatcaagggtgatcccaaccgcgttcagaatatcgctacgcaggttgatttcagccgcttcggcacgcgtcagtacgcccgctttgtcggccacttccacacacaaggtgtcgaaatagtgcgcatggcgcagtttcagacctttttgttgcaggcccgccgccaggatatcggtcagacggtgaatgcggttagcgatacgtttcaggccaatcgggccgtgataaacggcatacaggctggcgatgtttgccagcagcacctgggaagtacaaatgttggagttcgctttctcacggcgaatatgttgctcgcgagtctgcatcgccatgcgcagcgcggtattgccagctgcatctttcgatacaccgataatacggcccggcattgagcgtttgtattcatctttcgccgcaaagaaggccgcgtgtgggccaccgtagcccatcggcacgccgaagcgttgcgccgaaccaaaaacaatatccgcgccctgtttacccggcgcagttaacagcaccagcgccataatatcggcggcgacactgaccacaattttgcgtgatttcagttcgctaataagcgcggtgtagtcgtggatttcaccggttgtgccaacctgctgtaacagcacgccgaagacgtcctgatggtcgagcactttttgcgcgtcatcgacaatcacttcaaaaccaaaggtttcggcacgagtacggaccacatccagcgtttgcggatgcacatcggaagccacgaagaagcggttggcatttttcagtttgctgacgcgtttcgccatcgccattgcttcggcggcagcggtggcctcgtccagaagagaagcagaggccatatccagtccagtcaaatccagcgttacctgctggaagttgagcagtgcttcaaggcggccctgggagacttcaggttgatacggagtgtacgcggtataccagcccggattttccagcatgttacgcaggataaccggcggtagctgcacggcggtgtaacccatgccgatgtaagacgtgaagcgtttattgcgactggcaatagccttgagttctgccagtgcggcgtattcggtcgccggtgcgccaacctgcggcggggtcgcaagctgaatatctttcggcacaatctggccggtcagcgcgtttaacgattgtgcaccaacggcattcagcatttcttgctgttgcgcggcgtccggtccgatatggcgttcaataaaagcgccgctgttttcaagctggcttaacgtctgtgtcatgagcgatggttcctgaaacgtgcagtgaattgtgaacctctctccttacgaagagagtgagggtgaggcataaattttcctcaccctgatcctctcccgcagaagaggaataaagccgttactcgtcttctaacaatgcttcgtatgcggtcgcatccagcagtgattccagttcgctttcatcgctggctttgattttaaagatccagccacctgcatacggttcgctgttcaccagttccggggaatcgctcagtgcgtcgtttaccgccacgatttcaccgcttactggcgcataaatgtctgacgccgcttttactgattcggcaaccgcgcagtcatcgcccgcgctaaccgttgcgcccacttccggcaggtcaacaaacaccatatcgcctaacagctcctgggcatgttcggttataccaacggtgtaagtgccgtcggcttctttacgcagccattcgtgttctttgctgtatttcagttctgctggtacgttgctcatcaatcaatctccaaaaaagtaaatcacgcgacggctttaccgttacgcacaaaaacaggtttcgtcactttaaccggcatttcacggttgcgaatttgcacaatcgccgtttcgccaataccttccggcacgcgtgccagcgcaatgctgtaacccagcgtcggggagaaagtcccgctggtgataatgccttcatgctggttgccctgcgcatcggtaaaacgtaccggcagttcattacgcagcacgcctttttcggtcatcaccagaccaaccagtttttctgtgccatgctcacgctgcacttccagggcttcacgaccgatgaagtcacgatctgccggttcccaggcgatagtccagcccatgttggcggctaaaggagaaatagtttcgtccatctcctgaccataaagattcatgcccgcttccagacgcagcgtgtcacgcgcgcccagaccgcatggcttaacgcccgcttccaccagcgcacgccagaaatcggccgctttttcattgggcagcgcaatttcatagcccgcttcaccggtataaccagtggtggcaataaacagatcgcccgcctgcacgccaaagaacggtttcatcccttccaccgcctgacgctgagcatcattaaacagtgtggcagcttttgcctgcgcattcggcccttgtacggcgatcatggaaaggtcatcacgaacggtaatttcgatgccgaaaggttcagcgtgttgggtaatccaggagaggtctttttcgcgagtggcggagttaacaacgaggcggaagaaatcttcagtaaagtagtagacgatgaggtcatctatcacaccgccagaggcattcaacatccccgagtaaagggctttgccgcttttggtgagcttcgccacatcgttcgccagcagataacgcagaaactcccgggtgcggctgccgcgaagatcgacgatggtcatatgtgacacatcaaacattccggcatcggtacgtaccgcatgatgttcgtcgatttgcgaaccgtaatgcagcggcatcatccagccgtggaaatccaccatgcgagcgccgcaaagcgtgtgttgttcgtacaaaggagtctgttgtgccatcttgtcctcattgaataagcggggctgacaactttttcatggtgaaattatcaccacgaaacccagcatcggagccactcccggtccccaacgcaatcgttctcttttgcctgaacttaccaccgaaacagactgttaaccataaggtaaaattgatcatcacattagcttatggttaaaaacgccaaaatcgcaacagaataaaaaaccaaaaaatacacaagtttttatataaagatgatgtgatgagaaagttaatttgaataaggcaatattaagagctgaaaaaatgtcaaaaaacactaaatcaaaaattcgtgacattagaaaatataatgcgaaaacggaggtgaaattagtttatttcaaatgaggaaaatctcccggcgaaaaaaccgggagatgaaagtgtgatgggtatcaaataaacagcagaagagaaatttttaacgcagccattcaggcaaatcgtttaatcccattgcctggcggataagttgtggtttaacgccaggaagcgtgtcggccagtttcaaaccaatatcacgcagcagttttttcgccggattggtaccggaaaacagatcgcggaatccctgcataccagccagcatcagcgccgcactgtgcttgcggctacgctcataccggcgcaggtaaatgtactgcccgatgtctttcccctgacgatgcaaccgtttcagttcagcaatcagctctgcagcatccataaagccgagatttactccctgccccgccagcgggtgaatggtatgcgcggcgtcgcccaccagcaccagacggtgcgcggcaaactggcgcgcataacgccccgtcagtgggaacacctgacgcgcgctctcaaccttgcataagcccaggcgattatcaaaagcgatatttaacgcgcgattaaattcatcttcacttgcctgctgcatccgctgcgcttcctctggcgacagtgaccagacaattgagcaaagatgcggatcgctaagcggtaaaaaggccagaatgccttcgccatggaaaacctgccgcgccaccgcatcatgcggttcttccgtgcgaatggtcgctaccagcgcgtgatgctgataatcccagaaagtcagcggaatatctgctttgttgcgcaaccaggaattagcaccgtccgcgccaatcaccagacgcgccgttaacatgctgccatctttcagcgtcaggaaggtttcgttttctccccaggcgacctgctgtaattctgcgggggccaacagagtgatatctgacgactgctgcgctttgttccacagcgcgtagtgaatcactgagttttcaacgatatgcccaagatggctatagcccatgctttgatcgtcaaacgaaatgtgaccaaaactgtctttgtcccacacttccataccgtgataacaactggccctacgagagagaatgtcttgccagacgccaagacgggtgagtaatttttcgctggcggcattgatagccgaaacgcgcagttgtggtggtgcatccgccgccagaggttccggtacgcgctgctccagtacggcaacgcgtaagccgctcccctgtaagccgcaggcaaccgccagccccaccatgccgccaccaacaatggctacatcaacactttgcattgtttattccttaaaaccgccttcaacgcgccacccaaccgagggtgcgctgcgccagcacatcgcgtgccggggtgaataattccatcgtcatcagtccgatgttgcgcccgacaaccagcggtgcccaacggttggcaaaaagatgtaccaggctgtccgtgacgccgatggttgcttcgcgatcgctctgtcgacgctgctgatagcggcacaatatgccgtaatcaccgatgtcttctccgcgctcatgcgcctgagtcagggtttccgcaaggctcatgacatctcgcataccgaggttaaacccttgcccggcaatcgggtgcagagtttgcgccgcattgcccaccagcacggtacgatgggtaatagctctggcggcgcgggttaacgccagcggataagcactgcgtttaccggcgtgggtaatttttccaagtcgccagccaaaggccgactggagttcacggcaaaacttctcgtcgctccacgacagcacctcttcgcgccgttccagtggatgacaccagaccagcgaacagcgtccgtcagacatcggcaacatcgccagcgggccatgttgcgtgaagcgttcaaaagcgcggccttcgtgcgcaacggaagtcgcaacgttggcaatcacggccagttgttcgtaaggctcctgctgccagtcaacgccgcacgcggtggctaacgctgaatgggtgccatcagctgctaccagcacgcggcccgtcagcgtctcgccactctccagcgtcacttcaacgtgactctgagtacgggcaacgttagccacgcgatcagggcaatgcagcgttacgccaggtgctttacgcagcaatgcaaacagccgttgcccgacattgtgcaattcgacaacctgtcccagcgccgccagttggtaatcttctgcggcgagggtgacaaatccagcgtgaccacgatcgctgacatgcacggtagtgatggcggttgcgtaatccgccagagattgccagacgccgatgcgcgccagttgctgacaggtccccgcagccagcgcaatagctcgtccatcaaagcccggatgagcatgtgactctggcgcggtcgcttcaatcaaatgtaccggcagcgccccgtgacttaaccgggaaatagccagcgccagcgtcgcgcccgccatgccgccaccgacgatgattacgctcattgctttctcgcagctgccatcaacgcttcgatttcttccggctttttcaccacgctggcggtgaggttttcgttgccggtttcggtaatcacaatgtcgtcttcaatacgaatgccgataccgcgatattgttctggcacatccgcatccggcgcgatatacagaccaggctctacggtcagtaccatccccggttccagaatgcgcgagcgatcctgaccataaacgccaacgtcatggacatccagtcctaaccagtggctaaggccatgcataaagaaaggacgatgggcgttctgagcgatcagttcatcaacatcacctttcaggatgccgagttttaccaggccgctaaccatgatgcgcaccacttcaccagtgacttccagaatggaagttcccggacgatacaggcgcaggctggtttcgagagactccagcacaatgtcgtagatttcacgctgggcctgggtgaatttgccgttgaccgggaaggtgcgggtaatatcgcccgcgtaacctttgtattcacaacccgcgtcaatcaacaccaggtcaccgtcgcgcagttcactctcgttttcggtgtagtgcagaatgcagccgttttcaccgctgccgacaatggtgttataggacggatagcgcgcaccgtggcggttaaattcgtggtgaatttcgccttccagatggtactcgaacattcccggacggcatttttccatcgcccgtgtatgtgccatggcggtgatttctcccgcgcggcggagtacggcaatctcttctggcgatttgaacaggcgcatttcatgaacaacaggacgccagtcgatcatcgttgccggtgcggtgagattttgccgcgaacctttacgcagtttttccagcgcactgttcacgatttcatcagcatatgcatattcgccctgggcatggtaaaccacatccaggccgttaagtagttgataaagttgctgattgatttcgctgaatgccagtgcgcggtcaacgcccagtttctctggcgcggcatcctggcctaagcgacggccaaaccagatctccgccgtcaggtcgcgaacgcggttaaacagaacgctgtggttatgagtgtcatcgcttttaatcagcaccagcaccgcttccggttcgttaaagccggtgaagtaccagaagtcactgttctgacgataggggtattcgctgtcggcgctacgtgttacttctggtgcagcaaaaatcagcgcggcgctgccgggttgcatttgctccaccagggcctgacggcgacgctgaaactcttgccgggatatctcactcataacactctccttacgttttttgtttttagtgtagagtcggtttttgtacttctggcgcggtcggttgcggatgagtaaaggtgtcgtggcataacagcgcggcaacacgaacgtattcgatgatctcttcaagcgacatttcaagctcttcctgatcttcgtcttcgtcgtaacccagttgcgcaatgttacgcagatcgtcgatagcttcaccggtttcgccggtcactttatccagcttcggttgcgtaacgccaagaccaagcaggaagtgattgacccaacctgccaatgcatcagcccgatcgaaaacgctgacatcatcgccatcaggcagataaagctgaaaaaggaagccgtcatcctgcagggcatcgctggtggcagagtgcattttacgcagtgcctgtgccagctcatgaccgaaagccatgccttcgttcgtcaggtcgtgaagtagcggtagccatgagctgtcatcgttaccgccacatatcatcccactgattaaaccatgcatctcagcaggggtcagacccgtcccttgttggttcagatactggttcatttcgttgtaaccaggcatttcgttctgtatagacataagcattcgtcgtcaaagggaggaatattcatgatatgctaccactttgggccctggtggaccagaaaagggcttgtctcttctcatcagggtagctatagtgtcgccccttcgcagaccatgggtctaaagacgaaggcagcgcagtcaatcagcaggaaggtggcatgtctgcacaacccgtcgatatccaaatttttggccgttcactgcgtgtgaactgcccgcctgaccaaagggatgcgttgaatcaggcagcggacgatctgaaccaacggttgcaagatctgaaagaacgcactagagtcacaaatactgaacagttggtcttcattgccgcattgaatatcagctatgagttagcgcaagaaaaagcgaagactcgtgactacgcggcaagtatggaacagcgtattcggatgctgcagcagaccatagaacaagcgttacttgaacaaggtcgcatcaccgaaaaaactaaccaaaactttgaatgacacttttcggtttactgtggtagagtaaccgtgaagacaaaatttctctgagatgttcgcaagcgggccagtcccctgagccgatatttcataccacaagaatgtggcgctccgcggttggtgagcatgctcggtccgtccgagaagccttaaaactgcgacgacacattcaccttgaaccaagggttcaagggttacagcctgcggcggcatctcggagattcccttcttatctggcaccagccatgacgcaactaccagaactcccactgacattatcccgacaagaaatccgcaaaatgattcggcaacgtcgtcgtgcgttaacgccggaacaacagcaggaaatgggtcaacaagccgctacccggatgatgacttatcccccggtggtgatggcgcatacggtcgctgtattcctctcttttgatggtgaactcgacacccagccgctaatagaacaactctggcgcgccggtaagcgcgtatatcttccagttttgcatccctttagtgccggtaatttgctgttcctgaattaccatccgcaaagcgaactggtgatgaacaggttgaagatccatgagccaaaactggatgtgcgtgacgtgctacccctttcccgattagacgtgctgatcacaccgctggtcgcctttgatgagtacggtcagcgcctgggaatgggcggtggtttttatgatcggaccttacaaaactggcagcactataaaacgcaaccggtgggttatgcgcatgattgtcagttggtggaaaaactccccgttgaagagtgggatatccctcttcctgcggtggttacaccgtcgaaagtctgggagtggtaagggcgatacacctgcatcgccctgattgacatcgttgattctttaacctaatttagtgagtaagggtaagggaggattgctcctcccctgtgactgactgttaataagctgggaaacttatgagtaacagtacaatcagtatgatggcaagtcgcatcataacccttctccttcaagccctcgcttcggtgagggctttaccgttacagccccatgctgcccagctatcgtaagctctctttaaataaccacaacgcattgatctacctttaaatcttttcttcgagcgtgctcgaaaaaccccatgcaaaacagagataatttttgggaaaaaggatctattacggcagtaaacgtgggcgatgaagtggctatcaaaaagttcggttcagggcgatgcaccccgcatcgccctgattgacatcgttgattctttgacctaatttagtgagtaagggtaagggaggatgactcctcccctgagactgactgttaataagctccgaaacttatcagtaacagtacaatcagtatgatgacaagtcgcatcataacccttctcctttaagccctcgcttcggtgagggctttaccgttacagccccatgctgtcccgccatcgtaaatccccattaaataaacacaacgcattgatctgactttgatttattttctggagcagactcgcaaagtagaatgcgcaacgcggcaacggtgtggagaagggataaaaaaacgggcaagtcagtgacctgcccgttaattttcagagaaggggaattagtacagcagacgggcgcgaatggtacccggaatagctttcattgcctgcagcgctttttcggcaacgtcttcgtcagcttcaatatcaataactacataacccatctgggcggaagtttgtagatattgcgcggcgatgttgacgccctgctcggcgaagattttgttcagcgcagttagcacgcccggacggttttcgtggatgtgcatcagacgacgaccaccatgcagtggcagcgagacttccgggaagttcaccgcagagagcgttgagccattgtcagaatacttgatcaatttacccgcaacttccaggccgatattctcctgcgcttcctgagtcgaaccgccaatgtgtggcgtcagaaggacgttgtcgaattcacacagcggagaggtaaatggatcgctattggtcgccggttccgtcgggaatacgtcgattgccgcccccgccagatgtttgctcgccagcgcatcacacagcgccggaatatccaccacagtaccgcgcgaagcattaatcagcagcgagccgggcttcattagtgaaatttctttcgcgcccatcatatttttggtggacggattctctggtacatgcagactcaccacatcgctcatattcagcaggtcagaaagatgctgtacctgagtggcgttgcccagcggcagtttattttcaatatcataaaagtaaacatacattcccagcgattcagccagaatgcccaattgcgtaccaatatgaccgtagccgatgatacccagctttttgccgcgcgcttcaaaagaacccgccgccagtttgttccacacgccacggtgcgctttagcattggcttccggcacgccgcgcaatagcagcagcagttcgccaatcaccagctccgcaacagagcgcgtatttgagaacggtgcgttaaataccgggatcccgcgctttgccgccgcatccagatcaacctggtttgttccgatacagaaacagccaatagcgaccagtttttctgcggcgttgatcacgtcttcagtcagatgggtacgggatcgcaggccgatgaagtgggcatcgcggatggattcttttaattgttcatcatccagcgcgcctttgtgaaattcgatgttggtgtaaccagctgcacgaaggctttccagcgccttttggtgcacgccttctaccagcagaaacttaatcttgtctttctccagcgatacctttgccatttacccaatcctgtcttttgaaatgttgtgtgcggatttgcgtccgcctttcaacatatcaaaaaataatattgcggcaatatgaacgtttgcgtcgcgatgttgaggaaatatcacgcaaaggtaattcttggatgaatatgctggtttagaagatttatttagagcaatcgacaatagccaggtaaaaacgtgacacatgtcaccaaatttaatgaagagaatttttttaacgggggaggttcccccgtcagatcatttcacaatggttttgacaccgtcaggtgtgccaatcagcgcaacgtccgcgccacggttagcaaacaagccaacagtcaccacgccaggaatcgcatttatggcgttttccatcgctatcgggtcaaggatttccatgccgtggacgtcgaggatcacgttgccattatcggtcaccacgccctgacggtattccggacgaccgcccagtttcaccagctggcgcgccactgcactacgtgccatcgggataacttctactggcagcgggaatttacccagaatatcaacctgcttggaagcgtctgcaatacagataaatttttctgcaaccgaagcaatgattttttcacgggtcagcgccgcgccgccgcctttgatcatttgcatgtggccgttgatttcatctgcgccatcaacgtagatgccaaggctgtcgacttcgttgagatcaaaaacgtgaatgccgaggcttttcagtttttcagtggaagcatctgaactggaaacggccccttcaatctggcctttcattgtaccgagcgcgtcaataaagtgtgcggcggtggaacctgtacctacaccaacaatggtgccgggctgaacatactgaagtgccgcccatcctactgcttttttcaattcatcctgcgtcatgatcgtttcgcctgtggtatgaaatttcacacgcattatatacaaaaaaagcgattcagaccccgttggcaagccgcgtggttaactcatccataaaatatcgcgcaatggcgggcatcccctttcgccccgcaaataaagcatacaacggtctgggtatgccgctccacggtgcgaacagaggcaataacgccacgccattcaacataaccagggcgcgaagtcgctaagcgaaatgcaatagcgcaaatccctgatcttttaagctgcgcgtttaaccattgatacaaatgttacccgccgacggctgcggtatatgcaacctgacacaaaattgtgtcatagtgcaggaaaaagcatttaccaggagcagacaacagcaatgaaacgcccggactacagaacattacaggcactggatgcggtgatacgtgaacgaggatttgagcgcgcggcacaaaagctgtgcattacacaatcagccgtctcacagcgcattaagcaactggaaaatatgttcgggcagccgctgttggtgcgtaccgttccgccgcgcccgacggaacaagggcaaaaactgctggcactgctgcgccaggtggagttgctggaagaagagtggctgggcgatgaacaaaccggttcgactccgctgctgctttcactggcggtcaacgccgacagtctggcgacgtggttgcttccggcactggctcctgtgttggctgattcgcctatccgcctcaacttgcaggtagaagatgaaacccgtactcaggaacgtctgcgccgcggcgaagtggtcggcgcggtgagtattcaacatcaggcgctgccgagttgccttgtcgataagctcggtgcgcttgactatctgttcgtcagctcaaaaccgtttgccgaaaaatatttccctaacggcgtaacgcgttcggcattattgaaagcacctgtggtcgcctttgaccatcttgacgatatgcaccaggcctttttgcagcaaaacttcgatctgcctccaggcagcgtgccctgccatatcgttaattcttcagaagcgttcgtgcaacttgctcgccagggcaccacctgctgtatgatcccgcacctgcaaatcgagaaagaactagccagcggtgaactgattgacttaacgccagggctatttcaacgccggatgctctactggcaccgctttgctcctgaaagccgcatgatgcgtaaagtcactgatgcgttgctcgattatggtcacaaagtccttcgtcaggattaatccatcaaataatgcctgatagcacatatcaggcgttatcctcacttctttttgtattccttgaatcacatcacaaaatagacaaatctcaggcggcaaaaaacgacgtctgaatgcatttttttgctggcgacaaacccacgtaaaaagctcaccgtaagcgcaaataccctcattttgattgcgttttacggagcaaataatgtctaacgagcaggagtggcaacagcttgccaacaaggaattgagccgtcgggagaaaactgtcgactcgctggttcagcaaaccgcggaagggatcgccatcaagccgctgtataccgaagccgatctcgataatctggaggtgacaggtacccttcctggtttgccgccctacgttcgtggcccgcgtgccactatgtataccgcccaaccgtggaccatccgtcagtatgctggtttttcaacagcaaaagagtccaacgctttttatcgccgtaacctggccgccgggcaaaaaggtctttccgttgcgtttgaccttgccacccaccgtggctacgactccgataacccacgcgtggcgggtgacgtcggcaaagcgggcgtcgctatcgacaccgtggaagatatgaaagtcctgttcgaccagatcccgctggataaaatgtcggtttcgatgaccatgaatggcgcagtgctaccagtactggcgttttatatcgtcgccgcagaagagcaaggtgttacacctgataaactgaccggcaccattcagaacgatatcctcaaagagtacctctgccgcaacacctatatttacccaccaaaaccgtcaatgcgcattatcgccgacatcatcgcctggtgttccggcaacatgccgcgatttaataccatcagtatcagcggttaccacatgggggaagcgggtgccaactgcgtgtagcaggtagcatttacgctcgctgatgggattgagtacatcaaagcagcaatctctgccggactgaaaattgatgacttcgctcctcgcctgtcgttcttcttcggtatcggcatggatctgtttatgaacgtcgccatgttgcgtgcggcacgttatttatggagcgaagcggtcagtggatttggcgcacaggatccgaaatcactggcgctgcgtacccactgccagacctcaggctggagcctgactgaacaggatccgtataacaacgttatccgcaccaccattgaagcactggctgcgacgctgggcggtactcagtcactgcataccaacgcctttgacgaagcgcttggtttgcctaccgatttctcagcacgcattgcccgcaacacccagatcatcatccaggaagaatcagaactctgccgcaccgtcgatccactggccggatcctattacattgagtcgctgaccgatcaaatcgtcaaacaagccagagctattatccaacagatcgacgaagccggtggcatggcgaaagcgatcgaagcaggtctgccaaaacgaatgatcgaagaggcctcagcgcgcgaacagtcgctgatcgaccagggcaagcgtgtcatcgttggtgtcaacaagtacaaactggatcacgaagacgaaaccgatgtacttgagatcgacaacgtgatggtgcgtaacgagcaaattgcttcgctggaacgcattcgcgccacccgtgatgatgccgccgtaaccgccgcgttgaacgccctgactcacgccgcacagcataacgaaaacctgctggctgccgctgttaatgccgctcgcgttcgcgccaccctgggtgaaatttccgatgcgctggaagtcgctttcgaccgttatctggtgccaagccagtgtgttaccggcgtgattgcgcaaagctatcatcagtctgagaaatcggcctccgagttcgatgccattgttgcgcaaacggagcagttccttgccgacaatggtcgtcgcccgcgcattctgatcgctaagatgggccaggatggacacgatcgcggcgcgaaagtgatcgccagcgcctattccgatctcggtttcgacgtagatttaagcccgatgttctctacacctgaagagatcgcccgcctggccgtagaaaacgacgttcacgtagtgggcgcatcctcactggctgccggtcataaaacgctgatcccggaactggtcgaagcgctgaaaaaatggggacgcgaagatatctgcgtggtcgcgggtggcgtcattccgccgcaggattacgccttcctgcaagagcgcggcgtggcggcgatttatggtccaggtacacctatgctcgacagtgtgcgcgacgtactgaatctgataagccagcatcatgattaatgaagccacgctggcagaaagtattcgccgcttacgtcagggtgagcgtgccacactcgcccaggccatgacgctggtggaaagccgtcacccgcgtcatcaggcactaagtacgcagctgcttgatgccattatgccgtactgcggtaacaccctgcgactgggcgttaccggcacccccggcgcggggaaaagtacctttcttgaggcctttggcatgttgttgattcgagagggattaaaggtcgcggttattgcggtcgatcccagcagcccggtcactggcggtagcattctcggggataaaacccgcatgaatgacctggcgcgtgccgaagcggcgtttattcgcccggtaccatcctccggtcatctgggcggtgccagtcagcgagcgcgggaattaatgctgttatgcgaagcagcgggttatgacgtagtgattgtcgaaacggttggcgtcgggcagtcggaaacagaagtcgcccgcatggtggactgttttatctcgttgcaaattgccggtggcggcgatgatctgcagggcattaaaaaaggctgatggaagtggctgatctgatcgttatcaacaaagacgatggcgataaccataccaatgtcgccattgcccggcatatgtacgagagtgccctgcatattctgcgacgtaaatacgacgaatggcagccacgggttctgacttgtagcgcactggaaaaacgtggaatcgatgagatctggcacgccatcatcgacttcaaaaccgcgctaactgccagtggtcgtttacaacaagtgcggcaacaacaatcggtggaatggctgcgtaagcagaccgaagaagaagtactgaatcacctgttcgcgaatgaagatttcgatcgctattaccgccagacgcttttagcggtcaaaaacaatacgctctcaccgcgcaccggcctgcggcagctcagtgaatttatccagacgcaatattttgattaaaggaatttttatgtcttatcagtatgttaacgttgtcactatcaacaaagtggcggtcattgagtttaactatggccgcaaacttaatgccttaagtaaagtctttattgatgatcttatgcaggcattaagcgatctcaaccggccggaaattcgctgtatcattttgcgcgcgccgagtggatccaaagtcttctccgcaggccacgatattcacgaactgccgtctggcggtcgcgatccgctctcctatgatgatccattgcgtcaaatcacccgcatgatccaaaaattcccgaaaccgatcatttcgatggtggaaggtagtgtttggggtggcgcatttgaaatgatcatgagttccgatctgattatcgccgccagtacctcaaccttctcaatgacgcctgtaaacctcggcgtcccgtataacctggtcggcattcacaacctgacccgcgacgcgggcttccacattgtcaaagaactgatttttaccgcttcgccaatcaccgcccagcgcgcgttggctgtcggcatcctcaaccatgttgtggaagtggaagaactggaagatttcaccttacaaatggcgcaccacatctctgagaaagcgccgttagccattgctgttatcaaagaagagctgcgtgtactgggcgaagcgcacaccatgaactccgatgaatttgaacgtattcaggggatgcgacgcgcggtttatgacagcgaagattaccaggaaggaatgaacgctttcctcgaaaaacgtaaacctaatttcgttggtcattaatccctgcgaacgaaggagtaaaaatggaaactcagtggacaaggatgaccgccgatgaagcggcagaaattatccagcataacgacatggtggcatttagcggctttaccccggcgggttcgccgaaagccctacccaccgcgattgcccgcagagctaacgaacagcatgaggccaaaaagccgtatcaaattcgcctgctgacgggggcgtcaatcagcgccgccgctgacgatgtactttctgacgccgatgctgtttcctggcgtgcgccatatcaaacatcgtccggtttacgtaaaaagatcaatcagggcgcggtgagtttcgttgacctgcatttgagcgaagtggcgcaaatggtcaattacggtttcttcggcgacattgatgttgccgtcattgaagcatcggcactggcaccggatggtcgagtctggttaaccagcgggatcggtaatgcgccgacctggctgctgcgagcgaagaaagtgatcattgaactcaataactatcacgatccgcgcgttgcagaactggcggatattgtgatccctggcgcgccaccgcggcgcaatagcgtgtcgatcttccatgcaatggatcgcgtcggtacccgctatgtgcaaatcgatccgaaaaagattgtcgccgtcgtggaaaccaacttgcccgacgccggtaatatgctggataagcaaaatcccatgtgccagcagattgccgataacgtggtcacgttcttattgcaggaaatggcgcatgggcgtattccgccggaatttctgccgctgcaaagtggcgtgggcaatatcaataatgcggtaatggcgcgtctgggggaaaacccggaaattcctccgtttatgatgtattcggaagtgctacaggaatcggtggtgcatttactggaaaccggcaaaatcagcggggccagcgcctccagcctgacaatctcggccgattccctgcgcaagatttacgacaatatggattactttgccagccgcattgtgttgcgtccgcaggagatttccaataacccgaaaatcatccgtcgtctgggcgtcatcgctctgaacgtcggcctggagtttgatatttacgggcatgccaactcaacgcacgtagccggggtcgatctgatgaacggcatcggcggcagcggtgattttgaacgcaacgcgtatctgtcgatctttatggccccgtcgattgctaaagaaggcaagatctcaaccgtcgtgccaatgtgcagccatgttgatcacagcgaacacagcgtcaaagtgatcatcaccgaacaagggatcgccgatctgcgcggtctttccccgcttcaacgcgcccgcactatcattgataattgtgcacatcctatgtatcgggattatctgcatcgctatctggaaaatgcgcctggcggacatattcaccacgatcttagccacgtcttcgacttacaccgtaatttaattgcaaccggctcgatgctgggttaatgactcgtcccgtcacgatcttcagcaatatgctgaagcatcgtggcggtataacgatgatttctgattgaataaagatattcctgcatatacatcggcctgtgcggcgcatcaaaatatttcagcgttgccggattcaccagtcgccaggcaaaatgcgggatcaccgtcagaaaatgtccgcgctccacggcgctgattttggccataaaactgtagggacgataaataatggttggattgatcccacaaggtcgcatattcgcatcaatcattgcttcgaagttagcccggttttgaaagcgcatttgtagccagggcagctcctgaagcagctcttgctcttgacgctcttcataacggcgagaaacgagaaagcccaatcgcagcggtggtaattcactgatagtcaggttttccagttcctgaactcgtgcagatacatgctgtggggagataataaaatctaactgacggtcaaaaagattatcgataacgccgttttcgctgaactcaactggctgggcggtcacgccttcatacttatctccgagactaatcaactgatcgaaaataattgtcggataagtattatctatgccaatcacaatttctcgtgaacgacgccctgagttatggatttcattatcaatcgcagaaagtcgttgataaaccgggaacagtttttgatacagttcctgaccggctttattgaggctgatattattatctttgcgggtaaatagcgtatagccaatttgttcttccagcgcggcaatgcttttaccaaatggcgaagccgtcatatggattttttctgccgcccgggcaatattattggtttgcgctaataaaatgaaattgcgcatctttttcgaaataaaaatgtccatcccccctccccgcatccttgtccgcttaaccgtttcagtcagcctatccttgatgaaaccgcgagcaaagataggtgattacgtcatggttttacagaaaattacagaaaaaggaggcaatatcgggtaaaggcattagcccgacgaatacgtcgggctacaagtattattgtgctgcaggtgttttagcgggttgttgatccacaggttctaactggaagaccacatcgacctgatcatcaaactgaatagcggcctgctcgtaagtttcctgggcagacaccggcgcggcatcggctttcatcatccgcaccattgggctgggctgatagttggaaacatggtagcgcacgctatataccggccccagtttacgatgaaagccgttcgccagttcctgcgcctgatgaatcgcgttatcaatcgctgccttacgcgctttgtctttataggcatccggctgcgccacgcccagcgacacagaacgaatttcgttaagacccgccttcagcgcgccatccagcaaggaattcagtttgtctaactgacggagcgtgacttccaccgttctcacagcgcggtagcctttcaggatacttttaccatcctgataatcataatctggctgggtgcgtaagttcgctgagctgatatcttttttcgcgatctgattgagttcaaggaaggaaatgtattgtgcgacgcgctcatctgcctgtttcttggcagtagcggcatccttcgcggccacgttaacttcaatcgcaagagtggcaatgtctggcaccgcatccacgcttgccgtaccggaggtgacaatatgcggtccatccggcaattcgttagcctgcgctgccatcccgctaatacccattaatgccgccagggcgataactttgaacttcacgttagtctctccgtgttaattgacttgcccaaaattcaggacctctggaggcaagcttagcgcctctgttttatttttccatcagatagcgcctaactgaacaaggcttgtgcatgagcaataccgtctctcgccagctgcaaggctataaaccacatgacacatcccactaccagattgataatgcgctgtgattttgccgtgcgcaggcgcggtgccagccaggctgcgagaatagccagaccaaagaaccacaggaaagaggcgctaattgtcccgagcgcaaaccaacgttttggttcgacgtcaagctgcccgccaaggctgcccagtacaacaaaagtatccaggtaaacatgcggattcagccaggtcactgccaacatggtggcgataattttccatctgccttgcttcaggacttcggcactggctaactcaatattactgctcattgcggttttaaaagcgccaaaaccataccacagcaagaaggctacgccgccccaggtgaccagcgccagcaaccacggcgactgcatcaataacgcgctgccaccaaaaatcccggcgcaaatcaggaccaaatcgctgatagcacaaagtaaggcaatcataatgtggtactgacgacgaatgccctgattcatcacaaaagcattttgtggaccgagcggtaggatcatagctgcgccaagcgcaagaccttgaaagtaataagaaaacacgttggatattccgaattaagtatctgatgcagagactatatcgcgggattgttattagcggaaattgataatattaattggcaatcagaaaaactaataagagagaggccagagagtattatctggcctcagcgttgattacgcagctttgtcttctttcacccgcttaaagttcacatccatttgcgggtacgggaagctgataccggcggcatcaaattcacgtttaatacgctccagcacatcccagtacacgttttgcagatcgccgctgttgctccagacgcggaccacgaaattaatcgacgatgcaccaagttcgttcaggcgcacagtcatttcgcgatctttcaaaatgcgatcttcagactggataatattggtcaggatctgcttaacctgatcgatatcggaatcatacgccacgccaataataaattcgttacggcgaactggctcgcgggagaagttaataatatttccggcaataattttaccgttcggaataacgataattttaccgtctgcagtacgcatggtggtggagaaaatctgcacactcagcacagtaccggctacgccgccgaggtcaacatattctccggcacggaacgggcggaacatgacaagtaacacgccagcggccaggttagaaagtgacccctgcaaagccagaccaacagctaagcctgcggcaccgagtacagcaatgactgacgctgtttgtacacccacgcgtcccagggcagcgattagcgtaaaggcgataataccgtaacggactaatgcagaaagaaaatcagcaacagtggcatcgattttacgggagatcatcaggcgattcaccgcgttggaaatcatccgcgcgataatcaaaccaacgatgatgatcgcgagtgccgccacgatgtttactgcataacttagcagcagcgcctggttagctaccagccagcttcccgcgccgtttatgctatcgacaacattcaaatcttccattcaatattccttttcaactgactcaaaatggagaaatacactccgccgccttatgacgggcagtctgacaagggtaaacaataaagcataattttgccaaatagatcacagatttctcatctgaatcaccttgcttttggcgaaaaatccccgcagagcggggctcagacagatatcaatgtgcgctttgtcatgccggatgcggcgtgaacgccttatccggcctacaaaaacctgcaaattcaatatattgcaggatacgtgtaggcctgataagcgtagcgcatcaggcaattttgcttttggcgaaaaaaagacccgcagagcgggccttgagataagcagaaaggaatatcttacagaacgtcgatcgcgttcagttcctggaatgctttttccagacgagcgatcatcgaagtctgaccggcacgcagccatacgcgcggatcgtagtatttcttgttcggctgatcttcgcctttcgggttacccagctgaccctgcagataagcttcgttcgctttgtagtagttcagaacgccttcccaggttgcccattgggtatcggtatcgatgttcatttttactacgccgtagcttacggagtctttgatttcctgagcagtagaaccggaaccaccgtggaatacgaagttcaggctgttgtgcggcaggttgtgtttcttggaaacatattcctgagaatcacgcaggatggtcggagtcagaaccacgttacccggcttgtaaacaccgtgtacgttaccgaaggacgctgcgatggtgaaacgcgggctgattttgctcagttcggtgtatgcgtaatcaacgtcttccggctgggtgtacagtgcagaagcgtccatgtggctgttgtccacgccgtcttcttcaccaccggtgcaacccagttcgatttccagagtcatgccgattttggacatacgctccaggtatttagagcagatttcgatgttctcttgcagagattcttcagacaggtcgatcatgtgagaagagaacagcggcttgccggtagctgcgaagtgtttttcacccgcgtccagcagaccgtcgatccacggcagcagtttcttcgcgcagtggtcagtgtgcaggataaccggaacaccataatgttcagccatctggtgaacgtgatgcgcaccagagatcgcgcccaggatagcagcaccctgcggaacgtcagatttcacgcctttaccagcgataaaggaagcaccaccgttggagaactgaacgataaccggcgctttaactttagcagcagtttccagtacggcgttgatggagtcagtaccgacgcagtttactgctggcagtgcgaagttgttttcttttgctacctggaaaactttctgtacgtcatcaccagtgattacgccaggttttacgaaatcaaaaatcttagacatgtctcttgtcctgtatcgtcgggccttatactcatcatacttcaagttgcatgtgctgcgtctgcgttcgctcaccccagtcacttacttatgtaagctcctggggattcactctcttgtcgccttcctgcaactcgaattatttagagtatgaaaaaatgcgtgctctaaaagcgcgctgaaacaagggcaggtttccctgccctgtgattttttacttcttagcgcgctcttcgagcatcgctactgcaggcagtactttaccttccacgaattcgaggaatgcgccgccgccagtggagatgtaggagattttgtcagcaatgccgaacaggtcgattgctgccagagtgtcgccgccgccagcgatggagaacgcttcgctgtctgcgatagcgttagccacgatttcagtacctttgcggaagttcgggaattcgaacacgccaaccggaccgttccacagaatggttttcgcattcttcaggatttcagccagttcctgagcggaagcatcaccgatatccaggatctgctcgtcagctttcacatcgttaacagatttcagggtagccggtgcagtttcagagaactcggttgctacgcgaacatcagacggaaccgggatgttgcaggtggtcagcagacgtttagcttcgtcaaccaggtcagcttcgtacagggatttacccacatcgtggccttgtgccgcgataaaggtgttagcgataccaccaccaacaatcagctggtcagcgattttagacagggagtccagaacggtcagtttggtagatactttagaaccaccaacgatagccaccatcgggcgagcaggttctttcagtgctttacccagcgcgtccagttcagctgccagcagcgggcctgcgcacgcaacgtcagcgaatttaccgataccgtgagtagaagcctgcgcgcggtgagcagtaccgaatgcgtccattacgaacacgtcacacagtgcagcgtattttttggacagggtttcgtcgtctttcttctcgcctttgttgaagcgaacgttttccagaacaaccagttcaccttcagcaacgtcaacgccgtcgaggtaatctttaaccagacgaaccgggttagacagtttgtctttcaggtagttaacaaccggcagcagagagaattcttcgttgtactcgccttcggtaggacgacccaggtgggaagttaccatcacttttgcgccttgtttcagggccagttcgatggtcggcagagaagcacggatacgcgcgtcgctggttactttcccgtcttttactggtacgttcagatccgcacggataaatacacgtttcccagcaagatccagatcggtcatcttaattacagacatggtgaatcctctcgttgattctaaaagttttgcagacgctgcttgcgtcttacctgaaagcaacagtagccatagctaacgtcgtgtcgagcattcggttagcaaagccccattcgttatcgcaccagaccaacgttttgatcaggtgtgcgccactgacccgggtttgggtgccatcgacaatggcactgtgcggatcgtggttaaaatctacagagaccaacggcaattccgtatagtcaactataccatgaaatgcaccttgtgctgctttttgcagcaacaggttgacttcattggcttttacaggtttcttcaccgtcacgcttaaatcgattgccgtcacatttatggttggcacacgtaccgcaatcgcttcaaagcgatcgttaaattgcggaaaaaatcgtgtgataccggcggccagtttagtatcgaccggaatgatcgactggctggctgcccgggtgcgacgcaggtcaggatggtatgcatcaataacctgttgatcgtgcatggcggagtgaattgtggtcacagtgccggactcaataccgtacgcatcatctaacaatttgatgacgggaattatgcaattcgtggtacaggaagcgttagaaacgatgcggtgttccgcacgaagttgatcctgattgacgccgtaaacaacggtcgcgtcgagatcgttactgccaggatgtgaaaagagcacttttttggccccggcggcaatatgcgcttcgccatgctcgcgggagccatatacgccggtgcagtcgaggactacatcaacgccaagttcacgccaggggagcgattgcagtgaacgttcatgcaatacgcggatggcgtcatcaccaacaaaaagttgatcgcgttcctgtcgcacttcccatgcaaaacggccatggctggtgtcatatttcaacaaatgcgccatgcccgcagcatccgccagttcgttgattgccaccacggtaatttccgcccggcgtccggattcatacaaagcacgaaccacattacgcccgatgcgaccgaagccatttatcgctacgcgtacggtcatagatctcctgcaaggttttccctgagcaaatttgccagacagagtaatccagcaaatcgtccggggaaaccttacctgtcgcaaactgcgactgattggttaattgtcgaacatttaatcgactgaaacgcttcagctaggataagcgaaacgtggaataaaaggaatgattgtccagtcaaagaaagcaattatctgacttacgtcacgttttcagccccgcccctgtggaatttattccactttgcagaatcacgaataagcgtagcaaaatcttttcgttgtgccgtcacaaaccctgacttatatcagaatatgactgatgcagcgtcgatattatccgcaatacgtccgagtttcggagtactccaatgatgacattgccctacccatattcttcctccgcacgcttttacgcactgcgcctcctccccgggcaggaagttttttcccagctacacgcttttgcacagcagcatcaacttcatgccgcctggattgcaggctgtaccggtagcctgactgacgtcgccttgcgctatgccgggcaagaaggcaccacgctcctgaacggtacattcgaagtgatctcactaaacggcacgctggaacagagtggtgagcatcttcatctctgcgtttccgatccacacggcacgatgcttggcggtcatatgatgcccggctgtaccgtgcggaccacgcttgaactagtgatcggtagccttgaggaactggcgtttagccgccaaccttgcgcgctttctggttacgacgagttgcatatttcccccgttaaataactactttcaaagaggttttcttatggcgcgtagccacttttccagtcaggcactggtgttgatcgttatatctatcgccatcaatatgatcggcgggcaactggccagcatggtcaaattacctatatttctcgactccatcggcacacttattagcgcggtactgcttggtccggtgatcggaatgctgaccggcttactgaccaatttactctggggattgctgaccgacccgatcgccgccgcatttgcacccgtcgcgatggtcatcggcctggtcgccggttggctggcgcgagcgggttggtttcgcaccctgccaaaagtcgttgtcagcggcgtgattattacgcttgcggtaacggtcgtcgctgtaccgctgcgtactgcgctgttcggcggtgtcaccggtagcggagccgatttgttcgttgcctggatgcactcgatggggcaaaacctggtggagtcggtggcgattacggtgataggcgcgaacctggtcgataaaattcttacagcggtgattgtctggcttttactgcgccagctgccgattcgcaccacgcgccattttccggcaatggctgccgtgcgctaaatgcatccatttacctcattaacactgtgggcattggcggcctgcaccacgcttatcctgcccgcgcagaccattttgccgatctatagcgcggcgacctttttctgccttattgcgctaaaggccacgcgacggcgggcaaaatatgtcgtctggctgatgttctcgctgggagccgggctgtggctggtacacggtggctggctaccagaatggctaagcggcacgccacgctcgccagaacggtggtcgcatgctattacgctctggttgcggattctggcgattgtttcaacctcacagttgtggatgcagtacgtccccgtgcaatgttttattcgcgctctgtttgcttctcgcctgccgccaggcgtcgcttatctgtttgccgggccgttattggtcgttgagcagttaaaacggcaattagcgattattcatgaagcgcagcgtgcccgtggcgtgccgctggatgagggctggtatcagcgtttacgtgcgatgcccgcgttaattattccgctaacacacaatgcgctaaacgatctggctatccgtggtgcggcgctggatatgcgggcatttcggatccacaaccgacgaacaacgttgtgggcaccagccgatagcaccctacaacgcgtagcgcgttacaccatgatcttgctgatgctgacagaattcggagcgtggatatggttacgttagaacagttccgttattgcccgacacactcaacgcatcctccgttctgttatgactttcactatgtcaaaccggggatggtcgccatctttggtgacaacggcagtggcaaaagtacgctggcacagctgatggcgggctggtatccggactttctgccaggagagataacaggcacggggacgctcctcggtacgcccattgggcatctcccgcttaatgaacaatccgccaccatccagctcgtccagcaatcgccctatttgcagctctccggctgtacctttagcgtggaagaagaagttgcctttgggccagaaaatctgtgtcttgctgaagcagagattatggcgcggattgatgccgccctgactctgaccgagtgccagccgttgcgccatcgtcacccggcaacactctccggtggagagacacagcgcgtggtcatcgcctgcgccatcgcgatgcagccaaagctcttaattcttgatgaagcctttagccgcctgactccgcaggccagcgaaatgctgttgcagcgcttacaacactgggcgtttgaacgtggttcgctgattattctttttgaacgtcatcgcacacctttcctgaactactgccagcaagcgtggcaattgcaaaacggagcgctccagccactatgttaacgttaaataagatatcttatcgctggcctggcgcggcaacggattgtctttgcgacatttctctgcaactcaaacaaggtgaatggttggcgctgaccggcgacaatggcgcgggaaaatcgacgctgttacgagtaatggcaggtcttcttacgcccacagccggtacggttatgctgcaacaacaggcgatgaaaaacctgaaaaaccgccagcgcgcggcaaaggttggcgtactgtttcaggaagcggaaaaccaactttttcacagcaccgtcgctgacgagatcgcatttggtttgaaactgcaaaaatgcccggcggatgaaatcactcaacgtacccatgctgccctgcaatgttgtcagttagcagacactgccaacgcgcacccgttggatctgcatagtgcgcagcgacggatggtcgccgtcgcctgcctggaagcactctctccgccactattgctgctggacgagccgagtcgggattttgacgaaaattggttgagcgtgtttgaaagctggctggagaagtgccgccagcgaggcacgagcgtcgtagcaatcagtcatgacgccgcatttacccggcgtcatttctctcgtgtggtgcgactggaagatggtctaatcaggaacgttaatccaccagacgatattcacccgtagcggtcatcattaaggtcaaatttgcaggcagactctcttccagcacccggcgaacattcggcccgtcggtacggtcataaaaagcttctgcgtctgccagcgatacccctcccgccagcttgcgccctaccagtcgttcccgcaacgcagtagctggcgcgttgataaagatcgagaaatcacaaaattgcgcaagctggcaccacttctcgtcgtccagcaacaaccagtttccttcgacgatgacgagtggtgcggtaacgtgcaacgcatcttcaacaggatcatgcttttgtcgatcatactgcggccacgtacaatccccttccactacctggcacagattttccgccagtttcgcaacgtcaaatgtctctggtgcgcctttgaaggggcgcaattgatgcgcatccagccagctattgtaatggtgaaaaccatccatcgggagcgtctggatagcgggtaattcagggtcttgttgcgcgagatattcccagaaggtagttaaggtagatttacccgtccccggcggagcgcaaagaaaaaccaccgtacgtcgctgcggacttaccgtctgtaaggccgccagcatacgcagcaacggtttatgcacgcgttctatctcttcatcatggtactgcgcttgcacgttcagcccattcaccgttaattcaattttcacggcgttaattcctttaaggtggtcgttactgccagcgtcagcgccgttttgaccattccgctaaaacgcgcctctgaccagacggcgaaatcggcgaacttcatcgcttttaacgcgtcatagagcgtcgcattgcaggttatgctattgacgttgctgataaaatcccaggtcatgtcatcggcaaatccgggcgtttcatcctgttcgttcaggtaatgccagtactgggaaaagtgcgtgatatcggcatacagccatttatccattttccccagcgcataaatcaaacgcagcgcaacatcaatatcgtcaagcgggccgctttgggcgagtaacggcttcactgcatattcgacgatctcttcatcgttatcgacaaacagcgacggcagaaactggcgtatcccctggagcaaaatagaatgcgcagttttcataaatgaaaataaattgtcctgtgcatccagttgctcaagcacatcatcttctgtcagcgtcgccattggtcttccgatagatcaccatcaatgcagggagtctattatattacacgtttggtccgcgccgccgatcagtaatgtctgcgtccgcaccccattcgccgtctgttggataccgttcaccaactcgccgcccgtcacgcccgtagcgctaaagaggatatcgttccccctcaccagttcatcgagcgagtacacacggttaacgtcaacgcccattgccttacaacgcttgcgctcctgctctgcaatctgccgattttccgtgtaatcccctttagcctgacaaaagtcaatcagctcggcctgcatatccccacctaatgctttaacggcacaggcagaaatcacgccttctggcgcaccgccgatggtgtacatcacgtcgtaaggattatcctgccagcaggtcagcacgctggcggcgacatcgccatccggcagagcgaaaaccttcacgcccagctgtgttgcttcttcaatcgcggcactcaggcgcggtttatccagcgtaaccatgcgcagcttgtccagcggtttgcctaacgcccgcgccacgttgcgcaagttgtccgccagaggcaaagacagatcaatcgccccggcagccagtcgattaacaaccagctttttcatatacatatcgggcgcatgtaacaggctatctcgaggggcgaaagccatgaccgccagcgcattgctctgccccatcgctaccatccgcgtgccttcaatcgggtcaaccgcgatatcgacttctggcccatcgcctttgcccacctcttcgccaatccacagcatcggcgcatggtcaatttctccttcgccgataaccactcgtccacgaaaagcgacgtcgtttaatgcctggcgcatcgcggtgaccgccaggccatcaattttatttttgtcgccacatccggtttgcggccaggcagccaacgctgcctgttccgtaacgcgaaataatggccacgccagggacatcattgcgcggcctccccaatatcaacgccaaattgcgccagcagatatttctcggcctgctcattccagatgccgtgcgtttcctcaaccagccgcgccagctctttaaacagcggatcggttttgcctttttcggcaaaatcggcaatggcggtgagcggcatggtcacgccgttataaatgagttttttaccgccagggatatccggcagattgagcacggtatctggcaccgcatccagcccaccgatatgcgtgaccataaaggacggctgcaactgccccgtggcgcttaacgcaatcgcctctttcatgtcgtccgttgaaccgccggatgtaccgacgacgtgcgtgctgttgtaatggacgttgtagaaattaaacggcactttgaagtttttatccgtcggcccggcaaagaagttcagacagccatcttccgccagtaattcgtcagccatctcaacgacagcaggcaccgccgcataaacaaaaatgtcatcgaacccgacatctcctgtcagcgcccgcagcgtctggaccggatcgctcatccctttggtattcacatacaccagctcaatgcctttactggccgccagatccaccggcagcagcttctgcacctgcgccaggcgtttgtcgtcgatatcgaccaccaccacccgtgacggttgtatgccaccgttaatggcgtaatcgatagcgccaatgcccatcggacccgcacacgccagcagtgcaatattgccgccaggtttgacgcccatgcgatgctcataaacatattgcgtggtgtgataattggcatgataagcaccaataatgcagcacataggctctgccagcgacgccgcagcaaaataagagccgtgatacggtaatacgcagcccaaattaatggcgatttcgggaataatcatataggtggcgttaccgccaaaatattcgtagctgtagcctgctgaatatccgcttggtaaccccatcgccggttgcaatacaaaacgctggccttttttatatttgccagtgagatttttacccacttcgacaataaccccggcacattcatgcccggtaatgaccggatgattttctaaatcgtcgggtacgcgtttatgttcactaccgagtaacgccgctttccaggtcgataaacagacgctgtcagaaattacactcactaacagttcattatcggtaatttctggcagttcaaattcgcgcagacggacatcccgcttgccataaatagcagcaactttggttttcatttttacctctgtaatcagtgtttatgttcggcggttaattgattaaataaagtgtcgagttttggatcgccaatatagttattaatcaatatcagcggtttatccgtcacacgtttcacgcgcccttccagactggcgtgagtgacgacgatatcggcatccgcaggcacgttttctatcgcgtaatgttttacttctattgccagccccgctttttccaggcgtttacggaaggtggtcgcgcccatcgcactggagcccatccccgcatcgcaaacaaaggcgatacgcttaaccctgcttaacgagaatgcaccctcttgtttcatcgccttaaccgcattggctgactgagcaaacttatcttcgctctccgtttccaccgttttttccatcttcagtatcagcgaagtaatagcaaaggacaccagggtacctaccgtaacaccggcaattgtcgccaggaacgagcctttcggcgtcagtgccaggtaagcaaagatagaccccggacttgggccagccaccagaccaccgtccagtaagttaaacatccaggtaccagacataccgcccgcaatcatggcaataatagtcagcggcttcatcagcacatatgggaaatacagttcgtggatcccaccgaggaagtgaataatcatcgccccgggcgcagaacgtttactcatccctttaccaaacaaggtaaacgccagcagcagccccaggcccggacctgggttagaggccaccataaagaagatggatttaccgttaaccgaagcctgttgcattcccagcggataatagacgccctgatcgatcgcattattaaggaaaagcactttcgccggttcattgatgactgacagcagaggcagataacccgcatgtaccagcgcctcgatacactctttgacgaaagtattggcaattaacaccgccgggccgatcacttcaaaacccagcagacaaaggagcatccccgcgatacctaatgagaagttattgataaccatctcaaaaccggcaggtatgcgtttttccagtgccttatcgacatattttatgaccaacccaccgagcggccccatgatcattgagccaaggaacatcgggatctctgcgccaacgatcacaccaatagtacctattccgcccatgaccgccccgcgtttaccgccgaccagatgaccaccagtagaaccaatcatcacgggcaataaataggtaatcatcgggccgacaattttggcgaaatgttcattcggcagccaaccggtgggaataaataacgcagttatgaagccccaggcaataaaagcaccaatattggggatgaccattgcagtcaaaaagcccccaaaagcctggacctttgcacgagcagacttgttttccataatattatcctgtagaggagagagtaattatccgcggctgataatgtccgctaattgtttttctgatgatgctgttaagagttgttcgagtatttcttcttcgcacagtaattcacttaacgcctgaatagcgccaatgtgcgaatcggcatcggcagcagagagtccgatgagtaatttaattggttcgtcattccccggaaaataaacaccttgttcaagtaatgtcaaagacatcccggttttaagcgccccacattccggtcgcgcatgaggcattgccacgcctggtgcgagaatataataagggccattgttaatggtggaatctttaattgcctgaatgtaattctcgctgatatagtttttatccagcaatgataccatcgagaaatcgatagcttcctgccaatcttttgctgaatgtataactgagattgatgattctggaaaataatcactaagccgcataaattatccttattttatttttagggtaccgtcaggcggtaaaaataaaatactcgtgcggtttaatgaaagcaattgagcagggaaaccgatgttttgaaaacagtgaattattaatttcttatataacattgagttatagatataacaacaaatgtcaatacgcatatcgtgatgcatattacataattgatatttattgcatataaatatttgtgatctacaacacgctttatctattgcttgtccgcaaacggacatatcaaggtaataaaaaaggtcgccgaagcgacctttttacccgaaatgctaattacagcagttcttttgctttcgcaacaacgttatcaacagtgaagccgaactcttcaaacagcagctctgccggagcagattcaccgaaagtggtcataccgacgatagcaccgttcaggccaacatacttgtaccagtagtcagcaatacccgcttctacagcaacgcgtgcagtaaccgctttcggcagtacggattcacggtaagcagcatcctgcttgtcaaatgcgtcggtagacggcatggacaccacgcgcgctttcacgccttcggcagtcagtttttcgtaggcagcaacagccagttcaacttctgaaccggtagcgatgaaaatcagttccggctgaccggcgcagtctttcagcacataaccaccgcgcgcgatgtttgccagttgctcttcagttcgttcctgctgcgccaggttctgacgggagaggatcagtgcggtcgggccgtcctgacgctcaacaccgtatttccacgcgaccgcggattcaacctggtcacacggacgccatgtagacatgttcggggttacgcgcagagaagcgacctgctctaccggctggtgagtcgggccatcttcgcccagaccgatggagtcgtgggtgtaaaccatcacctgacgctgtttcatcagcgcagccatacgtacggcgttacgtgcgtattccacgaacatcaggaaggtggaggtgtacggcaggaaaccaccgtgcagggagataccgttagcaatcgcggtcataccgaactcgcgaacaccgtagtggatgtagttacccgcagcatcttcgttgattgctttagaaccagaccacagggtcaggttagacggtgccaggtcagcagaaccgccgaggaattccggcaacagcggaccgaaagcttcgatagcattctgagacgctttacggctggcgattttcgccgggttagcctgcagtttagcaatgaactcttttgctttcgcgtcgaagtcagacggcatttcgcctttcatacggcgggtaaattcagcggcttcctgcggataagctttcgcgtaagcagcgaatttctcgttccatgcggattctttcgcctggcctgcttctttcgcatcccactgagcatagatttcagacgggatttcgaacggtgcatatttccagcccagctgttcgcgggtcagggcaatttcagcgtcgcccagcggcgcaccgtgggagtcgtgagtaccggctttgttcggggaaccgaaaccgatgatggttttgcacatcagcagggacggtttgtcagtcactgcgcgcgcttcttctactgcgcgtttgatggatgccgcgtcatgaccgtcgatgtcgcgaataacgtgccagccgtaagcttcgaaacgcattgcggtgtcgtcggtgaaccagccttcaacgtgaccatcaatagagataccgttgtcatcgtagaacgcaatcagtttacccagcttcagcgtacccgccagagagcaaacttcgtgggagatgccttccatcatgcagccgtcgcccatgaaggcataggtgtagtggtcgacaatgtcgtggcccggacggttaaactgcgccgccagcgttttttctgcaatcgccataccgactgcgttggcaataccctgacccagcggaccggtggtggtttccacaccagcggtgtaacccacttccgggtgacccggagttttagagtgcagctgacggaagtttttcagttcttccatcggcagatcgtaaccggtgaggtgcagcaggctgtagatcagcatggagccgtggccgttggacagcacgaagcggtcacggtcagcccaggacggattctgcgggttgtgtttcaggaaatcacgccacaggacttcggcaatgtcagccatacccataggggcacccgggtgaccggatttggctttctgtactgcgtccatgctcagcgcacgaatagcattggcaagctctttacgtgaggacattttgactccagatcggatgatgaagggcacgcccttaacgacttgacgacagcgcgttttgggctacgccggaaaatttgccaacaatttaccgcaagccgcgcgtcatgtacatggaacatccttttgccgcttcagaaatctctggatcatgctcgcatgttgcgcaatctactcgcccgtccgctgcgcttttccttatactgagactgagcgtcgattcacctgcaaacggcgcatttttagaataatcctgaccttgtgcggaagagaaaacatgaaaattcgcgccttattggtagcaatgagcgtggcaacggtactgaccggttgccagaatatggactccaacggactgctttcatcaggagcggaagcttttcaggcttacagtttgagtgatgcgcaggtgaaagccctgagcgatcaggcatgtcaggagatggacagcaaggcgacgattgcgccagccaatagcgaatacgctaaacgtctgacaactattgccaatgcgctaggcaacaatatcaacggtcagccggtgaattacaaagtgtatatggcgaaggatgtgaacgcctttgcaatggctaacggctgtatccgcgtctatagcgggctgatggatatgatgacggataacgaagtcgaagcggtgatcggtcacgagatggggcacgtggcgttaggccatgtgaagaaagggatgcaggtggcgcttggtacaaatgccgtgcgagtagctgcggcctctgcgggcgggattgtcggcagtttatctcaatcacaacttggtgatctgggcgagaaattagtcaattcgcaattctcccagcgccaggaagcagaagccgatgattattcttacgatcttctgcgccaacgcggcatcagcccggcaggtcttgccaccagctttgaaaaactggcgaaactggaagaaggccgccaaagctcaatgtttgacgaccatcctgcatccgccgaacgcgcccagcatattcgcgatcgcatgagcgcggatgggattaagtaaagcctggtggtgtcgaacgtaggtcagataaggcgttcacgccgcatctgacatgaatggcacatttgttaccttgtgcgcattgccggatgcgatgctggcgcatcttatccggcctacgggtgccgaacgtaggtcggataaggcgttcacgccgcatccgacattaatggcacgttttacccgtgcgcatcgcatctggtgcttactcgccctttttcgccgcctgaatatacagcatctccagcgccagcgtcgccgcagccagagcggtgatttccgactgatcatatgccggagccacttccactacgtccatcccaacgatgttgagatctttcaggccgcgtaccagtttaatagcgcgatcggaggtcaggccgccaatcactggcgtaccggtgcctggtgcaaaagcaggatccaggcagtcgatatcaaaggtcaggtaaaccggcatatcacccacaatctgtttcacctgggcgataacgtcatccacgctgcgatcgttcacctggcaggcgtccagcacggtaaagccgttgtctatatcaaactcggtacgaataccaatctgcacggaatgattcgggtcgatcagaccttctttcggcgcggtatagaacatggtgccgtggtcaaattcacaaccgttcgcataggtatcggtgtgggcgtcaaagtgtaccagcgccattttaccgaaatgcttcgcatgagcacgcagcagcggcagcgtaacaaagtggtcaccaccgaaggagagcatacgcttaccggcagccagcagcttctcggcgtgcgcctgcagcttctcgctcatctcacgggcatcgccgaaagcatataccagatcaccgcagtccacgacgttcagacgctcacgcatgtcgaaattccacgggaagcgattgtgttcccaggccagattcgtcgaaacctgacggatcgctgccggaccgtggcgaccaccggcacggccagaggtggccatgtcgaacggcacaccagtaatcacccagtcagcatcgctgtcatacggctggaagttcatcggcaggcgtaaaaaaccaaaggcgttggaaaccagtgagttatcgtattgatgacctaaggtgctcatggatggactcctattacaaagtcgatataaaaaaacccttccgcgtcgttaggcccgacgaggaagggttggatttgcgaaacacaagtttgtgctaattatcgccttaaatgggcgaggcatcaagcgaggttgctatttccgacacggtggcggcgcatagccattgttatctgctggaaaagcttgtccagagcacggtggcagcgcgttttgcgccgggccttgtaattcaaaggcggcaaagccgattaccccggtattacgcacatcgccttgcgccgaattggctgcgtaggaatcaacaacgttggcgaactgaaaagccgcttcggtatgtttatctttgcggaatcctttaatcgctaacgaatctccggcattcacaatatagccgttgttattcagcgaaccttgcttgccgttcagcacatccaggccatcaaccgtagcaacgatctcgtagttggtgttacgactgtaattacgaacatataattgataattcattccgactctggcatggacaatatagcgtggttcattattggatgaatcataaacacgcgtaataggtagagaattaaaattaccatcgcgaatagcatattccagttcgttaatacgaatgctataaacgcggtcgtagccggaaggaacattagtcgaataactaataacgatcatctccgccggatcgcgccaggctcgctcagcagatacgccctgaaccgttgagtgcacatccccaccccaggcggtgccgacattacccgatgcactgctattatactgcgcattactggaacaaccggccagcagcacgattaatgccaccaacgcgctacgtactttccattttttcataaccgttccctctgcatttaattaatgcagcgattgtagggagattatttaataagaaaagcagctaaattatttttaagaatatataaaaagaaagcggaccgatttacgtaaataaatcgacccgccagcagaataatcttaattattcatcttcaagataggtataaccgtacaaacctgcctcgaactcttcaaggaactgttgttgcagttcagcatcaagatcggttttcttcacttgatcacggaactgagttaacagcgttttcggatcgagctgtacatattgcagcatgtccgccacggtatcgccttcgtcagacagttccacttcgacactaccgtcagggaacacgaacacgtcaaccgcttcggtatcaccgaacaggttgtgcatgttgccgaggatctcctgatatgcgccgaccataaagaaaccgagcatcggcggattctctggatcgtactccggcataggcattgtcgtggcaataccgtcaccatcaatatagtggtcgatagcaccgtcagagtcacaggtaatatccagcagcacagcgcggcgttccggcacttgatccagcccttccagcggcagaaccgggaacaactggtcgatcccccacgcatccggcatcgactggaacagcgagaagttgacgtacattttgtccgccatacgttcctgcagctcgtcgataatcggacgatgagcacggttttgcggatccagctgcttttgcacttcatggcacatgctcaaataaagctgctcagcccatgcgcgttcttgcaggctaaaggtgccggaagagtagccgatatgaatgtcgtgcagatccatctgactgtcgtgtaaccattcacgcagagaacggcgagttcccggttcgtgcatctcctgccaggtttcccacatgctttgcagcgcacgcggcgcatcttctgcaggcgcggtcggcaccgtgtattcgttacgttccacgccgatgatattagacaccagcacggtgtgatgcgcagtcactgcacgacccgattcagtgattaccgtcggatgtggcagaccgttttcttcacatgcatcaccaatcgcccagatgatgttgttggcatattcattgaggccgtagttcaccgaacagtcggactgcgaacgagtaccttcataatccacgcccagaccgccgccgacgtcgaagcactgaatattgacgcccagcttgtgcagttccacatagaaacgcgccgattcacgaacgcccgtggcgatatcgcgaatattcgccatctgcgaaccgaggtggaagtgcagtagttgcaggctgtcgagacgcccggcttcacgcagggtttcaaccagttgcagtacctgagtcgcagccaggccgaacttcgatttttccccgccggaggactgccatttacccgagccctgcgaagccagacgtgcacgcacgcccagacgaggaacgacattcagacgttctgcttcatccagcacaatggcgatttctgacatcttctcaatgaccagatagaccttgtggcccatcttctcgccaattaatgccaggcggatatattcgcggtctttataaccgttgcagacgatgacgctacgggtcatgccagcatgcgccagcaccgccatcaactctgctttcgagcctgcttccagccccaacggttcgccagaatgaatcagggactcaatcacgcggcggtgctggttaactttgatcggataaacaaggaagtaatcgccgttatagccgtaggattcccgcgcacgtttgaacgcggcgttaatggaacgcaaacggtgctgcaggatctgtgggaaacagaacagtgcaggcagacgctgaccctgtgcttcacgagttttcactaactgcgcgagatcgacgcgagcttccgggacgtccgggtccgggcacacgctgatgtggcccagctcgttaacgtcatagtagttattgccccaccaggcaatattgtaagtacgcagcatcttgctggcttcctgggagctcattgcaacctcctgcatggagcgtagtacaccgtgttcgcccgctgacgaaggcaaacccatagacatgtcgtcagacatagcgaacctcaaattattttattaagtgtaaaacagttaacgactatcgcagcctggaactgcgataacaacccataagcacatggattttccagcagtgaatgctgacgctccaactgcgcaaccggtttctttttcataacattattaagcacataaccgaacgtaagtgtgacagttcggcgaaaccacgagaaaactcttgtttttacaagagcgcccttgttcagtcctcagtaactgtaaccagctcttgaatcctgagaagcgccgagatgggtataacatcggcaggtatgcaaagcagagatgcagagtgcggggaacgaatcttcaccagaacggtgagacaggttaagcagcagacaacggttcattatttcgtatcacctccacggccgcctgttaagacgaacccacaagccaaaactctgatttcaacccggctggaagtggcaacacgaaagaaacgtcgtgtgctttttatttaagccgcgcgccgcgttttataccccacaatggcagaaaattgcaaaagataaatacgcagaatgccggcattgtcaggaaaaatttccagccacgtttttaacagaatgagacacgattcaaaaaaaagtggaaatcgggtgaagaattgacctaaaatagccatccagatgttaatccatccataccgattaacactcagactgccagtgtttttaacttgcagagtcgtggtaggatccgctaccacagaaaatccacacaacagtttgagctaaccaaattctctttaggtgatattaaatatggcaaaacacctttttacgtccgagtccgtctctgaagggcatcctgacaaaattgctgaccaaatctctgatgccgttttagacgcgatcctcgaacaggatccgaaagcacgcgttgcttgcgaaacctacgtaaaaaccggcatggttttagttggcggcgaaatcaccaccagcgcctgggtagacatcgaagagatcacccgtaacaccgttcgcgaaattggctatgtgcattccgacatgggctttgacgctaactcctgtgcggttctgagcgctatcggcaaacagtctcctgacatcaaccagggcgttgaccgtgccgatccgctggaacagggcgcgggtgaccagggtctgatgtttggctacgcaactaatgaaaccgacgtgctgatgccagcacctatcacctatgcacaccgtctggtacagcgtcaggctgaagtgcgtaaaaacggcactctgccgtggctgcgcccggacgcgaaaagccaggtgactttccagtatgacgacggcaaaatcgttggtatcgatgctgtcgtgctttccactcagcactctgaagagatcgaccagaaatcgctgcaagaagcggtaatggaagagatcatcaagccgattctgcccgctgaatggctgacttctgccaccaaattcttcatcaacccgaccggtcgttttgttatcggtggcccgatgggtgactgcggtctgactggtcgtaaaattatcgttgatacctacggcggcatggcacgtcacggtggcggagcattctctggtaaagatccatcaaaagtggaccgttccgctgcgtacgcagcacgttatgttgcaaaaaacatcgttgctgctggcctggccgatcgttgtgaaattcaggtttcctacgcaatcggcgtggctgaaccgacctccatcatggtagaaactttcggtaccgagaaagtgccttctgaacaactgactctgctggtacgtgagttcttcgacctgcgcccatacggtctgattcagatgctggatctgctgcacccgatctacaaagaaaccgcagcatacggtcactttggtcgtgaacatttcccgtgggaaaaaaccgacaaagcgcagctgctgcgcgatgctgccggtctgaagtaatctttcttcacctgctttcaaaggccagcctcgcgctggcctttttcttttacctcaccgcggtggataggcattcacgccgcatccggcaaaaagctgcccgcacaataacatcattcttcctcaacacgttttatcgcaaattatcatcactactgaaaccgattacaccaataacaccagccaaatatttgtaatattttcatattattattcagttttcacagttgttacatttcttttcagtaaagtcttaattgcagataacagcgtttaatctatgatgatataactcaattattttcatgcacttaaaccataactaagataaatgttagtgtaagcgattacactgatgtgatttgcttcacatctttttacgtcgtactcacctatcttaattcacaataaaaaataaccatattggagggcatcatgcctgacgctaaaaaacaggggcggtcaaacaaggcaatgacgtttttcgtctgcttccttgccgctctggcgggattactctttggcctggatatcggtgtaattgctggcgcactgccgtttattgcagatgaattccagattacttcgcatacgcaagaatgggtcgtaagctccatgatgttcggtgcggcagtcggtgcggtgggcagcggctggctctcctttaaactcgggcgcaaaaagagcctgatgatcggcgcaatcctgtttgttgccggttcactgttctctgcggctgcgccaaacgttgaagtactgattctttcccgcgttctgctggggctggcggtgggtgtagcctcttataccgcaccgctgtacctctctgaaattgcgccggaaaaattcgcggcagtatgatctcgatgtatcagttgatgatcactatcgggatcctcggtgcttatctttctgataccgccttcagctacaccggtgcatggcgctggatgctgggtgtgattatcatcccggcaattttgctgctgattggtgtcttcttcctgccagacagcccacgttggtttgccgccaaacgccgttttgttgatgccgaacgagtgctgctacgcctgcgtgacaccagcgcggaagcgaaacgcgaactggatgaaatccgtgaaagtttgcaggttaaacagagtggctgggcgctgtttaaagagaacagcaacttccgccgcgcggtgttccttggcgtactgttacaggtaatgcagcaattcaccgggatgaacgtcatcatgtattacgcgccgaaaatcttcgaactggcgggttataccaacaccacagagcaaatgtgggggacagtgattgtcggcctgaccaacgtacttgccaccttcatcgcaatcggccttgttgaccgctggggacgtaaaccaacgctaacgctgggcttcctggtgatggctgctggcatgggcgtactcggtacaatgatgcatatcggtattcactctccgtcagcgcagtatttcgccatcgccatgctgctgatgtttattgtcggttttgccatgagtgccggtccgctgatttgggtactgtgctccgaaattcagccgctgaaaggccgcgattttggcatcacctgctccaccgccaccaactggattgccaacatgatcgttggcgcaacgttcctgaccatgctcaacacgctgggtaacgccaacaccttctgggtgtatgcggctctgaacgtactgtttatcctgctgacattgtggctggtaccggaaaccaaacacgtttcgctggaacatattgaacgtaatctgatgaaaggtcgtaaactgcgcgaaatcggcgctcacgattaatctcctcaggcttcctcctgtcacggaggaagccacctcttgcagtcatcttttcttcgctctatcctctgccgctatgaaaacatcccgtctccctatcgccatccaacaggccgttatgcgtcgcctgcgggaaaaactcgcccaggccaacctgaagctagggcgtaactacccggagccaaaactctcttacacccagcgcggaacctccgccggaacggcctggctggaaagctatgaaattcgcctcaatcccgttttgctgttggaaaacagtgaagcctttattgaagaagtggtgccgcacgaactggcacatttgctggtatggaaacatttcggccgcgtagcaccacatggcaaagagtggaagtggatgatggaaagcgtgctgggcgttcccgcccgtcgtacgcatcagttcgaactgcaatccgtgcgtcgcaacaccttcccctaccgctgcaagtgccaggagcatcagcttaccgtacgccgccataatcgcgtagttcgtggcgaggccgtctatcgctgtgttcactgcggtgaacagctggttgcgaaataaccatctgaactatcaggaactttcctgatctggctgattgcataccaaaacaactttcgctacgttgctggctcgttttaacacggagtaagtgatgtaccgttatttgtctattgctgcagtggtactgagcgcagcattttccggcccggcgttggccgaaggtatcaatagtttttctcaggcgaaagccgcggcggtaaaagtccacgctgacgcgcccggtacgttttattgcggatgtaaaattaactggcagggcaaaaaaggcgttgttgatctgcaatcgtgcggctatcaggtgcgcaaaaatgaaaaccgcgccagccgcgtagagtgggaacacgtcgttcccgcctggcagttcggtcaccagcgccagtgctggcaggacggtggacgtaaaaactgcgctaaagatccggtctatcgcaagatggaaagcgatatgcataacctgcagccgtcagtcggtgaggtgaatggcgatcgcggcaactttatgtacagccagtggaatggcggcgaaggccagtacggtcaatgcgccatgaaggtcgatttcaaagaaaaagctgccgaaccaccagcgcgtgcacgcggtgccattgcgcgcacctacttctatatgcgcgaccaatacaacctgacactctctcgccagcaaacgcagctgttcaacgcatggaacaagatgtatccggttaccgactgggagtgcgagcgcgatgaacgcatcgcgaaggtgcaaggcaatcataacccgtatgtgcaacgcgcttgccaggcgcgaaagagctaacctacactagcgggattctttttgttaacccctaccccacgcgtacaaccgcgtggggagacgacgcggatttttaactatgcgtatcccccgcatttatcatcctgaaccactgaccagccattctcacatcgcgctttgcgaagatgccgccaaccatatcgggcgcgtactgcgcatggggccggggcaggcgttgcaattgtttgacggtagcaaccaggtctttgacgccgaaattaccagcgccagcaaaaaaagcgtggaagtgaaggtgctggaaggcaagatcgacgatcgcgaatctccgctgcatattcacctcggtcaggtgatgtcgcgtggtgaaaaaatggaatttacgatccagaaatcgatcgaactcggtgtaagcctcattacgccacttttttctgagcgctgcggcgttaaactggatagtgaacgtctgaacaagaagctccagcagtggcagaagattgcaattgctgcctgtgagcagtgtggtcgtaaccgggtgccggaaatccgcccagcgatggatctggaagcctggtgtgcagagcaggatgaaggactgaaactgaatcttcacccgcgcgccagtaacagcatcaatacgttgccgttaccggttgaacgcgtccgcctgctgattggcccggaaggcggtttatcggcagatgaaattgccatgactgcccgctatcaatttactgatatcctgttgggacctcgcgttttgcgtacagagacaactgcgctcaccgccattaccgcgctacaagtacgatttggcgatttgggctaacggagaagaataatgatcaagctcggcatcgtgatggaccccatcgcaaacatcaacatcaagaaagattccagtttcgctatgttgctggaagcacagcgtcgtggttacgaacttcactatatggagatgggcgatctgtatctgatcaatggcgaagcccgcgcccatacccgcacgctgaacgtgaagcagaactacgaagagtggttttcattcgtcggtgaacaggatctgccgctggccgatctcgatgtgatcctgatgcgtaaagacccgccgtttgataccgagtttatctacgcgacctatattctggaacgtgccgaagagaaagggacgctgatcgttaacaagccgcagagcctgcgcgactgtaacgagaaactgtttaccgcctggttctctgacttaacgccagaaacgctggttacgcgcaataaagcgcagctaaaagcgttctgggagaaacacagcgacatcattcttaagccgctggacggtatgggcggcgcgtcgattttccgcgtgaaagaaggcgatccaaacctcggcgtgattgccgaaaccctgactgagcatggcactcgctactgcatggcgcaaaattacctgccagccattaaagatggcgacaaacgcgtgctggtggtggatggcgagccggtaccgtactgcctggcgcgtattccgcaggggggcgaaacccgtggcaatctggctgccggtggacgcggtgaacctcgtccgctgacggaaagtgactggaaaatcgcccgtcagatcgggccgacgctgaaagaaaaagggctgatttttgttggtctggatatcatcggcgaccgtctgactgaaattaacgtcaccagcccaacctgtattcgtgagattgaagcagagtttccggtgtcgatcaccggaatgttaatggatgccatcgaagcacgtttacagcagcagtaacccaccttagcgagaaggatctcgttgagactctgagtgacagcgcccttctttccacgcatactgggcgctgttgcttttttgaaccaggaaacagaacctctgacaatgaatttacagcatcactttcttattgccatgcctgctctccaggatccgattttccgtcgttccgtggtctacatttgcgaacataataccaatggtgcaatggggatcatcgtcaacaagccgctggaaaatctcaaaattgaagggattctggaaaagctgaagatcacgccggagccgcgtgatgaatcaatccgtctggataaaccggttatgctcggcggtccgctggctgaagatcgcgggtttattttgcatactccgccctccaattttgcttccagcattcgcatttcagacaacacagtgatgaccacttcccgcgatgtgctggaaacgctcggcaccgataaacaaccgtctgacgtattggtggctctgggttatgcctcctgggaaaaaggtcaactggaacaagaaattctcgataacgcgtggctaacggccccggcggatctgaatattctgttcaaaacaccgattgccgaccgctggcgcgaggcggcaaaactgattggtgtggatattctcaccatgcctggtgtggcagggcacgcctgatgagtggaaccttactcgccttcgacttcggtaccaaaagcattggtgtagcggtcggccaacgcattaccggcaccgctcgccctttgcctgcaattaaagcacaggacggtacgccggactggaacattatcgagcgtttactgaaagagtggcagccggacgaaatcatcgtcggtttgccgctgaatatggacggcaccgagcaaccattgactgccagagcgcgtaaatttgccaaccgtattcatggtcgtttcggtgttgaagtaaagctccatgacgaacgtcttagcaccgtggaagcccgttccggtctgtttgaacagggcggctatcgggcgctcaacaaaggcaaagtcgactctgcctctgcggttattattctcgaaagctatttcgagcagggatattaaggcgatctaaaagcctggcggatagtcgttaccgccatcttgccggatgcggcgtgaacgccttatccagcacacatctggcagcggctgtaggtctgataagacgcgttagcgtcgcatcagacatttattgcctttataggccctataaacttgcgcatcgggcatggcaacgtcacaaacgcccttcccccacccgctgctgataactctgctgaaacgttatcatccccacctgctgcccggtttgaataacatgcggtaactggtgggttttcccttcgcgaatcaaattccccaccgcgggagtgttaatcaataattcaaacagcgccacgcgtccttcctgtttatccacttccagcttttgtgacaacacggcccgtaaactacctgccagttgattacgtacgggatctttttcctgcgccggaaatgaatccaccagtcgctcaactgcctgcgcggcaccacgcgtatgtaatgttgccagcaccaaatgcccggtttctgccgccgtcagtgccagacggattgtctcgctgtcacgcagctctccgagcaaaatcacatcaggatcttcccgcaatgcagcccgcaaccccgatgcgaaagtcatacagtgcaaaccaatttcccgctgctggatcaaacatcgctggctggcatagagatattccacaggatcttccagcgtcagaatatgcgcatcggcatgttgattaagatagccaaccatcgccgccagcgtggtagatttgccgctccccgtcgcccccgtcaccagaatcaggccattctcgctcttgagtaattccggcaataccggtggcgcaccaagctgttcgagctgtggacagtgcgaaggtaacaaccgtaatgccagagaaataccttgccgttgcgcgaacgcactgccacgcaaccgctggttttccgccagcgacacggcaaaatccagctggccattttccagcaatattgcccgctgatcgtcatccagccactcccgcagtagctcttcgacgtccggcgcatcaaacggcgcagcttccattctgccgcgaatgcgccatcgtgcgggccaggcgctgcacaggtgtagatccgagacgttatgctttacactaagggccacaatttcttccatattcatactaagatcctcggaaaatgaacgatattgcgcataacctggcacaggtccgggacaaaatctcagcggctgcaacgcgttgcggccgttctccagaagaaattacgctgcttgcagtcagtaaaacaaaacctgcgagcgccatcgcagaagccattgatgccgggcagcgtcaatttggtgaaaactacgttcaggaaggggtggataaaattcgccactttcaggaactgggcgtaacaggattagaatggcattttattggcccgttgcagtctaataaaagccgcctggtggcagagcatttcgactggtgtcataccatcgaccgtttgcgcatcgctacccgcctcaacgatcagcgcccggcagaacttccccctcttaacgtactgattcaaattaatattagtgatgaaaacagtaagtccgggattcaactggcagaactggacgagctggcagctgcggtcgctgaactaccgcgtttacgtctgcgcgggctgatggcaatccctgcacctgagtcagaatatgtaaggcagtttgaagttgcacgccaaatggctgtagcatttgccggactgaaaacgcgctacccgcatatcgacacgctctctctgggaatgtcggacgatatggaagccgccattgcggcaggtagcacgatggttcgtatcggcactgcaatttttggtgcgcgtgattactctaaaaaataaggaattaaaggaacgccatgaatacgttgactttcctgctttcaacggtcattgagctgtataccatggtgctgttattacgcatctggatgcagtgggctcattgtgatttttacaaccccttctcacagtttgtagtgaaggtaacgcagccaattatcgggccactgcgccgcgttattccggcaatgggacccattgacagcgcctcgctgctggttgcctatattctcagttttatcaaagccatcgtgctgtttaaagtggtgaccttcctgccaatcatctggattgctggtttactgattctgctgaaaaccatcggcctgctgattttctgggtcctgctggtgatggcgattatgagctgggtaagccagggtcgtagcccgattgaatacgtgctgattcagctggccgatccgctgctgcgcccgattcgccgcttgctaccggcaatgggtgggattgatttctcgccgatgatcctcgttctgctgctgtatgtcatcaatatgggtgtcgcagaagtattacaggcaaccggaaacatgctgctgccggggctgtggatggcgttatgagtgccgtaacagttaatgatgacggtctggttttacggctctatattcagccgaaagccagccgtgattctattgtcggtttacatggcgacgaagttaaagtcgccattaccgcgccgccggttgacggtcaggccaacagtcatctggtgaagtttctcggtaagcaattccgggttgccaaaagccaggtggtgattgaaaaaggcgaacttggccgccacaaacaaattaaaatcattaatccgcaacaaatcccgccagaaatcgcggcgttaattaattaggtatcctatgcaaaaagttgtcctcgcaaccggcaatgccggtaaagtgcgtgagctggcgtcgctgcttagcgacttcggtcttgatatcgtggcccaaacagacctcggcgtagattccgctgaagaaaccggcctgacctttatcgaaaacgcgattctgaaagcgcgccatgcggcaaaagtgaccggtttaccggcaattgccgacgactctggtctggcggtagatgtgcttggcggcgcgccgggcatttactccgcgcgttattccggtgaagacgcgaccgatctaaagaatctgcaaaaactgctggaaacactgaaagacgtaccggatgaccaacgtcaggcgcgtttccactgcgtgctggtatatctgcgtcacgcggaagatccgactccgctggtatgccacggtagctggccgggcgtgattactcgtgaaccagcgggcactggtggctttggttatgatccaatcttcttcgtaccttccgaagggaaaaccgccgccgaactgacccgcgaagaaaagagcgccatttcccaccgtggtcaggcattgaaactgctgctggacgctttacgtaatggttaaattaccgccgctgagtctctacattcacatcccgtggtgcgtgcagaaatgcccgtactgcgatttcaactctcacgcgttgaaaggagaagtgccgcacgacgattatgttcagcatctgcttaacgatctggacaacgatgtggcttacgctcagggccgtgaagtaaagacaatctttattggcggtggtacgccgagcctgctttccggcccggcgatgcaaacgctgctggacggcgtgcgtgcgcgtttgccgctggcagcggatgcagaaattactatggaagcgaacccaggcacggtagaagcggatcgctttgtcgattatcagcgtgctggtgtgaaccgcatctctattggtgtgcagagttttagcgaagaaaagctgaaacgactcgggcgcattcatggcccgcaagaagcgaaacgagcggcaaagctggcgagcggtttagggttacgtagctttaaccttgatttgatgcatggactaccggatcaatcactggaagaggcgcttggcgatctacgccaggccattgaactgaatccgccgcatctttcctggtatcaactgaccatcgaacccaatacgctgtttggttcgcgaccaccggtgctgccggacgatgacgcgctgtgggatattttcgaacaggggcatcagttattaaccgcagcgggttatcagcaatatgaaacttccgcttacgccaaacccggttatcagtgccagcacaatctcaactactggcgatttggcgactacatcggtattggctgtggcgcgcacggcaaagtgaccttcccggatgggcgcattctgcgtaccaccaaaacgcgtcatccgcgtggttttatgcagggaaggtatctggaaagccagcgtgatgtcgaagccgcagataagccgtttgagttctttatgaatcgcttccgtctgctggaggccgcgccgcgcgtggagtttattgcgtataccgggctttgcgaagatgtgattcgcccacagttagacgaggcgattgcccagggttatctcaccgaatgtgcggattactggcagataacggaacatgggaagctgtttttaaattcgctgctggagctttttctggctgagtaaacttgtattgccggatgcggcgtgaacgccttatccagcctacatgtggcaacggttgtaggtctgataagacgcgcaagcgtcgcatcagacgttgattgccggatgcggggtcaacgccgcatcctgctacaaatcgtgcactatatcaaacttacttaatcaccccattgcgccgcagttgttcggtatcttttttccagcgttcattagcttggttgatatcgtcaattttcatcaaaatcgcgacttttttactatttatttctgaaactttcatcgttaacggatattgccctttttcgagcgttacccagtcatcctgcaatttacggctgagtttttgtgattgcagaaaagtctgtcgccgttgttcgttgatatcgaaatctcgtttctgctgaatcggcacttcataacactcttcactctgtttatgacatgccgcaatcgccggttgataaacctctttgtcatatttaaccgcgaacgcctcgctatcgttctgtttattaaactcatcacgctgttggtgaatttttttaaaggcttcttcgcgggtcatttgcttaccgtttgcatcttttccccaatatgcatccgctgctttctgcgccgccaccatttgcttatcaagcgctttcacttccttttccagcgcaggaatcgagttcttctgggtattcaacgcagattcaagctgactaaagcgataattgaaatcttcgctattcacgatcagatatttattattcgttttgatatcgtcgaccacccgcccacgatcgctggctgccgcctgaaaagagtaaaagttcaccgaccagccagacgcgggcgttcctttactggttaacatcgccgagaattttaccggtttatctttcgtccaggtctgttcgagcagttcgtaatctgccaactgaccgacccaggtatagagatcgtcactggaagagacatcgccttccgctgaccaggtggcctgattacccttagcatcaagattttttaaggtgatagcatcaagcttgagaatgccgtgatactgctttttgaattgatcttttaagatattttcagttggcggttcgccatctgcccaagcattaccagtcatcaacataagcagtgccgtgccaacaatccattgctttttcacccgaaaaacctcacgcggaataatttattccggtgattatcattagggtaatgaaaattggcaatggacgtaagtctgaagtgaaaaagccccggcacgataccggggcgaggtgattagtactgattgaagatctgctggatctgctgcggatctttggtttgcgtcagagccagctgcagcaggacgcgcgctttttgcgggttcagcgtgccagaggcgacgaagccgtatttcgcatcatccacttcagcatcctgagtggtagcacccgtcggtacgcgggaagaacgcactactgcagtgccgtttttcgcggcggttgccagggtgtcgaacacggatttatacaggttaccattacccacaccagcgctaacgatgccatcatagcccgcatctaccagtgctttagccggaagatcggatgcgttagcgtagttataaacgatgccgactttcggcagctcattcagcttagagacatcgaatggcgtatcgctggtgtgcttacgtgccggggtacgttggtagtcaatcttaccgttgtgaatgtatcccagaggaccgtagttaacagacttgaaggtcgctacgtcggtggtgttggttttggtgacatcgcgaccgtccagtacggtgtcgttcatcaccaccagcacgccacgattagcggaggctttatcagctgcggtcactaccgcgttatacaggttgaatggaccgtctgcgctcatggacgtggacgggcgcattgcgccgaccatcaccaccggtttgtcgcatttcaccgtcaggtcgaggaagtaagcggtttcttccatcgtgtcggtaccgtgggtaatgacgaagccgtcggttttatcgcagtcggtgttaatttttttcgccagtgtcagccagacattatcgttcatgtcctgggagccgatattcactacctgctcgcctttaacgttcgcaatgtcttttagttgcggcaccgcattaaccagattttctacgccaactttacccgctgtgtagttagatttggttgcggagtcaccaccaccggcaatggtcccgccggttgctaaaatggtgatattgggtaatgccaatgctgcaccactaaaacccataaccagtgcggcaagtgccgtctttttgaaaaactccatttcattcctccagttacgtgaacgctacgcattatcccttagctctgtatgggaaatttgacgttaaacaatttacaacgtgaatatattttggagatctacaaagttagaggcaggtaacaaaacgaagaattaaacggcataaaaaagtattatgccgtcttaaaatagaggattattttaaattcccgaccagggctttgcggctatcttccagagtcacaacgcggctacaaacatctttgccaaactgctggaaatctttttcctgctttttccactcggtttggattgaggattgcagcccccccaggcttcccagcacattctgtaatgggttaccgccgcttttcagcaccgctttcgcgcccatttcattaatgctgtcctgtaaaattccacccattgcctgattcactaattgctggccttcggcgcgaacctgatcaatggctttatagtgaaacgtcaggccatcgctgcgcgtttcgataatgcggttcatctgctctttcagctgcgcatcaagtttggtcagacggctgcgcattttgctgctttcgcccatctcctgaacgataattttatccagcgcaatacgggctttttcgacgcggcttttcgcgccttcatcaatccacggcagcgtgctgcgtagttcagcctgataatccttcgcctgctcgcgctgggcggcattcagggaatattgcttaccgttatacatcacgttgccgtctggcgtgatcaccagattgccgttttcgcccttcacctgcacggtttgcgggctgacaatcacatcgtcacgcggcgtgacgctgcactggtagtcggcgtgagcggtcattgccgtcactgaaagtgctgccgccagcagcattttgcgcatcatagtcttccctcaagaaaaaatcaggccagcatttgctggccccagattgataacaaagtacgcgttttccatgccggatgcggcgtaaacaccttatcccgcctactcgatcgtgcatctttccaggcatgataagcgtagcgcatcaggcagttttgcatttgtcatcgcccgtatgctttcttagtcccaccaaacgtcgaaaagttcgctggtgcgtacctcatccagtttgcgctcttccagccacttacgcacaatcgcctgatgttcttcggtgcatttgccgatttcctgcatgcagatcagaccttcccaggccagataaccgctgccgtcaaaggccagtttgttcggttcgataacctcgttaataaaatcatcaacggttttatcaatctgttcttccgatgtaccttccgggaatcgccatgccaccgaaaatcctaattcctggaattcgtcgatgtgcatttttttacgcagacgacggctacggttctttgccattatttcaccctctcgaacattaagtcccatactccgtgaccaagacgatgaccacgttgttcaaatttcgtcaccggacgtgatgccggacgcggtacgtaatcattgctctctgacaggtttttataaccgtcaatagaagacatcacttcaagcatatgttccgcataaggttcccagtcggtcgccatatggaatacgccccccagctgcagtttgctttttaccagttcggcaaacggcacctgaacgatacggcgtttattatggcgcgctttgtgccacgggtcagggaaaaagagctgcaccatgcgcaatgaattgtcaggaatcattttatgcagcacttcaaccgcatcgtgacacatcacgcgcaggttgcttaaaccttcttcatgcgcagaagccaggcacgcaccaacgcccggtgaatgcacttcaatgccgaggaagtcctgctcggggcgatctttagccattgccaccagcgacgcccccatgccaaaaccaatctcaagcgtcaccggcgcttcacggccaaaaagcgcggggaaatccagcatatcttcgctgaactcaacgcccatcaccggccagtagttttccagcgcatgttcctggcctttggtcagtcgcccctggcggcgcacaaaactacggatacggcgcagtgggcggccgttttcatcaaattccggtgaaatgacgtcgtttttcataaagatttagtcgcttgtgaaagtgttctgaaaacgggcattatccaaagttagttgccggatgcaagcatgataaggccgtggctgcggaaagttccggtttacaccctgccgtcgctgtgctgcaatcttgcccccaacaacagtgaattcggtgaccatgcaagcgtcgcaattttcagcccaggttctggactggtacgataaatacgggcgaaaaactctgccctggcaaattgacaagacgccctacaaagtatggctctcagaagtgatgttgcaacaaactcaggttgcgaccgttatcccctattttgaacgctttatggcgcgcttcccgacggtgaccgatctcgccaatgcgccgctcgacgaagttctccacttgtggaccgggcttggctattacgcccgcgcgcgcaatctgcataaagcggcacaacaagtggcgaccttacacggcggtaaattcccggaaacctttgaggaagttgcagcactgccgggcgtcgggcgttccaccgcaggcgcgattctctcgctttctctgggtaagcactttccgattctcgacggtaacgtcaaacgcgtgctggcgcgctgctatgctgtaagcggctggcctgggaaaaaagaggtcgagaataaattatggagtttaagcgagcaggtgacgcccgcggtcggcgtggaacggtttaatcaggcgatgatggatttgggcgcgatgatttgtacgcgctcgaaaccgaaatgttcgctctgtccgctacaaaacggatgtattgccgccgccaacaatagctggtcgctttatccgggcaaaaaaccgaaacagacgctgccggagcgcaccggctactttttgctattacagcacgaagatgaagtattgctggcgcagcgtccgccgagcggattgtggggcggtttatactgtttcccgcagtttgccgacgaagaaagtttgcggcattggctggcgcaacggcagattgctgccgataacctgacgcagctgaccgcgtttcgccataccttcagccatttccacttagatattgtgcctatgtggcttcccgtgtcgtcattcaccggctgcatggatgaaggcaatgcgctctggtataacttagcgcaaccgccgtcagttggcctggcggctcccgtggagcgtttgttacagcagttacgcactggcgcgccggtttagcgcgtgagtcgataaagaggatgatttatgagcagaacgattttttgtactttcctgcaacgtgaagcagaaggtcaggattttcagctgtaccccggcgagctgggaaaacgcatctataacgagatctccaaagaagcctgggcgcagtggcagcacaagcaaaccatgctgattaatgaaaagaaactcaacatgatgaatgccgagcaccgcaagctgcttgagcaggagatggtcaacttcctgttcgagggtaaagaggtgcatatcgagggctatacgccggaagataaaaaataaaaacagtgccggagcacgcctccggcaacttgcataaaaacaaacacaacacgcacccggaatgatgaaaaaatatctcgcgctggctttgattgcgccgttgctcatctcctgttcgacgaccaaaaaaggcgatacctataacgaagcctgggtcaaagataccaacggttttgatattctgatggggcaatttgcccacaatattgagaacatctggggattcaaagaggtggtgatcgccggtcctaaggactacgtgaaatacaccgatcaatatcagacccgcagccacatcaacttcgatgacggtacgattactatcgaaactatcgccgggacagaacctgccgcgcatttgcgccgggcaattatcaaaacgttgctgatgggtgacgatccgagttcggtcgatctctattccgacgttgatgatattacgatttcgaaagaacctttcctttacggtcaggtggtggacaacaccgggcagccgattcgctgggaaggtcgcgcaagcaacttcgcggattatctgctgaaaaaccgtctgcaaagccgcagtaacgggctgcgtatcatctacagcgtcaccattaacatggtaccgaaccaccttgataaacgtgcgcacaaatatctcggcatggtccgccaggcgtcacggaaatatggcgttgatgagtcgctgattctggcaattatgcagaccgaatcttcctttaacccgtatgcggtcagccgttccgatgcgctgggattaatgcaggtggtacaacatactgccgggaaagatgtgttccgctcgcaggggaaatccggcacgccgagccgcagtttcttgtttgatcctgccagcaatattgataccggcaccgcgtatctggcgatgctgaacaatgtttatctcggcggaattgataacccaacatcgcggcgttatgccgtcatcaccgcctataacggcggcgcaggcagcgtgctgcgagtcttttcgaatgataagattcaggctgccaatattattaacaccatgacgccgggcgatgtttatcagacgctgacgacccgccatccctctgcggaatctcgccgttatctttataaagtgaataccgcgcaaaaatcctaccgccgccgataattccattaaccgcccctgacgatgctcaggggcaaaaatgttatccacatcacaatttcgttttgcaaattgggaatgtttgcaattatttgccacaggtaacaaaaaaccagtccgcgaagttgatagaatcccatcatctcgcacggtcaaatgtgctttttcaaacactcatccgcatcacgatgtgaggaaattaacatgaatcttaagctgcagctgaaaatcctctcttttctgcagttctgtctgtggggaagttggctgacgaccctcggctcctatatgtttgttaccctgaagtttgacggtgcttctattggcgcagtttatagctcactgggtatcgccgcggtctttatgcctgcgctgctggggattgtggccgacaaatggttaagtgcgaaatgggtatatgccatttgccacaccattggcgctatcacgctgttcatggcggcacaggtcacgacaccggaggcgatgttccttgtgatattgattaactcgtttgcttatatgccaacgcttgggttaatcaacaccatctcttactatcgcctgcaaaatgccgggatggatatcgttactgacttcccgccaatccgtatctggggcaccatcggctttatcatggcaatgtgggtggtgagcctgtctggcttcgaattaagccacatgcagctgtatattggcgcagcactttccgccattctggttctgtttaccctgactctgccgcatattccggttgctaaacagcaagcgaatcagagctggacaaccctgctgggcctcgatgcattcgcgctgtttaaaaacaagcgtatggcaatcttctttatcttctcaatgctgctgggcgcggaactgcagattaccaacatgttcggtaataccttcctgcacagcttcgacaaagatccgatgtttgccagcagctttattgtgcagcatgcgtcaatcatcatgtcgatttcgcagatctctgaaaccctgttcattctgaccatcccgttcttcttaagccgctacggtattaagaacgtaatgatgatcagtattgtggcgtggatcctgcgttttgcgctgtttgcttacggcgacccgactccgttcggtactgtactgctggtactgtcgatgatcgtttacggttgcgcattcgacttcttcaacatctctggttcggtgtttgtcgaaaaagaagttagcccggcaattcgcgccagtgcacaagggatgttcctgatgatgactaacggcttcggctgtatcctcggcggcatcgtgagcggtaaagttgttgagatgtacacccaaaacggcattaccgactggcagaccgtatggttgattttcgctggttactccgtggttctggccttcgcgttcatggcgatgttcaaatataaacacgttcgtgtcccgacaggcacacagacggttagccactaattacgcaaagaaaaacggggtcgccagaaggtgacccgttttttttattcttacttcaacacataaccgtacaaccgtttcatgccatccgcatcggtttcgctataaacaccttgcagctccggcgaaaatcccggcaacaaattcaccccttcttccagtgcaaggaaataacgttgaaccgccccaccccagacttccccgggtaccacgcaaagcacgccaggtggataaggcaacgccccttctgccgcaattcgcccttcggcatcacgaatccgcaccaactccacttcaccgcgaatataagcgctatgcgcatcctgggggttcatcaccactgacgggaaactctgctggcggaacatcgctttttgtaggtctttgacgtcgaaactgacatacagatcgtgcatctcctgacacaactggcgcagggtgtagtcgcgatagcgcaccggatatttgttataaacgctcggcaacacctcagccagcggcgagtcatcctcaatatgctgttcaaactgcgccaacatctctaccagttgtgccagcttctcgtggctttccgccggagttaataagaacagaatggagttgagatcgcacttctccggcacaatgccgttctcacgcagatagtgcgccagaatcgtcgccggaacgccaaagtcgctatattcgccggtttcggcattgatacctggtgtagtgagtaacagcttgcacggatcaacaaaatactgatccgcggcatatccttcaaagccgtgccacttcgcccccggctcaaaactgaaaaaacggcggtcgctggctaacacagacgtcggataatcctgccacaatttgccatcaacaacgggcgggataaacgggcggaacagcttacagcgcgcaagaatagccttgcgcgactcaatacccaactcaacgcactcagcccacagccgacgcccactctccccttcatgaattttggcgttaacatccagtgcagcaaacagcggatagaaagggctggtagaagcatggagcataaaggcgttattcaaccgcttatgcgggcaaaaacgcgcctgtccgcggatatggttatcttttttatggatctgcgacgtctgtgagaatccagcctgctgtttgtgcaccgactgggtcacaaaaatccccggatcgttttcgttaagttctaacagcagcggcgagctatccgccatcatcgggataaattgttcgtaaccgacccacgcggaatcaaacagaatgtaatcacacagatgcccaacggtatcgatcacctgacgggcgttatagacagttccgtcataggttcccagctgaataatcgccaggcgaaacgggcgcggcagctcggctttttctggcgcaacgtcgcgaatttgctggcgcagatactcttcattaaaacagtgcgcatcaataccgccaatgaaaccaaacgggttgcgtgaagcttccagatagaccggcgtcgcccccgcctgaatcagcgcgccgtgatgattcgacttatggttgttacggtcgaagagcaccagatcgccacgcgttaacagcgcattcgtcaccactttattcgctgccgatgtgccgttcagcacaaaataggttttatcggcatgaaagactttggctgcgaatttctgcgcatctttcgccgatccttcatgaataagcagatcgcccaattttacgtcagcgttacacatatcggcgcgaaagacgttctcaccaaagaaatcgtaaaaatggcgtccggcaggatgctttttaaaaaacgcaccatgttgatgtccagggcaagcaaaggtgctgttgcccatctcaacgtactgcgtcagcgtgtcataaaacggtggcagcaaattctcttcatactgacaggctgcggattccagctccagccactgctgctcgttgccgttgattaccgccgtaacgcccgcaggtaattcaacagcatgttcggaatacaaaaacaccggtagatgaaaaccggtgcgcttaagcaacgcaagaatgccactgcgactatccgcagcggtaatgacgactgccgcgacgtccgtaaaatcagtatctcccaacgccaccacgcgacgatgagaagaaagtcgggataccagttcactactggcggcaatattcattgatttcataagcgcaaacccgtttcggggaagtaagaataccggacaaggtggaaaaccctgccccatgagatatgggtcaaactggtcaccagctccgaccgccagacatcagtaaaagcagaaacgctctgattttactgttgtcctgcagtgagcgtgcgttaacttcaccgcatgagcagtaacatagaaagggaaacgtttcgcgcgaaatggcgataagcgagagaatgtaaggagatggcgtgcatcgggcaaactccgtacagagaggagaaaattcgcgcaatcatggcacctttcgctaaagcgtgcaagccaggactttgcgaccagacaagccatcaacaaggcaaaaagttcataataagaaaatcaaacaatacagctaacaggaactcttgtggtcatcggcccttttatcaacgctagtgcagtcttactgggtggcgttctcggcgcactgctcagccaacgcttaccggaacgtatccgcgtctccatgacatctatttttggtctggcatcgctggggattggtattttactggttgtgaaatgcgccaaccttccagcgatggttttagctacgctacttggcgctctaattggcgaaatttgtttgctggagaaaggtgtcaatacagcagtcaccaaagcacaaaatctgtttcgtcactcacgtaagaagccagcgcatgaatcttttattcagaattatgtcgcgattattgtcctgttttgcgccagcggcaccgggatcttcggggcgatgaacgaagggatgaccggcgatccgagtattttaatcgccaagtcatttcttgatttctttacggcgatgatcttcgcctgctcgctgggtattgcggtgtcggtaattagtatcccattactgatcatccagttaacgctggcgtgggctgccgcgctgatattaccgctgaccacaccgtcgatgatggcagacttcagcgccgtaggcggtttattgctgctggcaaccggattacgcatctgtggcattaaaatgttcccggtggtcaacatgcttccagcactccttctggcaatgccgctttccgccgcctggaccgcctggtttgcctgacaatgcgtgcaatagcggcaaagtgatgatagattgtgcagtctgcagtaaattgaagaaatttgattgacgagacgaggcgaatcaggtttaatgcgccccgttgcccggatagctcagtcggtagagcaggggattgaaaatccccgtgtccttggttcgattccgagtccgggcaccaaattcatatcaacggacctccacggaggtccgtttttcattccaggacgccacgatttaagcgtcctgcctccaaatcaattctaccgaactcaaccagattccccccacatcaacctcattgtgtgggtataattgtgggcataccccagttcgacagaatttgtaccctctttaacgcattcagaaggctgaactatggcactgactgacgcaaaaatccgggcagcaaagcctactgacaaggcttataaactcactgacggggctggcatgttcctgctggtacatcctaatggttcccgttactggcgtctccgttatcgtattctgggtaaggagaagactctggcacttggtgtgtatccagaagtttctctctccgaagctcgtacaaaacgggatgaggcccgaaaactgatttcagaggggattgacccttgcgaacagaaaagagttaaaaaagtagtccctgatttacagctctcttttgaacatattgcacgacgctggcatgccagtaataaacaatgggcacaatcacacagcgataaagtactcaaaagcctcgagacacacgttttcccctttatcggcaaccgggatatcacaacactcaataccccggacctgcttatccctgttcgtgctgcagaagcaaaacaaatttatgaaatcgctagtcgtctgcagcaaagaatatctgctgtaatgcgttacgccgtacagtctggcatcatcagatataacccggctctggatatggctggtgcattgaccacggtaaaacgccagcatcgccccgctctgaatctttcacgcctgcctgaacttctgtcgcgtattgacggttataaaggccagcctgtcacccggcttgccgttatgctgaatttactggtttttattcgttccagtgaactcagatatgcccgctggtctgaaattgatattgacaatgccatgtggactattccagccgaacgcgaacctctgcctggcgtaaaattctcacaccggggctccaagatgcggacaccacatcttgtgccactcagtaaacaggctgtagccatactgacagaacttcagacatgggcaggtgaaaatggtctgatatttacgggtgcacatgacccgcgtaaaccaatcagtgaaaatactgtaaataaagccctgagggtgatggggtatgacacaacccaggaagtctgtggccatggattccgggcgatggcgtgcagtgcattgattgaatcaggtttgtggtcccgcgatgctgtggaacgtcagatgagccatcaggaacgtaacggtgtacgtgctgcttacattcataaagcagaacatctggaagaacggcgactgatgctacagtggtgggccgattttctggatgcaaacagagaaaaatttatcagtccatttgaatatgcaaagattaataacccattaaaataataaaatccgggcaatagcccggattttattttcaatatatttttctttaaactctataataaattgtggcacaaatttctctaaatagctataacgaatactgctacatatccgataacatcagtgattatcttcttcctgattgcaaaagaatctgcctctaacccatatattttatcttacacagcatccttaacaaaagctgttatgatataatttaccataaatataatctcattttgtctaagctagtatccaggatatttgggaggagactttggataccaggacaggaaaagactagcaaatgttgagcattctctgtaagtgatgaagataaataaaattttgggaacaggtgatgctgccaacttactggtgaaatgcatagactcatttctgaatatttgcagtgtaagcgacgtaaagatcaatctgttgagccccccctttatattatctctggagcagggaggctgtggctaacgataccactccttatcttatggtgctgctacttaataacgatgtctggtgtaagagtcgtgaggtggtggttctcagaaatctgattgagcaggcgtggggaaaagtattggatgaagataactccattacatatctggttgtgtatcctgaagtgctgacgttggtatttgatgcagctaacacatacaacgctgagcctggtgtactggaacagacggcccgggcttacattgaaatcacatggtgccattgaacgtcatcttgggtgtagtgacttttaacgtcaggtgatgcataagggtctttcgcggagaggccctgtttacacaattaaatagtcgagtcctccaagctgggctgtgtgcacgaaccccccgttcagcccgaccgctgcgccttatccggtaactatcgtcttgagtccaacccggtaagacacgacttagcgccactggcagcagccgttggtaacttggttagcagagagtgatgatattaagagttcttgaagtggtggcctaactgcggctacactagaaggacagtatttggtatctgtgctccaccaagccagttaccacagtcgattagaagaggtcgaagacttctaatcggacggaaaaagccgccgcaaggcggctttttccgtttacaagccgaagattacgcgcagcttaaaaggatctcaagaagatcattttaattttgctgatcgttgcgccctaccagtgaccatacggatagggcttttccttgataaaatcgcggataaatggatcgtaaccgttagccttgatgtaactgaaatcaatcttgttgggaacatttttgcatatcagcatatcatctcccgtcagggtgaactgtcgggcaggattctggagtacaacaggattacgattgtcttttaaccataccctgactttaccaccggggggcaggccaataatcattttgtttcggtaatatatttttcccggacgataagtatcaggataggcagtcagcatctgctgccacgtatcccggctgaaccagatctccgtctcatacgcctttttatcgataactgagtcccagcataccgtcatcctgacaggcagcgccttgccaatattaaaactggctaaaaaaccgcctacgtgctggctccattttcccacactgctctgactgggttcagtcggatccagtcgccggaaaaagctctcccggatatccccgtcctccagatacaccattgtcaccagtgccggcagatttttcgggtaaaaaaattgaattcccagtggtcgtaaggcaacttctgcccccattgctccacgccatcgcccagcagcgtcctcacaccagccctacggtcatggcagccgacagccagcattacgcccactatcacgcccaccatcagcggtaatcgtctcattcctgcctcctcagaacagtccatccagcgcgccttgcgacgcccccgcccggtccgccattgaggtgtagccgagcaccggcacaaaaaaggcgcgagcgcgccattgtgtcgtcactaaggagtgttcaggaggtcaagcccggcgcctgattttgcagacgcgaggaaaagagaccgcgaagcccggtgaacgacaaggggatgtaatgcgagccatcttccagattagcaacccggttcatatatcagtaaaatacggtcgcgctcccctccccctctttgcacaaaggtatgaaaatgtattcagatcaccaacgtagttatctggcccactggttgacgttaagcggcaaagccgaggactcgctgacgcaaactattgccagcgcacgggttgatatgaatcctcatcaggtagaggctgcgatgtttgcgctggcatctcccctgtcgaatggcgtgatcctggccgatgaagtgggactggggaaaactattgaggccagcctgattttggcgcaaaaatgggctgaacgccgccgaaaactgttgctgattgcacccgcaacgctacgcaagcagtggagccaggagctggaagagaaattttcgctgccttcacaaattattgaagcgaagatcttcaatcaaatggttaaagaggggagcgataatccctttgatattgaaaatgcaaccgggaaagcggcgatctgcatttgttcatacgaattcgctgcccgtaaagagcacgagctggcacgaatcccgtgggatctggtcgtcatggatgaggcgcataaactgcgtaatatctacaagaacgatggcgctaaaacagccaaaaaactcagtggcgcactgtccggcagaaaaaaaatactgctttccgccacgccgctacaaaacagtattcttgagctttacggcctgatttccgtgattgatcctcattttttcggcgaccttgcttcgttcaaggcccgttattcccgacagaatattgacgatgcagaactggcattattaagggttcgtctgaataaaatctgtaatcgaacgcttcgtcgacaggttcagcaggaaggcgggatcagttttacccgacgccattcaataaccgaagactttcgtccgacggaagacgaagaagtgctctataaacaggtttcctcttatttgcagcgggacgatctactggcgatcaaaagcggcgcgcgtcacctagtaacgttagtcattcgtaaaattctggcctcatcgtctacagcgatccagggaacgctggaaacgatgatccaccgtcttgaaagtaaaatgccggtgctggatgcgctgacggattatgaaaattacgacgattacagcgatgaagaaggcattgatgacgaagataccatcgatcctcaggcgctacaggccgaaattgaccagttaaaaaattataagactttagcggcatcgattaccaaaaacgccaaggccgaagcactgttacgcgttctcgatcgggcctttacctttacggctgaactgggcggattacgtaaggcggtcatttttaccgagtccgtacgcacccagacctggctggcgcaactgttgtcagaaagtggctacgagggagaagtggttctgctcaatggcagcaatagcgatgcggtgtcgaagaagatttacagcgactggctggagaaacatcagaactctggccgggtttccggttcgagtacggcggatatgaaggcagcgctggttgaaaaattcagggacgaaggcaccctgatgatttgtactgaagcgggcgcagaaggtatcaacctccagttttgttcgctgttaatcaattatgatttaccgtggaatccgcagcgcgtggagcaacgtatcgggcgtgttcaccgctatggacaaaaacacgatgtcgtggtggttaattttattaataaaggcaacccgtgccgatcagcgcgtgtttgaattattgagccagaagttccagctttttgaaggggtgtttggcgcatccgatgacattctggggtcgatcgaatcaggtgttgatattgaacgacgtattcatgagatataccagcactgccgctccgatgaacaaattgaacaggaatttaatcagctgcaggatgaactcaaagatcaactggaaaatcgggagaatgaaacccggcgttcattattcgagcattttgacgttgatgtggtccgcaatctgaaaacccgacgtacaaccaccctcgcgcagttaaacgattaccaggaaaatctgttgctgctggcggaaatgtttctgagcgacgagagcgattttcaacgttctgagacgggttttcgttccagaggaaagtattttgacgtcaactggcccattgcggatgaaaaagatgccgaattcttccggcccagccagggatatgggaagcaactgattgatgctgccctgcatgaaggggcaagcctttccacatccccagtttgccagaagctccatttcatctaccaacccagaagcggacaactggccgatgttaaactgttctgcgggaaatcgggacagctgttgctggcaaaagtcagcatcggaaatcaggagcaacagcgagagaaactattgaccgtcgctgttacagaaaatggcgaagtgctggcagaggaaaccgtatcccgtctgcttcgcctgccattatcagagataacatctgtcgaagaacagcctttgctgcctgcgttaacaacacaatgtgaggttttacggcattcttttatccaacaggtcgaacgcgataacgaactttattacaatgaagaagtagaaaaacttgaacgctggtcagaagatcgacgtatcgcgctggacttacgtatcaaacagttagatgcagaaattaaagaggcgcgtaaagccgcccgtcagcttccttctctaaaagagaaaatggaagccaagcgcgcattaaaggtgctggaacgcgagcgggatagcatcatgttgcagtatcatgatgaaaagaaaaaaatcgagcaggaagaggaccgtctgctggaagaggtcgagcaaaagctggcgacggaaataacgtcccgtcaattattcgcggtgagctggacgttgagttcaccttccgcatgaagtgctgtggtttcaggagtcaataatggctaacggtaagatattaaggcaactaataaaagcgggcgcaacgggtgataccgctactttccgtcgtgtttcggaagccattattgatgaggaacgtcagaaacagcaccaccttctggctaacgatctggagcatattctttacggcgatcgtcttgttcaggcttcgcgctcgcctgcgcttcctcaagcaccgatagataaagaaaggggcctgccgttgctggatctccggcagccacagcgcagccttgatgaaatgatcctcccggcgaccagcgctacagtgattgatgaactccttgaagagcaccggcgtagcgatgtattgcatagctacgggatgaaagcagccagtaagatcatgtttttcggaccgccgggctgcggtaaaacgctgacagcagaggttatcgcttttgaactggacatgccgctggcaattgtccgcctcgacgtactggtgtcttcgtttttgggagaaaccgccgccaatctgcgtaaaattttcgattttattgcagagcacccaatggtggtgttgttcgatgagtttgatgccataggaaaagagcgtggcgacagcggcgaacacggtgaattacgccgggtcgtcaatgccgttttacaaatgatggatgcttatcagggtaaaagcctgattctggcggccactaaccatgaacacattctggacagcgccatctggcgtcgatttgatgaagtgattgaatttccgttgccggatcaggcgcagttacgtgagctgttggcgttaaaattacgcggcacccgccgtcagtttgagctggacgatagcgagctattatccctgctgctcgggaaaagcggtgcagatattgagcgcattgtccgtcgggcaaccaagcatatgatcctgcgtcatcaggaattcctgacgctaaaagatttaaaaaacgcaactcagcgagaaaacgccagaacccaccgataagggactgccatgacggcgattatcagcatctaacgattaccaaagcaccacttcaaaacgaccgacggacccgcagagtcaatatgccccgtattcgcaggggcgatttacgccagcacgggcaaatgctgttgacgcaactccataccttgcgcccaacgctggcacaagtacccggcagcgccgatgacgggcgctatatcctcaagctgaactacagcggcacaatgaatttttcagcattgatacatcacggcgtggagttcatcagtcaggaaggtaaacaggtctgtatcgttttcactaatgagcagggtctgacaaccttcgaaacccatctggcgcaactggggcttccccgtacggacctaacctacaggaatattctcgaagcgcttgacggcattgacggctggtcggcggaagatcgtaaaagctgggcactccggcgctatggttttcctgtagcggaacgctttaatctggatgtggagctctggccagtcgatgtggcgcatcaccccagacgtatcgacctgtatacccgttttgaaaattggctcagagagcaggggattctctggcgggataaagtcaatctggacagcctgttgatgtaccggatagaggtttcgctcgcgcaagcagaatacctgttagcgcatcgggacgtcaggttggttgatttgccaccgtccagcggcattagctatcaacaaattaaccgggacatcaatacacttccagagcatctgatttcgcctgcggtaaatgcggccagagtctgtattctggatagcggcatcaacaccaatcaccctctgttaagtgccgccattgctgaaagcgccagctttattcccaatcaggatgcgtttgatcaagaggggcatggcaccgccgtagcgagtattgctctgtatggcgacgttgaagcctgtaaccagagcaatttctggcagccgcagctatggctgtataacgggaaagtactgaacgagcgggctgaattcaatgccgaaacgattgaaagcacactaacagccgccgtcgcgtattttaccgatctcggttgccgcattttcaatctgtcgctggggaatgctaatgcgccctatgacggcaaacatattcgcggtatggcgtatctgttagatacgctggcgcggcaatataatgtactgtttgtcgtctctgcggggaatttcgcaggcagcgacgatcctccggtgccgcaaaatagctggcgggatgaatatcctgactacctgttgcatgaggacagcgtaatcatcgatccggctccggcgctgaacgtactgacagtgggcagcgtcgccagacataacgcaacgttggatgcgcagcgtaggcctggcgatattcagcatctcagcccggcaacggaaaaccaaccgtcgccttttacccgacacggcccgtcggtaaaaggcgcgtttaaacctgacgttgtagcgcacggtggcaatgtcgcttccaacgttcggcaagggcaatggcaggcacatatgcgcggtctgggcgtattaagctgccatcaccagtttcagggtaatacgctgtttaaagaactcagcggcaccagctttgccgcgccgtatatcacacatctggcgggtcgactgctaaatgaatacccggaaatgtctgccaatatgctgcgggcaatgctggtcaatcatgcttctgtttctcaggagatgacgcaggcttttccgcaggccatgagagaaagctatagaaatgcgcctgcaacgagaaaccgggagattgagcgcgacgtgacaggctacggcatcattgatgaagatgcgttatatcgttcttctgaaaatgtggtggtcatgcgatgtgaagagcagatagaaaataacgcgcaccaattttttgaactgcccttcccggcttcttttttacgatcgcagcgtgcaacccgtgaagtccgcgttacgctggcatattcacccgccgtgcgtaccacccggctggattatactgccacacggatcggtttccggctggttaagggccgctcgctggatgaagtgcaggccagttttaatcaccagacgcagagtgagacggaaacccgctccgatgatgcccagactaaccgtgttgtatcagcccaacagcgggaacgcgggacggtacagtcgtcgatttggacttttcgccagcgtaacccggatgaaaaatggtttattgttgttacccgtcaggacagagactggggcgaagcattcagcagcgagcaggagccttacgcactggtcgtgaccgcgaccgatcgcgataatgaacaggcgcagctttatacacaaattcaggcgcagatccgtgaacaggaacgcgcacgagcacgtattggataaaaatagattatgtcaacgaagcaaaaattagaacttaactggattggtaagcataagcgtcctcgtctggagccgcgtattctgctcgaagataaggagttatcttatggtgatgcggatagtgagaatctgctgattcatggggataatctactggcgttgaaggcactggagcagaagtatgcggggaaggtgaagtgtatatttatcgaccctccttataatactggaagtgcttttacacattacgatgatggacttgaacactctctatggctttgcttgatcagagatcggttagaattattacgcactttattatctgaagatggctctatatggataacaattgatgaccacgaagttcattatttaaaatgtctttgtgatgaaatattcggaaggaataactttatttcaaatgttatttgggaaaaatccgatagcccaagaatggatgctgcatttttctcttctcgccatgatcacatattagtgtacgcgaaagatcagtcaaaattcaaagtaaaaagacaaccactgtccctcaatgatctacctagccattacgataaagtagatccaagcggcaatccttactacctaaaaccgctaagggcaatgggacaagcagataaaagagaagatcgcccaacaatgtatttccctcttgttgcccccgatggcacagaaatttttccaaagcgccaagatggaactgatggacgttggcgttggggcgtacaaaaatagatcaggagaaatggagaattgattggtcgaaaggacgaaatggttggactccatattttcgtgtatatgctgatagttcgtcaggtagaccgccagaaacgatatggtttcattctgaagttggaagtaacagaacatcaaaagccgaaattaagaaggtgattcctactataagtgcatttgatacacctaagccggaagctcttataaaaaaaatactggagattgcaactgacaatggtgatcttgttctagactcctttgctggttcaggcacaacaggggccgtagcacaaaagatggggcgtcagtggattatggttgaattaggcgaccactgtcggactcatattgttccgcgtatgaaaaaagtgattgatgggaaagatttaggcggtattacaaaatctgtaagctggcaaggtggtggaggttttcgttatttgagtctagcaccttcattgcttaaaaaagatacttggggtaattgggtaataaataaatattacaatcctgaaatgcttgctgaagccatgtgcaaacatatgaacttcacctatgcaccaagccagactcaatactggaatcacggttacagcaccgaaactgaccacatctacgtcactaccggttctttggcttatgaacaactgaaagttctgagtgaagaggtaggaactgaacgtacattactgatttgctgcaaagcctttatgactgaaggcgcggacttccctaacctgacgctggtaaaaattccgcgtgccattttgagcaaatgcgaatgggatcaggacgactatagctttacgctaaacgttctctctgattcagaacagcctgacgatattgactacgacgaagacaccgaagacgaagaataattatgagccagaataacgccgttaaaattgtcaatcgagttagcgcacgactgtctctgcgcgatccgcaggatgaatcattgtgcatcttatgtgacgtgctggaacaactcgatctcagtaaagatcccgatcttaatcgctggctggcggtgctgcatcagcaatacccaacggtaaaaggatttgaacgcgcctttccttcactctgctttgcactggcgaccggcgtgggcaaaacgcgcttaatgggggcgatgattgcctggttatacctaaccgggcgcagtcgtcattttttcgtgctggctcctaacctgaccatctatgaaaaactcaagatggattttttacccggttcgccaaaatacgtttttcagggtatccctgaactggcgcaaacgccgccagtattaatcactggcgatgactatcaggaagggcgaggtgtccgtctggactatgcgattgccgaaagcaaaacgggcgatctgtttggtggcgaaaccgcgccacatattaacatcttcaatatttctaaaatcaacgcgctggataatgccaaaggggccgctaaatccaaagtcgctaaaatccggcggattcaggaatacgtgggagagtcttatttcagctatctggcaaacttgccggatttagtcgttttaatggatgaagcccaccgttactacgccagcgcgggcgcgcaggcgcttaacgatctgaatccagtattgggtattgaattaaccgccacgccgaaaacggtgggcgcaaatccccgtgatttcagaaacataatttatcactatcctctttcgcgagcgctgaaagatggatatgtcaaaattcctgccgttgccacgcgcaaagacttccgggctgcaaattattccgaagaacaactggaaaaaattaagctggaagacggtattcaccatcatgaatacgtaaaaacggaactgaccagcttcgccaataataccggcaacaaactggttaaaccgtttatgttggtcgtagcgcaggataccgatcatgcggacaggctgaaagcccgtattgagcatgacgaattttttaacggcgcgtacagaggcaaggtgatcaccgtccactctaacctgacgggcgaagaatcagaagaaaccatgcagcgactgttgactgtcgagcatgacaaagacactgaaatcgtcattcacgtcaacaagttgaaagagggctgggacgttaccaatctctacacaatagttccgttacgtgcatcagcctccgaaattctgactgaacagaccataggccggggacttcgcctgccctacggaaaaagaactggcgtcgaggccgttgatcgcctgaccatcattgctcatgaccgttttcaggagattatcgatcgcgccaataatgatgactcgataatcaaaaagttctctatatcgggctggatgatgatgagaatggtattccagaagtaaaacctcagcaaattatcgttccctcaatggctgaatatctgctgggtaatcaaattatcgataatagtgggttgcagctttgtgaagataaagcgatataccgaacaaactcaacaccaaaaccgatactcggtacagaaacggaacgtaaagtcgccgagctcacgtttaaagtcgtctccgaagaagcaaaacggttaaccagcagccagcaactcagtatgccagaagtcaaagcgaacgtaacacggcgggtgcaacaagccttgcgcgaatgggaagtgactcaacaccaaacctctccctcttctacacaaatcgatctggctgaaatgattgaagagcaacctgaacaaccgagtttcccctcaatggaagacgcagaggttcagcaactggtcggaacgatcaccgaaaaactgatggaatatactattgatattcctcgaatcgtggttttgccagaacgtgaagtcaattacgggtttaatgatttcaacctctccggactggatcgcattgcgctcaaaccaggcagtaaagagcttcttctgacgcatctggagaataacgaacagcggacaatcagttggcaggaaggcggtgaaacggaagaacggttagaaaactatctcattcgttatctgctcgaccatgatgaaattgactacgatgaacatgccgatatgctttataaacttgccggacaaatggtgagccatttgtgcagttatcagccgcaggaagatgcagaatccgttctgaaaaatgcaggccgtcaactggcagaatttatgtgggcacaaatcaaacaaaatatgtggacaacgccaacgggttataccggacgcataactcagggattcgatgttatacatccagccacattcaattttgccggaaatgaaaaaccgagagattttcgtgtcgccattcccggtggtgaaaaaaataaagttcgccagatgattttcactggtttcaataaatgctgctacccttatcagaaatttgactccgtcgatggggaacttcgtctggcgcaaatactggagaacgatgcttcagtggtgcgctggatgaagcctcgccctggacaattccgtattgaatatactaatggtagaaactatgagccggattttgtggttgaaatgaacaatgggtactgtcttattgaaccgaaaaaagccaatgaaatcgatactcctgaagttcaggccaaaacacgggcagccctgcgctggtgtgaatttgccaatcagaatgcagcaaagaatggcggaaaagtatggagatatgcgcttatcccacataatgaaattgaattaagtcgcacagtttcagggttaatggctgattttatgatgacaaatagtttatcagcatagtagcagcccaccggagttgtaattaaaaaccattccgagacattgcgttgctgtttcgggatggtttagcataaacaatgagtaaaaaatgaatacagaaagaccgctccctcaaaagcagaatctttataagaccatgtggtatttaatattcagcgcagagagatttgtaactatcgctgccgaaaattcaatggccttcgaacttgaacatgaagagtataaacgaaaacttgccgagaggaattatagtattgatcccaaagttcatgtccactctcatccacaaaggctgaaagacctgcgaactttattactcaagacaacgggttgtattttgagtgtaataatcttaatagtaggtattggcttttatacttgaagtggcacactgaatttggccacctgaacagaggtgatatgctcacctcagaacaacacaggtgctccaatgaaaaaaagaaattttagcgcagagtttaaacgcgaatccgctcaactggttgttgaccagaaatacacggtggcagatgccgccaaagctatggatgttggcctttccacaatgacaagatgggtcaaacaactgcgtgatgagcgtcagggcaaaacaccaaaagcctctccgataacaccagaacaaatcgaaatacgtaagctgaggaaaaagctacaacgcattgaaatggagaatgaaatattaaaaaaggctactgtagattcaatctgtcaatgcaacacccctttcaattatctctttcggtgttttgaacttcagtgtctttctcggtctgttgtttagctgagcagcaaccagatctagttcatattgagtatattgggcaagacatgtcttttaggaaagtactgccgaattagcccatttgtgttctcatttgttccccgctgccaaggactctgaggatcgcagaagtaaactttaacgccggtgctgacagtaaattctagatgtctggccagttccattcctctgtcccatgtcagtgattttctgagttctgacggtaaactcaggaatttgtcggtaagagcctgatttactgagacagaatctttgsccctgagtctaaggatgatcgtataacgtgattttcggtctacaagtgtggctatatgagagttttttgtacctgagactaaatcgccctcccaatgccccagagagcgtctgttatcgatatttcgggaacgttcgtgaattggtgttccgttcactatgttaatcgtacctctttcgcctttgcgggtatgacgcctgccatggcgaaggctatgcgaccgtcgcagatgctgtatattcaggtggtgtagcgcttcacggctacgaaagtacagcgttttataaattgtctcaggtgatattcgcagcgttttttgacgtggttttgttcgccttaaccatcctgatatttgctctggagaccatttcatctccagcttttccagaacaagctttcgcaatggcaaattttgatccagtaagcacggttttggccttttcgccattctgttggctcggttattagcatcaacagctttgtaatagcgtctgccccgattacgctgaacttcacgtgagatcgtcgaaggactgcgattcagcgcagtagctatcgcacgaatgctcattttggctgacaaaccagctcgtatctcctcgcgctcagacagtgtcaggtgagctacagcccgcttacgctcatggggttttatgccgccagtatcccttaacatagtgaagatcgttccgggttttgaacccaggatattcgctatttcactgaagcctgttccgttcttccatagttcaaaaacagaggctttttcctctgctgtaaatgttcgtctcattcaaaaaacctccgcaaccccatgttttcacataactgttgcgttgaccaattgaatctacaaccgcgctcttgatgtcagactccctgaacagttctcgataatcgggaaactcagagcgcattatcctgtggtcacactctgccatgtgttcggggttcatcgcagcagctacagatactggaaaaaccgtcctgaaaaaccagactgcagacgggctgtattacgcagtcaggtacttgagctacatggcatcagccacggttcggccggagcaagaagcatcgccacaatggcaacccggagaggctaccagatgggacgctggcttgctggcaggctcatgaaagagctggggctggtcagctgtcagcagccgactcaccggtataaacgtagtggtcatgaacatgttgctatccctaacyaccttgamagrcagtttcaaaannnatcatcgggacgcaatttctcttgccvgttactgcgggbctggtgaacttacccctgtctggatccctgacctgactcatgaagctatgcgggatctaatcagagcccgtgcagcagctaaacgagacagcagagttgcccgacagcgaattctgagcatgctattgcgaacagacaaacattatgcaggaaagcactggacaggaaaacatcgaacctggttagctaatcaatcatttagtcagccatctcaacagattgcttttcaacactattgtcagagtctggagcagattgaagatcgcatacttcaactcgaccaggaaatatctcgcctgttacctgagtggtctctgtgcaatctggtctgccagttgcaggctcttaaaggtgttggtcagctaattgcaataactctggttgctgaactgggtgatttttcgcgattttccaatcccaaacagctcatggcttttctgggactggtgccaggtgaatattccagtggaaacagtattcgtcccagaggaataacaaaagttggaaacagcgaactgagacgtctgctttacgaagccgcctggtcttatcgtacacctgcaaaagttggggcatggcttatatattaccgaccggactctgtaacacaatattccaaagatattgcatggaaagctcaacaacgattgtgttctcgttaccgaagtctgacagcaaaagggaaaaaatcacaagtagccattacggcggtggctcgtgagttgactggatttatgtgggatattgcacttgctgcccaatcatcattcagtcagcagaagcaaaattaaaccctgaagcagtcagacacggaatgagtgatcctcgtaaaagaattcagggaagccagaatgcgctaatacctgcacgtagaaagaggccagctcactgcgtaaatcgtcatggggctaaaatccccgaataagagtttgtaaaatccaagatacagtctgactgtttcaggttctttaatccgcgatataacgaagctcccggagctgcgtaaggtctttttgggcttaatatttgacaaaggtcataagaatttttctttccgagacagactgcacgaagcgctctttccgctgtgttattgtccgcctccgccagaccgtcatcacagaagttgcacaacgcaacccagtgcttcctgatataccggaacgcatctctcagacggcattttttcgataacgtgtgttctttctcctgcatcagcttatacagggaagtcagtagcggtttactctgcatttgcctgaccgccaggcgttcagacaccggcaacccgcgtatttcgtgctcaatggcgtacagttcgccgattagtttcagtgcttcttccgccgtcgcgcttttggtactgatatatacatcgtggattttgcgccgcgcatgagcccagcatcctgcttccgtcaacgcgccgccttcacgttcggcactgaacagccgatcgtaacctgcgaacgcatctgcctgcaggataccccggaagggacgaaggtgttgctccggatgtttaccctgatggtccggtgagtaggcgaaccagaccgccggaggttctggcgaaccggcatttcggtcatcccggacatacgtccagatatatcctgttttcgccttcttcctgcccggtgccagtacttttactggtgtgtcatcagtgtgaaccttgcgggtgttcatcacataactgtacagggcatcattcagcggcgtcattaactggcagcacgcatcaacccagttggagagtaaggcacggctcagttcgacaccctggcgggcaaagatttcactctgacgatacagtggcaggtgttcgcagtattttcccgttaacacgcgggcaagtaaccccgggcccgcgataccacgctctatcggacgggatggtgccggtgcttcaacgatgcagtcacattttgtacaggctttttttacccgttctgtgcggatcactttcagggcgctgctcaccagttccagttgttctgcgctgacttcccccagataatccagctcaccgccacactccgggcaacagctttcttcaggctccaggcggtatatttcacgggggagatgtgccggtaacggacgacgatggcgcgactgtcgcaactggcggggaaccagcgggtcatcctcacgcccactgtaacgatcgctttcctgctcgcgttgtttcagcagggcttcagcctgttcaacctcacgacgcagtttttcagaacgggttccgaacagcatccggcgcagtttttctatctgagcccgcagatgctctatttcccgttcatcttcttcgatcttttcttcggcacgtgccagtgcagagcgcaggaaggcctccgtctcttcaaccagactcagttgctggtctttctgacggagggcttcagcctgctcagagagcagcctttccagctcagcgatgcgaatgaggtatttctgactcatggccgtttttataatgcggtcaggagttttttacaacattgtcagtgcgttaaggcgggatgtttttggctgacgccagtccagcttatcgaggagcattgccagttgcgagcgggtaatggatatcttaccgtcacgcaccgcaggccagataaactgaccttcctcaaggcgtttggtgaacaggcacagaccatcagcatcagcccacaggattttaatcgtgtctccccgtcggccacggaagataaacaggtgaccggagaaggggttatcatccagcacatgctgtatctgctcccccagaccgttgaaggatttacgcatatcagtaacgccggcaacgagccagatacgggtacctgatgggagtgaaatcatcgtcccctcccggtcagctcacggatcaacaccgtgagcagctctggtgaaggattttccagcatcattttaccgtaatggaattccacatggcaggaagctgcacaagcaactgataatgcctccggagcaggagcatctgtagcacagcgcggggtgtcgataagttccactggaaccagagtcggagaggccggaaaagattgtgatactgtagggcctacaatagttggaggcattctacgagaaatacgtccttctctttgccagaggcgtagccatttaaaaatcaggttgttatcaacgccatgttcccgggccagttgtgcaacattggcatttggtttcgaagccagttcaaccatatgaagtttaaattcattagaaaatatccggcgggttccggagcgccagtctgtaggtttatccatcaatagaactccgtctaatttagaaggagctctaatttagtctgcaaggagcaggtgttacagacggcattggctttacgcttacccatagaggcggatataaggggaatgccggcagagcagcggcttgctgaacgtcagcgaaaaacgaaaccgctgttgaaatccctggaaagctggttgcgtgaaaagatgaagaccctgtcgcgacactcagagttggcgaaggcgttcgcgtacgcacttaaccagtggccggcactgacgtactatgcgaacgatggctgggtggaaatcgacaacgacatcgctgaaaatgccctgcgggcggtcagtctgggtcgtaaaaacttcctgttcttcggctctgaccatggtggtgagcggggagcgctactgtacagcctgatcgggacgtgcaaactgaatgacgtggatccagaaagctaccttcgccatgtgcttggcgtcatagcagactggccggtcaaccgggtcagcgaactgcttccgtggcgcatagcactgccagctgaataacacatccccgtcaatacggccctcgctgtacgcttaccgcttatccaacggacatccgcaaagtgatctatacgacgaatgccatcgagtcgctaaacagcgtgatccgccatgcgatcaaaaagcgtaaagtgttcccgacagacgactcggtgaaaaaagtggtgtggctggcaatccagtctgcgtcccagaaatggacgatgccgttgaaggactggcgaatggcaatgagccgctttattatcgagttcggtgaccgcctggacggtcacttctgagaaaggcatttacacagaatcttaaacaggctcgcgccagtcggcaaaactagttgacgtctaatacactcccccttaccgaagaccttcagttttatattttaagagtctctgagaaaggctgccttccggcagccctttacccccacatcagaacatataccggaaattcgcgtttaccgcattatccacgttatatttaccaaaggctgacttctcaaactccagaccaaagcgcatattgtcctttatctgcgcattcataccaacattaaacagcatccggctgtccttctctccttttatccgtttctccccggacgcatcacgcagtacggtctctccattattcagcaggtcaaactgccagctggttccggcacgggccgtcacactccagtccttaccactgaaggtcttgcccagttcaacccctgttcttccaaccagcggactgaagtccctgttcttcatgctcaggtccatatcaccgtctttccagcggaatgttttcccggacacggcgccgtaaaccagttcagcctgcggctcaatgaacgtgtcctctgtcaggtgatagcggtaacccgtttcagcaccggcataccaggaatgggtgttgtagtgtttcgttcccaggctagcaaagttacctgtgtaatcattgtcatggtgaatatatttaccaatcaaatcgatataggcaccggactcaaacaatgctgaagcatacagaccgccccccaccgatttcgtctttccgctgaatgcatggctgtctgcactgctgtcggtataggtcatcgtgacaccggtaaacaggtccacaccgtccagttcatgttttttgtcaaagccgacctgaacatgggtgtaattatcactgtaaccaccgtctgcagaaccggcaccactcatgatgcgcgcccaggcaccggcatcaccgtttgtgtcacgcaggtcacccatacgtttgttcagattgttaacttccgtcatgaagtttttatacccggcattcatgaaactgtcagccttcgcggcagcggctttatcagcctccgctttaaaaccatccagtatccacttcgtattgccaccactggtatcaacatgcagggttggggtcacccgactgaaacctgtcacccgggtgccggccttaaacatctctgctgaagttcccgccggtgccgtgaccagaggaatattcagggcctgtccctgagcaggattattcataaagctgacgttcaggctgttatctgaaccagtggctttttcagtcacattaattttatcggcatttttcaggtccgtacgcaaaacaaaatcactgcctgttgcatccagtttattcaccgtcagggtacggaatgtacggtctccttcagaactaatacggctgtttctgacggtaagactgtggatggcagagtccccacccagagtccacagtgcattatgcatactgacatcagccctgccaccggttatggcaccattgaatgctgcgttatagccctcaagaagactgccggcaaacgccgatgcagccgtttccgcagaagccagttctgccggcgtgtcagacccgatggtaactgttgatgccgcagaggcatgaatatcaccggaagcatgtgctccacgggtaatttccagtgctgcgttatcgccggtcaggtcatatccgtccgtcagatatacagcaggggcatactgattagccgtatctttaaccggtgtaccgctcagggtgattttgccgttcttaccggcctgaatatgcccgtcgctgaaaagaccgttcagtgctgtaagatgaccgccatcatgcactgtcagtgaactgccggcaaaagcacccggggctgtcaacaggacgtccggagaggtgatgctgacggcactgtcataagcgtcaatccccccggtgaacctgctgccgatatccagggctgagttatggttcagcgtaatattcccttcatactggctcctgtcattcacggtgtccgggacagaggtaccttcctccggaatgacataatttcctgttccgtcatttttatccacaaatgccctgtcacttcccagtgtgatatggctgttatccgacttaatgtcactgttcagcgaggcgttacgtgaaagatggaagtcagcgtctttcagcgacagtgttttcattgtaaactgacggttttcccagtctttctggttcaggctgaccggtgcactgccactgatggaggcatggataaccggatgtccctggaatatcagggtgccactgtcctgactcagggtaccttccggcaggttcacgctaccatcaaagattacctttcttccccccggcacctgtggaatggcgacatccatattcccggtcagctgaccatgaaagataacgggttgttttgcccgcccggccaggatcctatcttttactgtctgaactgctttgtttttgtccatgccaacaaactcccactgagccggatcattcaggctgttcccccacagagtgttaccatagctggcagatttcagaatatagaagcgggtctggctgttgagtatcatgctgtacaggtttcctggagtgccggtaccaccaaagggggatatatttccaatcgtcggttcactgacatttgtatcctgagccttaagatccagtaaaagctgggatttttgctgtgcattatttgtaatcaccgccccgtaatcagcagcctgcagtcgggtgaaggtaacggcattaccattaaggtcaagcttacctccccggtatccccatgaaatgttatccggattgacctgacgggcatccccgagcaccacggtcggacgtccgctggcgaggttcactgaactgaaggcctggatattacctgcagtgtctgcctgctggttaagtacaacgataccgtctcccgttttcagtcctcccgggtttacacctgttccgtttatggtcagggttccttcccccagcttatgcaagttgtcaccggcaacgccgttgaccttccaggttacattcgtccccttgtcagtaataatgccggcacccgtccatgtttttccggattcagcagatacggtgtaactgtctttaaattcgagataaccggcaccctgagtcacactgtctttcaggataattgcaccattctgcccgctgaataccagatttttaccggcattgaggtcattgtctttctgcccgtgcatggtccagtttttactgccctggctcagggtacctgtgcctgatgttttgtcgtatgtccagttcagggggcccagtccggaaacaaagtctacgggggcatcgaaatcgtcctgcataacctggttcagataatctgttggtatgacattccaccagttcgtagcaccattaatacctgcatatgctcttaatacagcaacaataacccattttttttgttgtttatcataagcaaacaaaggagaaccactatccccaggggctccatagtcaggtaaagggccgtttacaggattataagtttgcccgggattagagactattgttgcatcagatatcagaggaactcctgtggttcctcctgttttaaaagcatatccaccggcaaccttaactaaatttccgtccttgtccttagtgtactgcgtaccactacccacccgataaaaagcggtgtaacgttcagtgtatttataagcattggctttggttccttctgatgttaccgctgagggaataacttctgtaaccagtttattcagacgtggagcatggaagtcaatagaagggtggttattacggtcaacaagggaatatgtatttttcccattaccaaagctcacactccgatatcctccgttatgctttacgctgacgatatactgaggcgatacaagcgtagcaacgccatttgagctcacactgctgaaatcggccattggggctttacccagtcttcccacaagttttccgtccttatcatataccggaatatcattggcaccaggtacaaaaagccctttgttttcggcgaaatcacgataaatctgataggcaatatcggaacggacaatacccgcctgggatatctgagagtaacacagacagattgctggaatgccagccagaagaatatgcgttaatcttcggcatgtcttttttattaccctgcgggcaagttcagagacagcaataagccccccggtgacggggcaatatttaagagaataaactttattcactatggattctccatgatgtttacaagggatataaaagtaaaatagctgaagaagctaatgataacccgacgttatcaccagaaaggaaaatatagttactgcattaatgtgtttttgtgaactgaaccgccccgggtttcctggagattgttttatctgtgaactcaggctgccagatcgtaagcgtaaactgaccgccgtatgtagccatgatgccagtattggtaacgtaggtgcacccctatctatttttgtagaaccggaggaaacagaccagatagtttaaatgagctggttatgcgtaacataatttatctattttggctcttacaaaatagataaagaaggagtatctgatgagatactccattatgacagactcaactcatgtgatttttcttaaagttctctgcttgcgcctgtccccccatataaacatcatcattcgctacttgaagtggtcaacaaaaactggccaccgagttagagtttttccagtatcgattttccgattcgtttgggggtaacccaccgttatattcgtgcggtcttagtgcgttgtaatatccaacgatatagtccgttatggcgtgagctgcctcgctgaagcttacgtaacccaccaccggcatccattcgttcttcagactcctgaagaagcgttccattgggctgttatcccagcagtttccgcgccggctcatactctgtctgatctggtatcgccacaataactgccggaactgcctgctcgtataatgactgccctatcgctgtggaacatcaccccgccgggcttaccacgggtttcccatgccatttccagcgctttcatggtgagcctgctgtccggcgagaacgacatggcccagcccactggttttcttgcgaacaggtcgagaacaacggcgaggtacgcccagcgcttacccgtccagagtagagtaagaggcagggcgtagtcggactatttccctgcctctcctccccgaaccggacgtgcacctttcagcgcatccggctctccatttaaatgctggcgaacgccattgccacttctgtaaagcgcgatgtatacgtgtttctggtctccgtcctcagatagggattaccttcgggtagccgccagcggaacagcttcttgccttgccccaccaaccggtacagtatttcgccgctgagcttgccgtgattggttttaccaaataaaacccacgttttgctctgacccggtttcggtgatttacaccaccacctcatcagggaagcgatgcctgtacggtatttgcgggccagccagtgagccagcttccagaacacgacacggtcgatataactgaagactttggccttaaaatcaacgaactgatagaacatggcccagcctttcagttttcggttgagttgttcagccatatcgactttgctttcactgtagttgcctgataacagtgctgtcagcgatgcggcgaagtttctggctttctcctgcgggatcgttgagaccactcgcatctcgccataacgactgcgtttgcgaatgatcctgtgccccagaaagataaagccgtcattaacatgggtgattttagtcttatccatgttcagcctgagtttcagactgccttcgagcacaccccgacactcctccctgatggcttccgcctgtgctttggtgcctttgacgatgaggacaaaatcatcggcatagcggcagtacgccaccgcgggtttccactgccagttttctctgaccgccgtacttcggccccgttggatactgttattccagtaccaccgatcttttctggctttcccgctcaggtagcgctcatgcaggtattgatcgaactcattcagcatgatgttcgataatagcggcgatataacaccgccctgtggcacaccttcactggccgcccgaaagagaccgacatcgatatgtcccgccttgatggttttccacagcagagtcatgaaacgtgcgtcactgatcctgcggcgtacaaccttcatcagcagtcgatgatgtacggtgtcgaagtaactggacaggtcgccttcaatcacccagcgtccccgggtttcaccacagtctgtgagctgtaatttcaccgtgcggatcgcgtggtggacactgcgctcaggccggaagccatatgagagcgtatgaaaatcactctcccatatcggctccatcgccatcagcatggcccgctgaacaatacgatcccgcaacgcggggatacccagtggtcgcagtttgccgttgcttttagggatgtaaacccgtctggcgggcaagggctggtagtggcctgagagtaattcatccctgaggatttgcagctcaacagctagtctggcctgtagcattgttttgttcacgccatcaacgccgggggtataggccccctttgatgaaagcgtgatccgcgccgcttcagccagccattctggttgtgttatcagacgcagcagccgttgaatccgtagggacggatcggtggctgccatgtggcaagcttgcgttgcatttcgctgattatcaaaggtcttcacctcgttaggtcagttaattcacgtcgcaaacacattcaaactgcttcccttcgccatgtaatgggctttccccatcgcggactactacggaagctccgccagccagcgcgtcatcggagccatgcccccttaacatccgtcgctgaccttccccggtttacctgcctggactcaggcatactgaggaggctgcccgtcgcactctttatccttgcttgccgcaagttggcagaagtcagcaacgcaagtgtgatagacgctgctgccccggtgtttcgcatacatgtcaaaacaccttcgaccggcagtgcttacgtatcactgccagttcctcctgcacggcctgtcagatcacgtaggccgtggtgacgttttcaacccacagaggcggattaacgggttcatgttcttcagcctttcagtacttaaccttgaggatcatctcggcttagtgatctcgcctcaatccccgttgtcagcgggttacatcaccctgcgggcatgccgcaggtcactgccgctcaggttctccaccgtcacacccggtgggattgttgggtttctcatcgtgagttaccggttcaatattccagacagactcgcggttcatttaagcatccatgcccgccctgaactccgggcacaccgtaagtaaaatcagccacccacagctggtcaggtcgttctgccacgaactgacggtttacgcggtcgcctgcggcaaaggctttccggctgatggtcgtacggacctttttaccccggagaacaccggcaagtcccataaccgccatgaggcgcgccactgtacatctggccaccctgattccttcccgtaacaactggcgccagactttacgcacaccgtacacctgatgattttcatcgtatacgcgctgtatctctctcttcagccagtcatcgtgctgcgcacgggaactgcgtttatcaggatgatgtcgctgttgctgacagtggtaattcgttgacggggcgatatgcagttcactgcataccggtccgaccccgtactgctcacgcagcttatccagcagggcattattttttccagaggcggtcgaactccgccttcgcaaaataagcggaagcctggcgaaggatatcgctactgcggcgcagttcacgattttcacgctccagctctttcagacgctgacgttcagcggtggtgagccctccatcaccgcccctggtatcccgctcatgctggcgaaccctgacacgcagagtctccggcgtacagccaatctttggggcaatggaacaaactaccgcccattgtgagtcatattcgcctgactttccagaactatacgtatcaccctatgacgaacttcgggggaaaaacgagtatttttagtcatcctgtttacctctttctcagggagtttagtctccaggattcccggggcagttcaaaaaactttcatatccagaccattctccagagcccaattgttgaataactgtgccaaccacgatacaacgcgtcatacctagcacatgagaaccagatattctgcctcactttggtctaggtacaggacaaatcaaagatagtcaattacgagttgcaaattgcgaactacgtaatgtaatgttatttttccttactgatattcttattttcttgggggttctattatcttcagagtcagtcaaatatctggccaagacaggaagaaccgtgctgttaagtactgagtctatatccctagctccagacttatcacattgacaatgatgtgtaatccagtcaataagagaatcattgtattctatcttatacatctgacctgatgcctgttcaaaacgttggcagatcttatcaattttaatgagtacgatatctctcagtgttttggaatgcaacggtgtgaacggaattaagttagttctccccataaatgccgccccaaaatgctcattaaacaaaggaagaagcatttcttttattctgtctctatttgtctcaccatcattccatatgtttgtgatattttcactggcaaagtttgatgtcattattatgagacaatctctgaaagacaccatcttaccttcagcatcctcgataatacctgagtcaaatatctggaagaagaactccaggacatccggatgtgctttttcaatttcatcaagcagaataacactgtatggattatgactcaccctttcagtaagagtccctccctgaccaaaaccaacatatccaggaggtgcccccttcagagtggaaacagtgtgagcttcctgaaattcagtcatattaatcgtgatgagtttattctcatccccataaacaaactcggccagcgccctggctgtctccgttttgcctgtgccagaagggcccgcaagtaaaaataccccatcaggttttacaggatctttaagatctgcccgacaaataagaacttgtgatgcaatagcggacatagcatatcgctgccccaaaactcgctgctccaagcatcttaacagaccggatgctttttgttgttcaccatcaaggcatacacccagtggaacacctgtccacccagaaacaacatcagcaacacaatttttatccacacactcaaaaaccataggactgtctttcttatatgcactttccagttcttttctgtacatattctttgatgaaatatcatctgaactttgtattcttgcaaccagttcactttgatgacgccacgctgatttgagttgctcaagctcctcctcaagttgagcaattttatttgcaagcatttcctgacgcaaaacatctgacctttcctgtgtcagcagcgcaagttccccttggtatcttaccaatgaagcttcgacatcctgaatggcatctggtgatgtagactgagatacagcaacccgagaacaagctgtatctaacagacttacagatttatctggttgacggcgcccatgcagataacggtctgatagatgtaccgttgcagttattgcttcttccctgatagaaacattatggtgtttttccatcatgggcaaaagagaacgtagcatttccgctgtgacatcctgatttggctctgctacttttactatctgaaaacgccgggctaacgccccatccttttcaaaatactttttatattctccccatgtcgttgcggctataatgcgcaattctccacgggcaagagcaggcttaagcaaattagctgcatcagtctgtcccggaagtcctcctgcaccgataagggaatgagcctcatcaataaacaaaatagctgtgccatccaaagaattaagttcggtcaacagtgattttaggcgattttcgaattcccctctgacactggctcccgcaagcagagcccccatatcaagggcatggatccggacattcttcagtacatcaggcacacggccagacgcaatttgcagtgctaaaccttctactatactacttttccctactcccggttcaccggtcagtattggattattctgtctgcgacgaagcaaaatatcgataagttgtctgacttccttctctctgccagtaaccggatctaatttacctgtttctgcccgcagagagagattctcagtatatttactgagatattcatgtgaagacctatcggtgggacgatgagaagcagaatgctctgcttcgtctgaaaaagagataagtaactcctcagctacatccatatcacaacataacgcatcagaaacattgagaggaaatattgaatctcttaaattaatcatagtactcaaaaagacagggatatctatatgatcgatttgccatttagtactggcatgtatccatgttttctccagtagagtctgcatcgactcagaaaatacaggtgaggattgtggtactgtattgatacggataagttcactttcaatagcattaagaaccctctcaggattaaataaggactgctcataaagcacttcggctatatatttatgttcctgcaataacttccatagaagatgtagacagtctacttcatgatgtgaccttgatattgcgtaattaattgcagaatccagagtatttcgactttctggagctaatttattaataattggtttcagatagatactcacttatcactcctgtactactggacatattgttatattgccgggcagtctggaaatccaggcacttttctcccagctatgtgtggtaagcagcttattactcagattcacctgtaaatctttaagtttatccttttcctgttttagttgttcccattcgatatatgcctgacttagattgcctgtatcactcagtttgtaacggacaagaatgcctttaatccccattgattcgagaaaatttcttgattctggagaaaaatcctttgtcattaactcactctctccatccgaaaacttgttgataaaatcaatccaggctgtttctcctgtaaacttataggtggcagaaaaattagggaacaaaatgtcaattcttacagagtgacagcttcccggataccaggtaaaaatacctgaatcagcaaaattcatacttcgtatactgctgttacctgttttacactcaagagtcagagttgtacctgttggtttgactcggggattatccggaattgtcgcaggtgcactatctatcgtaactctgtaaggctgtgactcagcattttgtagggtctgattcagtaagtctagttgcccctgtacatttattaattcatccttgttttgcgttcgctctctgagccaaacatcaagcagatcatccggggaaacaatgtcattaatgaaagtaatgaatgaaggggaaaaaggtatacttctttccctgaaggacaacagtctgacaccgtctggatcaagcgctaaaactccgttagacggacctttcaaaaagccaataatgtccttatatacttttccctgcatctcagaataactgagattatgttttcctgagttaaaccggcctaaaacagatttcctccattgttcaccaacccaacaccctgtataagtgacagcatggtcgagaagttgataaatctgccgctcataaatatcccatacagaatcaatcaccggctctctattattgctgttaatgactgagcgaaccttttcaaactcatcaaataatattaccagcttgttttctggatctgaacgcatggcattacgaataagttcaactgatgatgctgtatgtaacactgaattcacggcattacgtagagcattctgccagcttctccatgtggtaacatgagtcagtgtcctgttcatttgactgttattaagaacagaaatcaggtatatacgtaacatgagatcaaattgttctatttgacgtttcattccgttatccactttaagtgaaaacagatggttaagcagtctgaattcagaaagccagtcctgcgccgaactcgttggtatattgtgtaattcatcatctacaaactgaaagaatctatgctcagatgagcgattgtgtataatattggtcagttgcagcggattcattaaacctgaatgtgagtctttacgtgcccttgcaacagacataataaactgtctgaaatgctcctgacgactttcatccaggtatagcacaaaggatgagaacgcctccggaaccgtatcacgtccatatgcctctttgatagtctcataccactgatgaagtttattctgtcccggttgtgtccatattccggaaagatagacagaagagttttcatcttcccaaaagtccgtaattcttacagcaggaatattaacatcttcagaaacaaaccatgaataagacgggtcactctgaaccaactcagtcaggaggtttctgaacacataaatattctcaattccattatttttctgtatctcatctctttctacagcaagtgaagctattgatgatattttatcatgaggtctggttatcttcagtaactcatgaataccaggagattttgctaagtcactcagggattcatctttcatcatcttatcccaactgataagtgatgatgagagcgacagaattagttctcgctttcctgatggtgaagcttgcatgaaattcttcttatattcagtaacgcgccatgagacaggactgatatcgaatcttgttgttttatgaagagattctctgaaaaatagatatttatcatctagtgcaggcttaaaagggaaataccgcatgttagacctaactttgtcttcatattttgatatctgctctgtcagaaatgcatggctggtatcaacagaaccatgtctgatgttatacacattatatgaacaatatccgctatatccaacaaaacacaatgcagtcatgactataactgatttaaacgatacattcactctttgtttgttaacatgaataacgtctgaatcatgtatttgtggcagtatctcggaaataaggatatcagcaaaaatacagtttttgtccttctcccccatgagttcaccagataaacagatcccggcaatttccgtctgagagaaaaaaacgttctcaatacagaatgtggaaataaatatgtcaagtgaatactttagacctttcaatctatcaggaaactgcagtatatcatttttttccttgtcacttaatgaatcatcaagcgcatggcatattgatgccattatattagatcttaatgatgataatatgtatgatgaatcatattcagatgcattcgtccctgatttattggttgcccaaaacactggatgccatttttcatgtttttgatagattttttgtgccagcactgaatatccactgatgtgctcacatccactaatcactataaagaccggaatgttgtgatgtaagtgtaacgacagttgttctacaaaactccttgttttttgagacaatgtccgaatataggtgtaatcatgattaattagcttatcagcagaaatgacgagaacaacgccacgaggtggctgttttttacatttacgtgctgataaagaacttatcacagagtttattactcccgggttatcatatatctttcctgacaactccagcacgcttaaatctctgaaaaaccaccaacgaattgtccggaattgttggggagtgctatttacacaattacggtgaaagacaggaagattgatatcttcaagcaaagagttgtttttttctgaatctcccgtaagtaagaaccaaggaacctctcctcttccccttttacttatgatattcagaccttttttgaaatacgaatcaagcgtcaatgctctctttttacgagagaaagactttagaaaatttctgtattttcctgcagaaaagtaattatggatacaatccataataaatttaaaggaaagagtaacaagaatcacagaaatccagtaaagtgcagttgtagtatctgtccagtttctgaacacgccgataacatagcaaacagacagaacgaagacagaaacaaaaaaccagagaaataatgaaaatgtcttcttaagcataaaaatcatctcatataaatcatggataaaaccacaaaatagacagcaacaatacctacaagtaataaatagaaaccaagcctcgatgatttatactttttttcctgagtgaaatattgtttccttcgtcgattgcaacattcaattcacattgtcgcctcagcctcgatatataattattgatttcatcattactacccacggaatatttacctctgaaacccagtaacaggcacaggagaaagacccatccagcctgacttcccgattcgatgactttatcaagtttataaaagaactcgaccccccagtggagtgtccgaaatattttatctgcaaaagattatcacgccattcttttctacagggaagctctgaacacaatattgcctcatcaagcatgacgattacagcataaaatgccgcatcaagttcgctgtcactcaacgacattttttcactattgcgaacagcctcctcaacagtgttaattatattctttctagtactgtcgtaatcactatattcttcagggaaaactctgacagatgatatgagtttaaatactggcatatagcattcaacaatattcaccagcacctccacaacataagtataacatgtttcatccccaaaaatgataaactgtaattgaacatttgcccactggcactgatattcgccagatgagcaacatccatgctcactatgtgggtggttctcattatgttcaacaccactacagagttaaatacggttcttacatatggttgacatgaacgcaatactgcttctcctatcgtgtccataaacatcctgcgattttctgttctgccatccggttctcctgtggagcctgacagatattgtactaggctacgtcttccagtgtctggataaagcatatttcagctcccaaaagtggatgaacgttatctgccaaccgccggatggaaagaaccgttatcctgtttaggcctgcttacggcatacttttcctgcgataatactaactctacaagtaaatcatcaggactacatgaccaatagaatgcaactcttttttgagtctgagctaacgtccataattctgaatgtttatctatctttaaccagattgtattctctcttacctgcaaatcagatgtaacggcatccatcactgtaaacttgattcctggaagagcatgctgaattatcatgtcgatatgttcagatggagcaatcttaatctctggcaatgcaatcagcttattctttctgaaggtatctgaggttaacttaatatagtaatctgaattacttccggcaccgtactcatcgaaattacagatcaatgtatcagtagttatttttctgaattcaacactaataatcttatctcgacatgaatcatccagtattaacttaatataatactgcagatcactgaaacatgagatctgctcataatgattgtatgatagttcgacaatcctagtatctgaaagtccagagttatgaaatgtagatatttcccctgcaaactgacataatgccatataatacaaccatgggtgaatggcatcttcattaatgaatgaagaaagaagtggtaatgtcctattaatagcacatagaattaaaaagttataaagatgtccatcggacactgttcgttctgtatatctgtatttctccagtctatttttgtagaacttaatatccgaatagatctctgcgatcttatttctaagtttgtgattcgcagataacctcatcacgggaaatgaacactcatcatcaatacataatgaattatttccatatatgatccttgtcaggggtaaatactcatagtctgtagtattatctttttcctcatctgtaagaatctgaatatcatattttattcttgtaatatcggcatcctgactgtcatgataaacattacgcatgttacgttcatcatctgaacttatccatctggcagagcctcgtttatcattaacactggagacatttttatgaccggaattgaatctcttaagcgcaagccacaaatccacggtaccgtgatctgaacctttgagatttgtcaggcacttatcctgtaccacacagttacccggatactcgatataataccctgaagataaaacagcctttattttttcaactctgacagtatcttccttaagaagatcatcattgatacaacattcatagtacccctgatgatggggttgtgataactgcctgcttctggcaagcatgaagccatgatgcaagtcaattgactgaaagtgctgaggttgtaaatagagccctgaataccaataaacaagttgttcttcttcttgcatgcagtaatacccgtacaattatttcatactgatactttctttacccatcgatatctttttggaaagaggtaagagtgatgcatgtaatgatttgttccaccaaccttcctcaacaacatcaaccggaatatctaagagtaacatatgctgttttccaggaaatggatagtatccagcaatcacacctacatatttagtcccttcattcctgtctatatgtagcgttatctcctgccccggcatagccacgtatttatcaactttaagaatgccatcaaccttacctgtcccgataaaaaactgtttgattaacacaggattattcattatgtcctgtaatgtatttttatctgaagcctgtaagaataataatgcacagctgttggatatctcgttaagtgagtttaattgcgtatcagatgatatctgaaaagtaagcaagccggcgccaaatggagcatcggcattgttgatagcctgcactctatcctgttcagaatacttatcagaacaggcagtgatgaaaaaggggaataccataaccgctagtagcaggcacttaatagtcatcaatttctcatccttttaagacacggtttatttgttccatagagtcattatctttaagtagttcctcaagccattctgacatagtcattgttgaccaacgtatggccctctccagaagataaggaacaggactggttggttcagattgcctgaaaaaaatagctattttctccagttgctctatagctttctcccttgacatctctttatctgttgagggtgttaatgcagaataaaattcctttttttcctcaggaagtgctgtccttgtgtctctgctatcgggtttgcctagaaattgagaaactgaactgtgatccagtgtttcttgcggcaaaaaacgactcagtaactcggttatctcactgatgatatgtctggtttttgcgaaaatatgatgtatatcttcatgcgtatgaaagaagtaagaagattcaatctcatcaattttgtcaggtagatcataaagctggagaagttgctcactaaccttgcggggattatattttcctacagctcttttgaaggactcaacagagtgatcaccttcgctctctattaatctttcttttccagcttctgacaaacttgctccatgttcaaacgataacaccttataccattcagaaagtgtgatttccttatcctcaagaagaggatatgctttcagatactctgataaatctatatcaagacgaaccaatttactgtaacgaatttcctgaccttcttcctgcgatggccagcatgtagtccagtactgagaaataaactttgcaagatattccaatccgcaatgcatcccttccagagcatataaatgcgtcaaggactccacataccagcaactaatttgtaggtccttactcttattacgtaaagtaacctcacataattttcttacttttctccagtcagctctgcggggttcactgacagcccattccccctgagacatatagtccggatcattttgtcttgcctcccgtatttcgctatacaccggatcatactcaatatcatcacctgccggcgattctcctataacaggaagcagtaatgtatccgtttctattttgttcatttttcatcctattaatacctgaggatatccactgacaattgtccctccgtgagcacagatatcgcccattcgtgcagctggtttgccgcatatcaagaccttaacacttcccataatgacaacatccactggcccagaacaaagagccagggtccccaatgtcgctgccggtaatccaccaataaatacagacggagagcctggtggtaacaatggccccccaacatggggaacaggtggtaaaccaggcgtcaccataggacatacatgcatatcagtaactcttgcagcaggttgaggcatatacaactcctaggaatgactattacaccaatgccgaaaaagaaaaaacacaccttcatcaggtgcatcataatatttattcgactgatgcattaatattccataaataatttttttttctgaacatgacggtgcatagaccggatcatatggggccggacttagactcccctgtgatacaaataatgacacccccagtgcacctgtctgagtggaaaatccaacagactcagcgtgtctaaatatttcccagcgttgctcatcatcgccttccttccatctgacaatagactgtaaaagcagtgaatcctcttcaggagataactgagagataaattgtgccagccatctgattaatactaacgaatctgtattattaatccagaaatcaagtgcatccagccatctcccttttatcagcatttgctcaactgttttattaatttccggaacagtgatattctttgtctctgacatatgtaatcctttatcctatattcacgattccaccttttatctgtgtcattgcagagccctgaagcgtcaacatggtgccttttacctcagaaatagcctggctttcaaacttaagtgtggccgctttgacctctgccgatacctgcccttctatagtaattttagcggcttttatatctatacctgatgtggatatcgttatctcatttgcacccacttttatttttattgactgtgttgattcaagagtaagattcttatcggtgataagactaccacttcccccgctcactttaagattataatctccgttcgaaacttttatattaatattaccatgtacatcattatgtaggtcaccttctttaagaacaagcctgtcattccctctttttatttcagcattacgcccttcagcaatagttaacgacatagagcggttaatagtgctgatcatatccttctttacagtcaggagagaatcaccagatgaagtcactataactttttcctcaccttctttatcatcaaaaaccagttgatgaccttctccttttttaccattcttaacactacgggtgataaatccagacttacaattattctcaggaagagaaaaaggcgatgtattctgaccattatacactgtaccaacgataactggatagtcaggattaccctgtataaaactaaccagaacctcactgccaatgcgaggaataaactgactaccgaatccctccccggaccatacctgagatacacggacccaacaggaggttttatctgtacctgccgctgacttttctccccagagaaagctgatttttacacgcccattatcatctgtataatattcttcggagtcagggccgaccactctggcaagtaaaacaccgggaataataggtgttttaaattcacggctgaaattaagtgagcttttattatctgaagcacacaaatcacaataacacaaaccagcatgttcattgtcattgttgacagcattaagatataacgaagtaattctgtaatcctgtttgtccagactgaaacactccccgcatgacaaccaccatgaatccgtttttcctgaccagattttgagttcactgtcacatgatgctatcagtgcttcagaacgtttctttatcaactcacgctttctctctgggataatatcttcataaactcccttactgggttttacatccgtcagtttactttctgactttatagtaatttcactgacattactctcattataacctgaaagtgtcacagaaggacatttgagactttctgtgaaagaccattccctgatatagccatgacgcgattccttcagattttcacagggtaagtgttccagtttatcataagatgctttaggatgagatgcaggatcatctgccaatgtcataatatgtttatctctattatgaacaaagaaatagtaaatgcccgcctcagacaaaattctattaataaagtcaagatctgactcctggtactggatcttatactccagcaaattctgttctttatataaaattacttgtggcggactaaataaactgtcttccagaattgtgcttacaatatctgatggctttatatttgaccatactcttgttcttttaccagatgccaattcggctatctctggttgtaagataataatgcaggtatgttgcatgctgttatcataattatatatcacttttgtgaccacaccatgaatgaaacgcgcaggtaacgaattgtattgttccccgatctcacaactcaaacgcgtgccgtgtaacttatccagagagttgtggtcggtcctactaaagcattttatttcataactatatacatcagatattgactctttacctttaatctcaagtggaaataatgatatatcacagccgtgcaaccggataaaatgttcactctggaatttataatgatcgtcagatataaatctttgcctagtcataatatattctcatcaaaatatacaaaagcaccgttctttataattttctgtttcagaaccgagtgaaagattgaaaccaagcttattgtttatattaagttgattatcattgttaccgggatagattttcacatatattttgaacttaagaacatcacctatatacgatcttatttgttgtctgataaaatagtgggaatcttttcccggcataagttcctgtgcttttctatagtccacaggccccaatacaacatcaaaatgtgaatcaaccacccaacgaacattgcctatgacaggaccttcccccagagtatagaggcaattccccagaaccccctgctcactgggttctgtattttcaaaagtgccacgaaaaggattaatggacactctgatttgatgtattaacgagagtaactgctcaagcccggccagggatcttactggttgtgaatagaatgcaacgtatgccagacctgtcacactaactgtctgaggggtgatcccgcctaaagataaaagaacattgttaagaacattattatcccttctgttttcatctcctgacagatgcattttttgccatgcgagataagaaagacaatacattctatggtcaaacatgtccatgaatgccttaggagcgtcgtcattataacgtaatttcctttcaatcagccattctgtatatgcggcaggaagaacccctgtagccccggttaatccattatcgaataatgtgagatgatactttccgtccttctcatcctgatacagattctctatctgaccgtcaggtgcatctaaagacagacttgatgtaaatctgaaatgttcatcaacaacgtcttcaacgctttcatctggtttcagaatatttttcaataacacacggactttattgaaaaagctgaatttactccggttattaatcaaagccatgttaactttcctgctcttatcggccatacacgacgagtgtgctcctcatgttcaatgacagtaatcatgcgagtaaagctattgacaggggcatgtagcccaagaaagtgatcaaggaaagagcaaaacatgaaacattcagggtgcatatctgcatcctttgaaagagttacggtaatatcaattccacgagcagttacaggcggatatatgccgggtaaacgggatgaaactggtgtgatttgtaactctttaatccattcaataaaaattgatattgagtggttattgttgtagttatatatggatagcatttctctcagtttcattgccccatcagtaccactgagcaacacaaaattaagggataactgagaaacaattctccagttcattccttttaatgccatagccggcaacattcttgatggacggttcagcgcagttattcgcagctgagcaatatctatatcacaatcaaaatcaccatcaggatcaccattattaattgatgatggaatattaccatttgtacatattgcatcaattgaaaggacatccccagtcatgatacatgactgggctccgccatcatcgctcagacgaatatatacactttcctcaaagttccctctttcagaagacgagcgataacatgaactatgccagaatatattgcacgattgtttaatgacagaatgttcaagtccaaataaattttttaacggaaactgcttgactatatcattttcatatctgtgcaatgtcactttatttatatcccagattaagacttcattacgtgaatataaatcggtatttacctgatactcatcctggccatcagataatcgtaggggttcagttttcttctcgaagagattgacaacgggagaacagtttactttaaaaagtctttcagaaacattcctttctattctgtctggctcatacttttctgcactgctttttaatgttatttctattctcacagaatcccctgagcataattcgattccggagtcaaattctatatcaatgaagttaaatcgttctggaaaagaaaaatagtccagtatgaggttatgtatataagaaacgttccctttttgtggaagtgttacttcactctcataaaatccggcaccggatatattagcactgatatcatataacacatcattatttctctgcaaaacgatattatcgacctcatcgcacaataatgtatatattataccagtaaccgttgccggaccattcaaataaaatcttacaaaatcaagagaaaaattagctccgtcgaaaacgtctaaattcaattcaattttccataaggaggacgaattatcatagtgaattcttgctttattaaccgttgcagggacaatagtcagtggatataccgtccgaaactgacagatggttttatatttatatctggaatatagcgatgtgccagaaggaactctataagttgaagttattccactggattttctgtctggttcaaatgatacaatacatgatgaaggatagttatacaaaaattggggagcaagattacgaagtaatgcttccattaactcgggtaaatcttcatctaatctctgatgaatttttgagcttaagaaagcaaaagactccgttaatctctgaacatgtggatcttcagacccccctgattgtatccaagacgccgggctacctttggatatttttttgcaaactcaataccttgttttctaagaaaagcgagttctttctgatagtaagataatagtttattcatccagtgaaaattctcctgagttcttatcccatttaatacagagtcttaccatgtccataaagaacagggctgtaactgaaaagaaagaataattatcatcactggaaagatattcaacaactggttcctccagccgggactcataacgctggagcatcatcaatattcttgaagaaatttcatcattaacagaatcactatgttcacctgcagaaactacatatactgatgactttatgccatagttcaggacagaactattaacaaacggcagctcatctgtttcaaggtataaaggtcgtgatgataataacatcccgagctcatatttcagatcatctgaaggaacaaaattcagatgatcttccagagagcccggattatcatcacgtaagaactgaagaaacgaatgcattcagtattcttatacaagagcctctttatataagttgtacgtcattggtcccaatttctccgtactttttccatcatctgacggaatattcatctcaattgagacactctcttctggggtaaacgacaattccagaatgagatttgaatcattatcatgagccaacaacatattatgcatacgacacccctgataaacaaccttaaatgatgagtatgcactacctgatttagttgattccctacgtaaaatttctattttaacttctttttcacctctcttaaaaaagttctccagaaggtcttgtatgtgtttagtaaccctaagcttcaaattaattaaatcaaaaacagtaccgtcaattcctgaaaaagcgtgaaatgcctgaggacaatgtccatcaaagtagtcaccactgttttcaacttttgaatttccctttataacttttccacctatctctattttgacaaactccctgctaagagcggaagaattactcataactccgaccataataacctcttaacttacacttgatggtaaatcagcaacaagacgcaatgacatacttaaaccctcaagctgaaaatgaggtttaatccatgcaattgcacgataatttcccggacttccagggacttcaataacttcaacagatgcctcacgtaatggataacgagcctttgtctcctgaccagcgttatctgatgccacaacatattgcatgatccagttttgcagatatgtctgacattctgtcctcgacataaagcttccaactttgtcacgaacaatcactttaagataatgtgcgaatcgtgatgttgctaatatatactgaagctgactggataattttgcattcgcattagcctgatcagtattatacagtcgtgctttgtttaccgactgaacagcgaaaaatgccgcaaaatcagtacctttacaataaaccagaggaataaaaccgagatctgacaattctttttcccgacggtctgagatagcaacctccgtcggacattgtaaaagtcgctcacctgtatgggatacataattataggccggcaatgatttaaccaaaccgccaccttccacgccccgaattgctgcacaccagccatactcctcaaaagcatcaactatccggcaggcaagttcaaaagctgtatttacccacagatagtctttgcctgagttatcttcactaatgtgctcttcaaaattaaacgtttcggcaggtatagtcttcatgccatatggaatacgccccagagactgtggcaaagtcaatcccacataacgactgtcatctgtctgcctgaaactacgccaacgggcataatctgttgtctcaaacaattttgccagatcacgcgggtagggtaattcgctaaatgaactcatggacaacatacccggagcaatagcactcagaaacggggcatgagcactggcagcaacatgggaaatatgctccagcaaatcaatatcctgcggtgtattatcaaaatagaaatcaccaacaaaagcagaatacggtgttcccccgaacgttccatactcgctttcataaatattcttaaataagacagactgatcgaaatctgaggctgacttgaagtctttgagcaattcctttttagtacagtgtaacaccgtgtattttacattttcagtaacgctggcctgaaccagcttataaagtcccgtccatgctgattctattttttgaaattcagtcgcatgcataatcagactaagctgctcagacatcaacttatcaatatcagcaatccgcttttcaatactaccgattaaatcgctgttaatgaccaaagaaccactggcaacttcagcaaggaaattattaatctgtagtttaaacctggtcttttcagaatcctgtctcacagctctggtattatttataatctcttcaagacaatcatctgtagcatactgagtttcattcagccctaatgttgatgcaactgtcatgtttattccttactttcatcgttttcaggattgccattagtagtcaccagcaattcctgaagtttttctttcagtttctcattacttgcagccctgtttcgtaggtcacaaagatgcaacctcaattccgataattttcttagacactcaacctgttgaatcacattatcgggagaaaaatcatctttgcaactaaacctcagttcgacatccagttttccttcatttcccgggataacactgtccaccataaaatgagcagtcggactcattgatgccataacttcatcaaaattgtctttatctatactaatgaattttcgttctctcaatggtttttctgacgaagagtactcacccaaaaccccgatgacaaggggtaactctttcgcagtttcagcatctccggtttcaacatcatacgttatctgtactcgtggggggcgggttttatcaagtttatgttgtgtattgctcatgtttctatcctacaaacagcttttaaattcttttttattaagaacactataatctactatcataatattgatgaacatagcataattatatgacctaaataccatagctaccgcacagatgttttcgaaagtgaaaatatctgatataaagttatatctttggcaaaagattgtatcaatctcttgttatattcatggattctatatagtgataccataaaaagaaagtgagcatgtgatacatttttgctgattaatgatataactctatataatttttcgtatttactaactaaatagctgcgcggaatagtaggtcactttgagggaactcagcccggattgtgcgatctgatcaatcgccaaaagaaaaatcaccaaccggactgagcgatgc

SEQ ID NO: 597 - DNA, 4063 bp, Escherichia coli
ggaatagtaggtcactttgagggaactcagcccggattgtgcgatctgatcaatcgccaaaaagaaaaaatcaccaaccggactgagcgatgccgatcataacaccaatccccagaacagaacgacgcctgatgcagaaaactatccataaaacaaaggacaaaaaccacgcccggcggctcaccgccatgctgatgctgcatcgtggtgacaccgtcagttatgttgccagaacgctctgctgtgcccgttcatcgattggtcgctggattaactggttcacgctgtcgggtgttgaaggcctgaagtcattgccgtcaggacgtgggaggcgctggccgtttgaacatatttgcgcattgctgcgtgagctgttaagcattctcctggcgatttaggttatcagcgttcccgctggagtaccgaacttctggcgataaaaatccgtgatgtcaccggttgcccgctacatgctccaaccatccggcgatggttacctgctgccggactggtatagcgcagagccgcgtcgacaccgcgtatccgtgccccccacaaagaagaaaaaatggccgctattcatgaaacgctggcgaaatgcagtgcggaaaaccccgtgttttacgaagatgagtggatattcatctcaacctgaaaatcggtgctgactggcagttacgcgggcagcaaaagcgcgttgtcacaccgggccagaatgaaaagtattatcttgccggtgcactgcacatcggtacgggtaaagtcagctacattggtggaaacagtaaaggttcatccttatttatcagactgttaaaacatctgaaggcgtaaagacgattacgctcattgtcgataactacatcatccacaaaagccgtgaaacgttgcgctggctgaaagcaaacacgaagttcagggtgatttatcaaccagtttactcgccgtgggtgaatcatgtcgaagggttgtggcagtcgcttcatgagacaataacccgaaatcagcagtgccgttcaatgtggctgttgttgaaaaaggttcgtcactttatggataccgccagcccattccccggtggaaaacatgggctggctaaagtgtagtggcattaggatctgttatttagcacggtgcgattggcatcactcgccgcgtcgtccagcgtcaaagagcagacatcaggctgtaagaaaggattcgtcggcacatcatcaaacggttggcccgcattcaacctgtgccatgcttgctctagtgtgcagtctcttcgtagtacggcagcagcatagcaccacatccaacttttcttgttcgtcaatcaacgcgatcagcgcatattgactgataaacgtccgttgtgccggagagagagcttgcagacaggctggttcgagcggaaaatgctcaagcaattgccccaccgcctgcaacaacacctcagagcacgccagccagtcactaagcgtctcgagtgcaacaacgaaacggtgccccaatctccagtagatcgtgcaacccgtggttgccaccaccatcggtgcatcgcggagttgtcgggctaactgggtgcaattctctgcgatgacacacttacgcaccggggcggagaaacgcccgtgacgcggggtgtaagccacttcctgtaagcgtatcaagcagcaccatgcccaaaccactgctgctcgcctgcacgtcaaaagtatgaatcaggccatcctctgattgcagcccatcaccgtgcgattcatagctgcgctgatcctccatgcgaaacgtgaagccacccgctagcgccatatcgcattgccctgttcccggtgatcgggttcagatgaatacctgtaaaattggcccggcttatatcagtacacatctgttgatgattgcactcgctacagaatcctgaggctctactctcgtcgcacggcggcaaacacactggattttattgattgtgttattgaagaaatgcctttcccgatacagcgctttcagacagaccggggaagagaattttttgccgttaaagtgcaggaaagattaaaagaatacggcatcaagtttcgtccaaataagccagcgtcgcctcatcttaacggaaaggttgaacgttcccaaaagacagacaaagctgaattttacgctaccgtagatctttctgctgatgacctgaaggaactgctggcagaatggcagattactataactgggaacgtcctcatagcgctcacaacggtaaaactccgatggaacgctactttgaacttgctgagaaaacaccatactctgatgccgttcatgcaaactatcagcccaatgaagagcatatacaggaacagaattacaagcttgaacttgaactgagaaaattaaaacgatgtctatgaatcacacagcttatttatatccttatttttttacttacctgtggacttacttggctttagtcccgaggtattgccaggagtatctttattatcgcgtcggcgttgatccggttttcctgtcgacttagcaattggttttggacctagtttaagacccatgatagttatccttcgagatgtaagaggaatgccctcaacattggtatattctatactgagaaatttttcaatgggaatgttcaacggccgaatgattaactcgatattgtgagcaatgtctttttttggcacagagcgaaccgttagattgcgcgtatttttatggaaggagatcatccaataacggttactcaccgatctcctttatggtaatacgcacctgttttattaacatatagaaaaaattactccggcatgttttatctttttgaagtcaggacatttaccagttcacttaaaactctcttttgttcttcatcctgaagatattgaatccggaatttaatctcttctgcaacccgtcttgtattggactcattaagtatttttgttattcgctgtctctgatgttcaggctggccttccatatttcgtaaaaccagatgaaataatatatcataaagtgcgcaatgccatgaataaccatcattggttaaaataagctcccaaacccgctcctgctcagcaataagctgcagaacaaaggattcaacctgttctgattgtccggggacaacccggtatagcggcgcaatcacagcaaaaaacagttcatttagccaggattccgcttccttctcgctcctgaaagatggacagttctgtattcttcgttcgtattcacgggtaacctgctccggaatatcctccggcggtgtcaaccacttattcctgagcaatatactggttgacggatggcagcaggctatttcagcaataatttcacgtaatgcctccgggctgaacttcttcagctgattgtagtgctcccgggtaaaaccgtgatcatcgcataaaagttgccatgtcattgatatactgtttgccattcctttcttcatcattaatacctgttacatgaatatcaacagaccggtgtaccttttctgaatacctccccggacggactggcaatccccattctcctcagcgtggcatctgcagctttcgccacttcgctgatatccagcttttcaggtagcggcggggacgatatctgcgccaggcaataattcctgcgcaacaacaaccactcccgttgtgcttctgtacattcaacatttcccataacaaaaagccagcgggcagaagctctgcgccagcaaccagcagcctccagtttttgcgcaaccatgtcttccacgacttccgggggactctttttcctgctcaaaacatcaactcactgaaataatatacatacctgacggtctcagcgaaccgtccatgccgggctgaagtcctcttcctgaaacaattccgtcagcccgctaatctgtttcagtctcagtacttcatcctggtccatacccagctcagtgccaatgcgttcatccatccagcccaggcgtgaaagatccctgacaatatcggacagggcagcataatccggtaatgaccgggggtcaccaccggttttcagtttcacttcagaagtcatcggcagattcggt

SEQ ID NO: 598 - DNA, 3958 bp, Escherichia coli
tccatacccagctcagtgccaatgcgttcatccatccagcccaggcgtgaaagatccctgacaatatcggacagggcagcataatccggtaatgaccgggggtcaccaccggttttcagtttcacttcagaagtcatcggcagattcggtgttgctgtattaaatcatgattaacagtgacgaaaagaacatcagtgtgataccggtacccgggaaaggtattccaccgcgcggataattgccggtgtcacatcccaccgccgtttcagaaccggcaacagctcattaaggtttctgatataacgctcagtgaacagccgttgtccgtccctggttaaatgaaaacctgactgattacaggtaatggtgatatgacaggtatcgttgccaatatatacggcttcctggggtctgaatctgacattccagtaccaggaatacggggaatgattaagatgaaaaagacgcatctgaatgtcactgaataatggattcatcataaataaaatacacctgataataaaatatagtggaaaaccagaataaagaaatggtccggtattatgcaaaatcctcaaggtggcgactgatactgttttcacggtaacaggtcaccagtaattcacgggttgcccgggtgaacgccacataaagcaccggaatcacttcagactcatccgctgcaccagagtgcacgaaagacgcattgataaccgccacatacgggaactccagccccttgctgctctggtacgtcagtaaatgcaccacatccttacgtcgcgagtatgtcttcttgccttccctgtcaaaacaggtggcaaaaggtaccccgcgtagtgtcataacgtcctgcaattgttgcgctgaacgctctgtcggacacagcacagccatatcactccagtgaccacacaggacatggcgcttctccagccagtctgcaacttgtctggcttcatcacgttcagaagcacaacgcaggatttccggctctgtaccctcttcaccgcccgcctgtggctgaacgagcggtatttcacggttctgatgtttttcaaaatactcgcgggagaatgcataagcaaagtgcagaatgcgtttcggattacgataattgaccggcaggacagaagtgcgtccctgtgcctgaatccccacactggccagagaaaagttcagggcccgctcccgccggtaaatggactgggcgtcatcgtacatcaggagcagtgaacgggatgcgttatcaaacagacgggcaatcagggccagccagcgactgtcaaaatcatgcccctcatccaccagtacagcatcatatccggttcgggtgatttttccgctgttcacggcctcttccagtgcactgaagcatttatcaggatattcttttctgtcggccgtcaccttaataccgtggcgttttaccattgaggcacaccagctgtgaaaatgggataccgtaacccgtgacgccagccctctggcttcaatgcattcccgcagatagctggccagggtaatgttgtagcacaacaccagaatctttccgggtgtggtttcagccaggtaaaggcaacggaacaaaagaatcatggtttttccggaaccggccacaccatgaatgacacgatgcccgtcaccaatatttctggccagaatctcctgctgaatatccataattttgatttgtgagttctgtttcacggtcacttcaggaaacagatgggcgcgcagaatatctctcatccggggtgtcacccgggttctgaatcccgtggtaaacatcccggcaattttttgccggaatacttcaggtaaaacagactgcgtcatttcatcctggcagattgtctgtgctgaaggaaaaattttttccaccgcattctcatcattccctgccagtgtcttcagttgctgacgggtaatgcgggtaaacaccacaccatacgcccaggccaggttcagccgtcccttatactgaccgtcattctgccgtaagcacgggtttgcaggtaaggcattaaccgtatcacaggcataacgacgaacctgtaccagcggattgatttctgatttcagaagaccgtcggtttccagcgtgacctgctcctgatttacctggcgcagcgtggaaaccgtccagtccttgacctccagaaataccagtccgttctccgggtcaataatgacaaaatccggatgccggtttttccgtcccaccggaatatcgtaccagacaaggcagtcatcattcagaaagctctccagtcgtgaagctaccctcctctccccgggcgtcattctctcctcagtggacgccgatacatttatcagtttcgccataaacgcaccttaatctgtgaacaaaaaaataatcaccaccgacatccacggatgttatatcgtgggtatcgctttattcagaaataaaaaacagaatcattaacatgaccagaatactgtgaaccatgctgcagggtatctgcagatatcccttctgttatatccggccggggtaaaatcagaacactgactgtcaggcagcttcattttccgcgtattccagactctgcaggtactgcagcgccgccgggtcagccacatattccacctgcccgtggtgacgctccacttcattaatgattttctcaagcttcacgcggaaaaattctttacgcaggttaatcctgttaatgcggtatttttccagactgtcatgaagtgttttttccagcgcaggcgcatcatcacaggaaatcatggcgtgaacatcaaaatcaaacggaacagaagcaccacttaactctttgaccctgtccatgggttccagccgtcgggtcatgccaattttaaagacatcctcaccaaacgaaccaatattcgaaatgatataaacatgcccctgtttcgtaagctgagccatggatttagcacgttcatactgcgcatgcgcttcctgaattttctgttccagctccaggcgttgtttctctaactcctccctgtgagccccttctgctgcgcgcagcgcctcctcaatcagtttctgctgctcagcaagacgccgttcttcctcttccgcttcccgctggcgccgttcaggttcatcctgacgctctttttcttcacgcatctgacgcttaagctctgcctgatattccttctcttcctgcgctttttccagcaatgccactttgtccagaaactgttgcctgatactctcccggtcagaattatcttccaggttaagaaaggctattttctcactgacagcagcgtaagcctctctttccttacgaagctggtcatatttgctttgccagttattaatcgttacaccagccagcagagtcttcgccttaaatttccaggcggaatcaacaatccgttgcattgcacggctggccttctgtctggcggtatgaaattcctcacgacgtctggccagttgctccttttcctgtcgtattccccgggctatcgcggcattgacagtttcattaaaaccccgctctctctgaaccagctctgaaacggcctgctcaaaggctgctgttttctttctgagtctccggtaaataaaaaacgaagtaaaattgcaaatacagtaagcaaaccaaaaaacaaaccaataatacctgccggattcgatactgcatcaataaagcgctcattaagatttatcagcgccctgaccgccacataaatcccccagagaataacgcaaactaaaatcaggacaaatcccgctgcattatcatcttttttcctcctgccatgactttcctttattttccttctcagtaactgaatatctttgattaacgccctccggaaatatttatacccggaaggttgtccggctttatgatgccagccactacaggattaactgacgttctgtcagatatccgcgcatccggtgccaggsccgtcaggtgttcccccacgc

SEQ ID NO: 599 - DNA, 241 bp, Escherichia coli
gtccggctttatgatgccagccactacaggattaactgacgttctgtcagatatccgcgcatccggtgccaggccgtcaggtgttcccccacgctgcgaaccagccgctggttattcataaaagacgccagcatagccagcagaagaaaaacaccgacaagacgggcattaatacgactgttcgccgttgcatccggcgtatcgtacagcgccggtttctgggcggagttagcagagaaga

SEQ ID NO: 600 - DNA, 567754 bp, Escherichia coli
  modified_base (1)..(5): a, c, t, g, unknown or other
  modified_base (8)..(17): a, c, t, g, unknown or other
  modified_base (49378)..(49378): a, c, t, g, unknown or other
  modified_base (108049)..(108049): a, c, t, g, unknown or other
  modified_base (108055)..(108055): a, c, t, g, unknown or other
  modified_base (108068)..(108068): a, c, t, g, unknown or other
  modified_base (108072)..(108074): a, c, t, g, unknown or other
  modified_base (108076)..(108078): a, c, t, g, unknown or other
nnnnntannnnnnnnnngaaaaacaccgacaagacgggcattaatacgactgttcgccgttgcatccggcgtatcgtacagcgccggtttctgggcggagttagcagagaagaagcaggcataatcccggttcttgtagtaagagagcggaataaagcccagattcgcgaattcaaactcccgcgtttccgggatcatcacctctgacggaattttgacctgattaccggttcccagatcatacaaatggattggcaaatcctgcaccgcaccaccggcctgaggcccacggatctgaacacaccagccgttggtgacaaaactgcgcaccatgttggctgcaaaggcaaaagacgcgttcgtccagagatatttatggtggtccggtcctttcacctcttcaacatagttaaagctgcggacaggtacggtatccgggccatacggcaggcgtcccagtacacggggcatcaccaggccaatatagcgggcatcgtccgtctcacggaaagcattccacttgatgtactcggcacgctcaaagtggttgccaatatccttgatggcagccacctcttccatggtttctttctggaagaacgccgggccaactgaaccaataaacggcatatgtgcagatgccgccacccgggaaatatttttcagcaacgccacgtcctgtgcagatgcatcaaactcccaggctgaaaccagggcggcaatgggctcaccacccggcgtgtcatactcagccacataggtctgcagataaaggccgctctgaataatttccggcgcatcctcaaaatcctgacgcagatcgtctttggacagatccagcagctcaattttcacattacggcggaagtccgttttatccaccagggacttcacgccccgccacagcgactccactttctgaaattccggatgatgaagcacagcatccagttgacggctgatctgataatcaagctctgcaatatgatggtcaatcagcgctttatcgagtttttccacctgcgtgccggcttttgccagacactccataaacacctgcatccctgccgtcagacgttcatctgcagatgcttctgacatggcctgtggatcctgccagatatccagtgcactcagggcagataccggactcaggttaattttttcaaacagggaagcatatacgctgtcgccggcatgcgcttcagataccacgctctctgcaacgttcttttctttctgtacagacatcagcattttctctcgtaatccgttaaatcacgccttttccggcaccagtgcacgcagttcatcacgcagcgtctgactcagtgccgggtcacgcagaattttttccagctctttacggaaagtcacgttatccagcagattggctttcaggtcccgcagaaggctacgcatggccagcatggctttaagacggggaatctgtcgggcgacctgctctggcgtgaaatcgttcatattgcggaaagtcaggctgatgctctcttcagagccatcaccggcaagcgtgttctccacattcagatgtacagacggggagatatctgccagaacatcattaaaattgtttttattaatatccgtttttacacgctctgacagtggacgctcttcctgtccgttactgaaatcaccggcaaccagaagtttgagcggaagctccactttcttctgcccaccccccgtatgtaggtctaatttcagatttacccttgctttcgggatttcattctgaaacgaactgctcatggctctctcctgtgaaacctgcatctcaggggttccatcaccgcagatgcctccccttgtgcactgatttaattttgatcattataggacgaagatctgaaaaatctcaatatgacagatacatcgatcgatataatgcaaataatcaggactttattctatggaatgtcgcaaaataatgaatattcaaagcttataaccattgttaatgtaaaaatacagaaaattattccacaaaacacttttgatacagccagttaacataaacactgtattttcttgatttcagtcattgaaaatcacaatgagtaaagtttcagcagcattgacgtgatttctggaaagcgggaaagatatgggtaagcgcycaacaaaatgcaatgaaagaaggagtgaggggatttcttgtaaaaacagaagattaacaaaacacatcaggaggcagagactcctgattcagtgctaccacatgaaaatttagttaactgttaccgttctgaaatctatgtcagaagatattccattaccgaaaatcaatcagcgatacagagacgatcatggtgcgcttgtcaccgtgaccagtgttgaggaaacccgggtggtgtttatgcgggacggctatccgcatccctgcatgcgaccgatgtacaacttcctgggaaaattcaaacccgaaccccgggaagaaacagaataaaacgaaatccctgccggcaatcacactgcctgaatggcagcataatccatttattaattctcatccccggagacaagccctgaaaaccactccgggtgttcactgtatgctgtgttcagcgcatcccaggaaacgttgatataaaagctgtcctgcaatctgcgggtaacaacttcttccaggcgattccggttatccgccagtccggcataacctctctctgccagccactcattcagttcatgttccagagacagattgataatatcgtaatcggaccttgccattcccgtgtccttagcacatgttttcaggcacggggataaagtataaagaatgtcgtactgctgctgccagagcaatattccccctgatggtcgtatcagagatggtatgccggtactttgcgggttgttcctgtcaggttatcgtgcacctccacggtcgtggtcaccaccggcattccggcctttctcagcctcagaacatcagccgcaatacgctgactgccaaaccagaacaggccgtccagtgcagtcaccagtaaacccgcctccagtgcatacttcagccgttcacggggcgctttcacttcccgggcaacctgctgatatggcaatgatgtgttttcattcccaaccacgcgacgaatacgatgagacagatgataccggaatgtatccggcacaccagaaaggctggccttcaggctgtacacgcagccaaaccgtttatcgttaaacaccacatttttctggctgattccccattcttcacgcagcgcagcaatcagttgtggtgtacgggtaagcaacaagcgaaaaggcagttcaaaactggtgacgtaatccacattcagcagtgcaatacgcaaccgttcttcaggccctgcctctgtctgccggcactcatccaggacatcctgccattgccggcgaagacggggcgattcattcagttcagtaaaactgtatttatctgcaagatagtcaatttgtgtacgcatactgaagagcattccgtataaagattcagctgacaaaactttatcagtccataagaatcaacggaagcaccgatggttcacctggtcatcaccaagttttgccataaccggtagcaatgatcattctgtgtaactatttgcccgcagatgatgatgtttatcgatgtctcccctgtctgaatgtcgcataaagaggatcatcagcagacacagccagtgagccaccgtccgcggaacaaagcgccggaccacatccggatccggcaggggcatgactggcatgatcaagtaattatgtcgcatctccctcactcctggtcccggagcaaatctggctggtatctgtaaacatacttcgtacatgccgctctgcaataaatccccgtgccacaggcttcacagaactttttcccggaaaaatgctgcccgcacatcacacaatgccactccagcacgacaggtaatggcgataaaaacatcgccatatcatcaatgtaaggatgggatttttccggattcagcaccacgcaggccgccttctgttgcgcgctcagggcatgtaaatcgtgctcaaaccacgccccctgagcatctgtctgcaaaatcaaccggccacgacaggaaagacagaaacaatgccggatatttctgctgagcgcagaatcggcactgataatgtgctcacccggcgtgatcccagccccgtttttataccgttcattctgcaaccacctcctcactgaagcgccctgtatgacagtgtgtgcagtactgctccccataataatcgtggtgacattgtctgcagtgccagctggctttacgcactacgggtaaggcgtccggtacgaattgccgtaagcgtttaatcaacagtatttctctgcgctccggtctgacataagggcactcatgaccatgctcagtcagcccgtcgtcagtgtgttcaaaccagggacgttcagtgtcgtattgcgggtggtatctgagagcactgccacagaggtggcaggtgtaacgatcgtatggcgctgtctgtgcggtacgggcaccggtcagacgtccgttgccatcaagtgcgagaaaggattttgcgtacatcgtcatattcctcagccgccagacgacacgcaggcaacagccgtcccggtacgggcagcgtggtcagggtgtgaatggcggttgtkcagktcagtctcagaagggaaaatcagtgtggtcgctgtgaacacgtcatcacactaaggtcagataagtcgtctgtcgggctcagccacgactgcagccaaagttgcgctcaccggtgccgtaagctttggtactctccttcgccagatagtcagcacgctccagcacctgctgaaagccggtgtcatcatcgcgttccagccacaccgccggcctgaccggaaaatgcgccagcgtggtatgatctccggtatccactcccagggcactgcaccacgcctgtttaatcatcccggccagtgatcccggagcgcggtaatcgccggcacgacaccaggtatcccggttgaccagcagcatcaggtgatagtgttttttacctttgcactccccaaactcccgggcccagacgtaatgcagggttgtgggatgcacgcgtttgccttcacggcgcttacgcttctgataagcatcgattcgggctttcagggcattgatgaagcgggatatcactgctgcgtcagttgctgccggtacatccgggagacgcaggtcaatccgcaatgccgtcagacggggatgaacatccagtgcgcgcagcaccgtctcacggatacgttgttgccagaaggggttgtactcgtatgtcatggttaaatctccgtatggtttcgttcatacggaataaccacgccgtaaaaaatgcgcagagtccctgaagtgacctccaaccgggcaatatctcaggcactctgtgataacccgattgtcgtctccggactgacggctgaattttcagcgttgtttttttaatgccaaaaaccggttacagataagactgtgaggagggagctatggtgatacacaaaacggtgtgcagggattgtggtaaggcaattactcataatacggatgttgcccattaccggaataccgatcgtcggcgctgtctactgacgtcactgctggtgctgactctgcctgtcggtttatgccgtcaatattcaacgcaccggatccccggctaatacgagaaaacctcagcagaggtcggtaatgcccgaaaatcggcccattaccgcccgcacctccgtacaccattcccttttgatttcgaattctttgttgtcgctataccgcttaacgttcccggtattacctcggcctccaacaacaggaacatattcagctttgcagcaaccagagaagagcaaaagaatcacaggcatataacgcccggcacaataccgctgtgattaccgaacgttcaggtaacatatttccagacagaagccggaacgcgatcgtaaagtttgttcatggttagttctgccagtcggtgatcaaccgcagagttgaaggcttccagctccgcaagggtaagtttataacgtgtgtgggaaatcactttttccagcgtctcccgggatgaacaacgacggaactgatacagccagtcttctttggttttaacttccattagcctctcatcactttatgctgcaattaacgtgatactgccagcataccgcacctgactggcattctggtacccaccccaaactcattactcccgcaccaccacttaaccggtctctcagactgtcactcaccaggtcggatacgtttaccgctcagacggatgcttaatgcactctgttcacgtgtgttgcaggtacgttttatatacgcaggttatacgccagctatcagggatagccctgtgagtacaacgtaatctgttgctactgcgttctcatacccactgatcacactcacagtgtttatttcacagatatgaactcatgtgtttgatctctcttatatatttataataccaatcagacagtcttatcccatcggtgatacctgtccctgcccacaaggcacgagctgccccaccgtaaccgccccgtaaataactctgcaattataagaacgacggttcttcccctcatcctcccgaaaatcatcccttctctgtcgtgcgtacgcgcgagaaacatcgtttcgcggtagccaccgggtatcccagcatcatgctccctgtttatctcccgacaggaatattcccctactcattttttacgtttctccccagttgttatgccagtgaaggtggtgcgtttttcatcaccaacgccggttgagattaacaacatccggaggaacattttcatgaataccccagtttcgctgatggatgaccagatggtcgacatggcgtttatcactcaactgaccggcttaaccgataagtggttttacaagctcatcaaggatggtgcctttccggcccccatcaaactcggccgcagctcccgatggctgaaaagtgaagtggaagcctggttgcaggcgcgtattgcacaatcccgtccgtaattcctgaccattacccgttcaaccgcagcgaatacactatccggcctccggaggcattttgctgcgtgctaaaggagagaatattatgcaaaaacttgaaaaccggtgtgatctgctgctcacccagcatcagaaatggatggcaagtgtaacccggtttattgtcgctcacggaatgggctctccgcatcttcatggttatcatcgcctgaccctggcccacttttttctgccggaaaaaggcaccatcatctcggtggcaccacagggactctatcaggtagtcaacccggcaacgccaccgttcattcctgccattcaggaagggttaatgaccagcattcagactcatgaaatcatgttacttacacattttaacctgggtggtgttttactcagtgaactacatcgtctgggagaaagccgactggcaaacaggctgaacagtctgctccggcgttttgacgatcgcgatctctaccacaccctgatatggctgtgctggtatgatctgatgtgcgcccactccatgcagccctggactgaagagttaaagcataaatcacacgcagaacttgaaagctgggctgtggcgcgcaaacgggaaaagcgcgagcttgaactgatgattgacgagtacctgttatacgcctgttgattcataatcactcccgggcggtacgtagtcagtgataccggaatttccggagagggtcgcaggtatattgtttctgtgcaattcatggttattcacgttggatgtagtgattgctgcatccaatgctatcggaaagagattaaccagcaaatggttcctcaaatcgtattgatatttacccggcgcattgagcaccaccatctgcccccgttcccacatcaaacggctggaccggaaaacgatttgcttttcatgctccgtggaaattcacgaaaaagttattgggtcattcatcgaaaaaaacatattctgctgactggagtcatcacccagaaataaacgtcaactgaacaataacgattttttctttgtgggattccatacacttttccatccccctctgaaaattagtcatcaactcaccaacacatcttctgaaatttgtattaaacttattgcttaaatagatgatataatatctcttccattgcacggaatcagcaaaaactgtcattctggcaatcttaacaagaacatttatcggttaattttatcagtaaacaaaggaatatcatactgataaaatgaacattcagggtaagatgatgaaattcacatgaaaaatgctgaagattatttatttcatgcagataaacgataaaaaacaagagagtatatttttcagtgtaagagtcaattgttcatctccactgacgatcacggtcagcatacaaacaaagtgagtcctcctgcttagtcattgcgtatcaaaaactaaaaaacaaaagattctgcaaacaacgtgacattttttatgacatttcccgaatacatgtatatcaataaacggtagtcatcgttgaattaataagtcttacagagctatacgtagcttataaaaccactcaacgaccatcatcacctgactatttagcgggagtatcgtctgtataaatccataaataataacacctgttattaaaataagaatgctgtcagccgtaaactattaacacaacacctgtccactctatctgttcttttaactcaaccggcgtcgaaaatatttcctgattagtgcatcatagtcttcttttttctttctcaaccatcaaaccaaacacaacattcacaaccacacaataaaacaaaaccaaaaacataagattaacaatgccagtcaacaggaaaacactgaatattgaggtgcgctgtaacctggacagcgcatacggcgcatgtgatcaacacagccattcttttctgtcatcccccaaatgcagaacaaacaatcataaccaaatgaatataaaagaaaatatgatttttcaccatcataaaaacatcaatgtatctttatataaaaatactgataacatgacatagacatttaaaaacataaacaaatcacaacaaaaacatttgataatcacttagtgacaaaataaaattgagacgattttgttataagagaggcgacatggagtgagataatgaataacgaacagatgcttatcaaatgcaaagatccccgtaaatgtcggttttatgccgaatatctgaatcacaaataccccaatgaattccctcagtttgcgcctgacaacccacaaaactgtatcagaaatgttaattcgtttttaaaagaaaagtattataaagattcaaacaattcttttggtgtttttggttcgactgcagaagaagctctcagcaaagaaattaatgaacttgaaattattgcagggcaggcaatactgcctgaagagagttttctctggttgaaaactgacgaacttgcgactttctttacctggactactatttatctgtcgaaggaagaccatacaaaattcccgaaaataaaccataattcatcaggaataaaaaacggaattgaagtcagaaaaatacgaacagttaccgatgaaacgttaaatacttacaaaaaaagtaaccttccggataatccatcatcccataacgaacgaataaaagtaatcatttcatattttgactcctgccattctttaattaataaaaatgcaaaaagcatatacctcgaggaactcagacaggcgtggcttaaaaagaaaagcgcttgtcaaaagtttaagtggctccttcctgacgatgatgaaatgtgtcagtggttctggacaagactgaaacaaaaacaggatgaaaaacatccagtacataacccagtgacccggtggttcataccatcttcaacgaaagaatattatcttgcctctcttgtcgcctttgctttatggaaagaagcgcctgataccattgaactgttcagaacacgaataaatcatgcctggcatcagaaaaaacaaaaggacaaatatcggagtgatggtaaaaaggccattaatatacatataagaagcaatgtgaaagaaatgcttgatgagctcagaactgtttacggtctgagaacaggagagttttttgaaatgctgattacagagaaatatcttgaacacaagcgaaggaagtaattcattacctgttacattctaaataatctcagacagatattatctccgtgaatcccccgccacctttccggtgcgcggggttttgtcttttttcaccgggaatacatgtatgaatccgtctgatgccattgaggcaattgaaaaaccgctctcctccctgccttactcactttcccgtcacatcctggaacatctgcgcaaactcaccagtcacgaacccgtgattggcattatgggtaaaagcggggccggtaaatcttcactctgtaatgcactgtttcagggggaggtcacaccggtcagtgatgttcacgccggcacccgggaagtgcagcgcttccgtctgagtggtcacggtcacagcatggttatcactgacctgcccggggtgggcgagagccgggacagggatgcagagtatgaagccctgtaccgtgacattctgcctgaactggacctggtgctgtggctgattaaagccgatgaccgggccctgtctgtggatgagtatttctggcgacacatcctgcagtgcggacatcagcaggtgctgtttgtggtgacgcaggctgacaaaacggaaccctgccatgaatgggatatggcaggcattcagccttctcccgcacaggcacagaacattcgggagaaaacggaggcggtattccgtctgttccggcccgtacatccggttgttgccgtatcggcccgcaccggctgggaactggatacgctggtcagtgcgctcatgacagcgcttcccgaccatgccgccagccccctgatgacccgactgcaggacgagctgcgcacggagtctgtccgctctcaggcccgtgaacagtttaccggtgcggtggaccggatatttgacacagcggagagcgtctgtgttgcctctgttgtccgtacggccctgcgcgctgttcgtgacaccgtggtctctgttgcccgcgcggtatggaactggatcttcttctgaacctgttgtggatgatgtcctccctgcctctgagtctgctcacaaaagcgctgttttcgttactgtctctcttgtccgtgcaatagcctgataatagaataaaacgatcgatacctattttatcgatcgtttatatcgatcgtcatgctaataataactcctgttagcaacgtgcgcagatacacacagacatgagattcagggaacaacagagccacacgtcagaaacttccgtcagccggacctccggcactgtaaccctttacctgccggtatccacatctgtggataccggcttttttattcaccctcactctgattaaggaaatgctgatgaaacgacatctgaatacctgctacaggctggtatggaatcacattacgggcgctttcgtggttgcctccgaactggcccgcgcacggggtaaacgtggcggtgtggcggttgcactgtctcttgccgcagtcacgtcactcccggtgctggctgctgacatcgttgtgcacccgggtgaaacagtgaatggcggaacactggtaaaccatgacaaccagtttgtatccggaacagctgatggcgtgactgtcagtaccgggcttgagctggggccggactctgatgacaacaccggcggtcagcagatagcccggggtggcactgccagaaacaccacggtcaccgcaaacggtctgcaggatgtcatggcaggtggcagtgccacggatacggttatcagtgccggtggaggacagaatctgcgcgggcaggcttacggtactgtccttaacggtggtgaacaatggatacatgcaggcggcagtgcatccggaacggtgattaaccagtctggctaccagaccattaaacatggcgggcaggcaaccggaaccatcgtcaacaccggtgcagaaggtggtccggagtctgaaaatgtgtccagcggtcagatggtcggagggacggctgaatccaccaccatcaacaaaaatggccggcaggttatctggtcttcggggatggcacgggacaccctcatttacgccggcggtgaccagacggtacacggcgaggcacataacacccggctggagggaggaaaccagtatgtgcacaaatacggacttgcgctgaacacggtaattaacgaggggggctggcaggtgattaaggaaggaggaactaccgcgcataccaccatcaaccagaaaggaaagctgcaggtgaatgccggcggtaaagcgtctgatgtcacccagaacacgggaggtgcactggttaccagcacagctgcaaccgtcaccggcacaaaccgcctgggagcattctccgttctggcgggtaaggctgataatgtcgtactggaaaatggcggacgtctggatgtgctgagcggacacacagccactaatacccgtgtggatgatggcggaacgctggatgtccgcaacggtggtgccgccaccaccgtatccatggggaatggcggtgtactgctggccgattccggggccgctgtcagtggtacccggagcgacggaacggcattccgtatcgggggcggtcaggcggatgccctgatgctggaaaaaggcagttcattcacgctgaacgccggtgatacggccacggataccacggtaaatggcggactgttcactgccagagggggctcgctggcgggcaccaccacgctgaataacggtgccacgcttaccctttccgggaaaacggtgaataacgataccctgaccatccgtgaaggtgatgcactcctgcagggaggcgctcttaccggtaacggcagggtggaaaaatcaggaagtggcacactcactgtcagcaacaccacactcacccagaaaaccgtcaacctgaatgaaggcacgctgacgctgaacgacagtaccgtcaccacggatgtcatcgctcagcgcggcacggccctgaagctgaccggcagcacagtgctgaacggtgccattgaccccacgaatgtcaccctgacatccggtgccacctggaatatccctgataacgccacggtgcagtcggtggtggatgacctcagccatgccggacagattcatttcacctccacccgcacagggaagttcgtaccggcaaccctgcaggtgaaaaacctgaacgggcagaatggcaccatcagcctccgtgtatgcccggatatggcgcagaacaatgctgacagactggtcattgacggtggcaggcaaccggaaaaaccatcctgaatctggtgaacgccggcaacagtgtacggggctggcgaccaccggtaagggtattcaggtggttgaggccattaacggtgccaccacggaggaaggggcttttgtccaggggaatatgctgcaggccggggcctttaactacaccctcaaccgggacagtgatgagagctggtatctgcgcagtgaagaacgttatcgtgctgaagtccccctgtacgcctccatgctgacacaggcaatggactatgaccggattctggcaggctcacgcagccatcagaccggtgtaaacggtgaaaataacagcgtccgtctcagcattcagggcggccatctcggtcacgataacaacggcggtattgcccgtggggccacgccggaaagcagcggcagctatggcttcgtccgtctggagggtgacctgctcagaacagaggtcgccggtatgtcactgacgacaggagtgtatggtgctgcaggccattcttccgttgatgttaaggatgatgacggctcccgcgccggcacggtccgggatgatgccggcagcctgggcggatatatgaacctgacacacacctcctccggcctgtgggctgacattgtggcacagggaacccgccacagtatgaaagcgtcatcgggcaataacgacttccgcgcacggggctggggctggctgggctcactggaaaccggtctgcccttcagtattactgacaacctgatgctggagccacggctgcagtacacctggcaggggctttcgctggatgacggtaaggacaacgccggttatgtgaagttcgggcatggcagtgcacaacatgtgcgtgccggtttccgtctgggcagccacaacgatatgacctttggtgaaggcacctcatcccgtgcccccctgcgtgacagtgcaaaacacagtgtgcgtgaactgccggtgaactggtgggtacagccttccgttatccgcaccttcagctcccggggtgatatgcgtgtggggacctccaccgcaggcagcgggatgacgttctctccctcacagaatggcacttcactggatctgcaggccggactggaagcccgtgtccgggaaaatatcaccctgggcgttcaggccggttatgcccacagcgtcagcggcagcagcgctgaaggttataacagtcaggccacgctgaatgtgaccttctgataattctgcattgcctctctgtggttccggtcatcatgaccgggacccggacgggggaaaacatttcagtgccacattcactggcattcacaataacatgatattcatcacggagtgactatgttacagatagtcggcgcgctgattctgctgatcgcaggatttgccattcttcgccttttgttcagagcattaaccagcacagcgtctgcgctggcagggttcatattgctgtgtctattcggtccggctttactggctggctatatcactgaacgcataacccggttattccatattcgctggctggcaggcgtatttctgacgattgccggaatgatcatcagcttcatgtggggacttgatggtaaacatatcgcactggaggctcatacttttgactctgtaaaatttattctgaccaccgctctcgccgctggtctgctggctcttcccgtgcagataagaaccattcagcagaacgggctcacacctgaagatatcagcaaggaaattaacgggtattactgctgtttttatactgcctttttccttatggcgtgttctgcatacgcaccattgatcgcattgcagttcgatatttcaccctcactgatgtggtggggcgggttgttgtactggctggctgcattagtgacgctgctatgggcggccagccagatccaggcgctgaaaagactgaccagtgccatcagccagacactggaagaacaaccggtgctcaacagtaaatcatggctgagcagtttgcaaaacgattacagccttcctgaaacgctgacggagcgcatctggctgacactcatttcacaacggatttcccggggagaactgagggaatttgaactggcagacggaaactggctactggacaatgcctggtatgaaagaaacatggcgggtttcaacgaaaagcatgagagagagcctgtcatttacccctgatgaactgaaaaccctcttccggaaccgcctgaatttatcaccggaagcgaatgacgattttctcgatcgttgcctggacggcggtgactggtatcccttttcagaaggtcgccgttttgtatcattccatcacgtggatgagcttcgtatctgtgcctcctgcgggctgacagaagtacatcatgccccggaaaatcataagccggatccggaatggtactgctcctctctttgtcgcgaaacagaaacactgtgtcaggaaatttatgaacgcccctacaacagttttatttccgatgcaacggcgaatggtctgattctcatgaaactgccggaaacctggagtacaaatgagaaaatgtttgcttccggagggcagggacatgggtttgccgctgaacggggaaaccatattgtcgacagagtccgtctgaaaaacgcacggatcctcggtgataataatgccagaaatggagcagacagactggtcagcggaacagagatccagacgaaatattgttcaactgcagcccgtagcgtcggtgcggcattcgacggacaaaacggacagtatcgttacatgggaaatcatggccccatgcaactggaagtcccccgtgatcagtatgccggcgctgttgaaaccatgaggaataagatccgcgaaggtaaagtacctggtgtaaccgatcccgcagaagcgtcccggctgattcgtcggggacatctgacttatacccaggcccgtaatatcacccggttcgggaccatcgaatcggtcacttatgatattgccgagggttcggttgtcagtctggcggccggagggatcagttttgccctgacggcatcggtcttctggctcagcaccggcgatcgcgatgctgccctgcagacagctgctgtccaggcaggaaaaaccttcacccgcacactggctgtctacgtcacaacccagcaacttcaccggctcagtgttgttcagggtatgctgaagcacattgatttttcgacggccagtccgactgtccgactggctcttcagaaggggaccggtacaggaaatatcagtgccctgaacaaagtgatgaagggtacgctggtgacatctctggcactggtagctgtcacaaccggccctgacatgatcaaaatgttgcggggacggatctccggtacgcagttcatcaggaatcttgccgtggcatcttccggtgtggcaggtggagctgtcgggtcagtggcgggcgggatactgttcagtccactgggaccatttggtgcactgacagggcgtgtggttggcggtgttctggggggaatgattgcctccgctgtatcaggaaaaattgccggagcgctggttgaagaagatcgcgtcaaaattctggcaatgattcaggaacaggtgacatggcttgccggcagtttcctgctgaccggacatgaaacagaaaatctgaacgcgaatctggcccgtgttatcgatcagaatgctctggagatcattttcgccgccggtatacaacaacgggccgcgaccaatatgttaatcaaaccactggtggtcagtatcatcaggcaacgccccgtcatggaatatgatgcatcccatctcggcaatatggttaaccggctggaagaagcattacccccggagttaccggcataacgagtattctgcaccttttacgttttatcacctgacttgtcagtgtcatcgtcatgattcagagaggtaaataccatgattcacctgttcaaaacctgcatgattaccgccttcattctggggttaacgtggtctgccccactccgggcacaggatcaacgttacatcagtatacgcaatacagatacgatatggctcccgggaaatatttgtgcttaccagttccggctggataatggcggaaacgatgaagggtttggccccctcaccatcactctgcaactcaaagacaaatatggtcagacgctggtgaccagaaaaatggaaacggaagcttttggtgacagtaatgccacgcgaaccacagacgcatttctggaaacggagtgcgtggaaaatgtcgccacaaccgaaatcattaaagcaactgaagaaagtaacggccatcgtgtcagtctgccgttatcggttttcgatccccaggactaccatccactgctaattaccgtttccggaaaaaacgttaactgatccctgaagtcagtttcatgcttcagcctctgtcacaacgcgtggcagaggctttttatttatcaggagaaaacagatatgccgggttacacagagtatgtcctggctgaaggatctttctcatacgggcaggcggttgctgtcataacagcttaccgcaatgtgtttatccaggatgacccgggaatgcatttccgtcgggttatccgcaacgcggaaggtcagcgacgctggcgctgccggaattctgaacccgatgccggaaaggtgcttaatacgcggctcgccagtgacggtcttctcagacaataaacgtcattcatttcacccatcaggccgcgtcttctccgggagacgtggctttttcatttattacaccagtaaatcttaaccaccgataaggagcaaattatgcgactagccagtcgttttggttatgcgaaccagatacgccgtgaccgtccgctgacacacgaagaactgatgcactatgtgccggggattttcggggaagataaacacacgtcccgaagccagaactatacgtacatccccaccatcaccgtactggaaagcctgcagcgggaaggctttcagccattcttcgcctgccagacccgtgtgcgcgacccgggccgccggggatacacaaaacacatgctgcgtctgcggcgggccggagagataaacggagaacatttccctgaaattattctgctcaactctcatgacggtacctccagctaccagatgctgccgggttacttcaggttcgtctgccagaacggatgcgtctgtggtcagtctctgggggaagtgcgtgttccgcaccggggaaatgtggtggacagagtcattgaaggggcttacgaggtggtgggggtttttgaccggattgaggaaaagcgtgatgccatgcagtcgctgattctgccgccaccggcacgccaggcgctggcacaggcggcactgacttaccgttatggtgacgaacatcagcccgtcaccaccgctgacattctgacaccgcgacgcagggaggattacggtaaggacctgtggagtacttatcagaccatccaggagaatatgctgaaaggcgggatttccggtcgcagtgccagaggaaaacgtatccacacccgtgccattcacagcatcgacaccgatattaagctcaaccgcgcattgtgggtgatggcggaaacgctgctggagagcctgcgctgatgcagcctgtccctgaaggcgctgccgggatgtcgttccatttctgatgatgacctgtgcgcctggtatacccgtctgctttaccgtcccggagaaatcagtctgtgcagactgagtacaggcaatggcatcaggccatccgtctgtgaccggaacggttacgcgtacggctgtccggaatttcagccgaatatcattcatccctgatattaccgggtctcacggtcagtgatgaacgtgatgttatcagccacccgacctttacttcctcgcatttattcacactacaaggatttcacatatgaaaacattgtctcagaacaccacctcttcggtctcagcaccggagactgacctgcaacaactggttgccagcctcgtccctgatgaacaacgtatcagtttctggccgcagcactttggcctcattccacagtgggtgaccctggagccccgtatcttcggctggatggaccgtctttgcgaaaactactgcggtggtatctggaatctgtacaccctgaacaacggcggggcatttatggcacccgaaccggatgacgatgatggcgaaaactgggtactgttcaatgccatgaacggtaaccgcgctgaaatgagcccggaagccgccggcattgccgcctgtctgatgacgtacagtcatcatgcctgtcgtacggagtgttatgccatgacggtccattattaccggctgcgggattacgccctgcagcatccggaatgcagcgccattatgcgcatcatcgattgaatggagagaagcacaatgcaacaactttcctttctgcccggagagatgacacccggcgagcgcagcctcattcagcgggccctgaaaaccctggaccgccatcttcatgaacccggcgtggccttcacctccacgcatgcggcacgggaatggctgattctgaacatggcgggactggagcgtgaagagttccgggtgctgtatctgaacaaccagaatcagctgattgccggtgaaaccctcttcaccggcaccatcaaccgtacggaagtccatccccgggaagtgattaaacgcgccctgtaccacaatgccgctgccgtggtgctggcgcacaatcacccgtccggtgaagtcccccccagcaaggcagaccgccttatcactgagcgtctggtacaggcactggccctggttgatatccgggtaccggaccatctgatagtcggtggcagccaggttttctcctttgcggaacacggtctgctttaacccgtcaccgtcacaatcaccttcatatcacttcagtttctctttctcagctgtttcttactttcacattcaggaggactattctcatgaaaatcatcacccgtggtgaagccatgcgtattcaccgtcagcatcctgcatcccgtctttttccgttctgtaccggtaaataccgctggcacggtagcacggatacatataccggccgtgaagtgcaggatattcccggtgtactggctgtgtttgcagaacgccgtaaggacagttttggtccgtatgtccggctgatgagcgtcaccctgaactgagtctggaagggaattctgatgagcagaattatcgccactaccggaccattcttaaccgattttctgtgaggactttatcgtgtcagacacactccccgggacaacgcttcccgacgacaatcaacgaccgcctctggtggggactgccctgcaccgtgacgccctgtttcggggcacgtctggtgcagaagggtaaccggttgcattaccttgccgaccgcgccggtatcagaggccggttcagcgatgcagatgcataccacctggaccaggcctttccgctgctgatgaaacaactggagctcatgctcaccagtggtgaactgaatccccgccatcagcataccgtgacactgtatgcgaaagggctgacctgcgaagccgacaccctcggctcctgtggttacgtttatctggctgtttatccgacaccggcagcgcccgcaaccaccgtataacaccggatatctcccctttataaccacctgttacagagaacttaagatgaatacattacccgacactcacgtacgggaggcatcgggctgcccgtctcccatcaccatctggcagacactgctcacccgactgctggaccagcactatggcctcacgctgaatgacacaccgttcgctgatgaacgtgtgattgagcagcatattgaggcagggatttcactgtgtgacgcggtgaactttctcgttgaaaaatacgcgctggtacgtaccgaccagccgggattcagcgcaggagccccgtcgcagttaatcaacagcattgatattctccgggcacgccgggcaaccggcctgatgacacgcgacaactacagaacggtaaataacattaccctgggtaaacatccgggggcgaaacaatgaaactggccctgacgctggaagccgacagcattaatgcgcaggcgctgaacatggggcgcattgtcgttgacgtcgatggtattgagctcgctgaactgattaacaaagtcgctgaaaacggttattcactccgcgtggtgaatgaacgtgacgctaccgaaacaccggcgacttctgccagccctcatcagttgccggaagacaatacagtgatacagagcgtgatgccattaaccactgaaacagcgctggatatcctcattgcgtggctgcaggacaatatcgactgcgaatcgggaattatctttgacaacgatgaggataaaacggattcggtagcactgttgccctgtatcgaacaggcccgggaggatgtccgtactcttcgtcatctgcagcttctgcaccagaaccggtaaatatcactcaccatacttcattccactgacgtcagcctgaacagggctggcgttttcgtttataaaccaaaagggaaaccgataatgtcagacatcacaatctcccgtccggaagtggtcaccgggcatacggacgttatctgctcaaccagtatccgccacattctggctgtacgaaagagtacactgctgcaaatcgacacacttatccggcaactggctgaaatatcagcaatgacagaaagtattggcggtaaagccgccccggactgggccatgaaacaggattttcgctgcggctgctggctcatggagaaaccggaaaccgcaatgaaagccatcacccgcaatctcgatcgcgaaatctggcgtgacctgatgcaacgttcagggatgctttccttaatggatgcacaggcccgtgatacatggtaccggtcactggagcacgataattttccggaaatcagtgaagcgaacattctgagcacatttgaacaactacaccagaataaggatgaggtgtttgagcgaggggtgatcaacgtcttcaggggactgaactggaattacaaaaccaattgcccctgcwaatttggcagtaaaattatcgtcaacaacctggtgaggtgggaccggtgggggtttcatcttatcaccgggcaacagactgaccgactcgtcgacctggaaagaatgctacatctgttcagcggcaaaccgatccccgacaaccgggaaaacatcactattcgtctggatggtcacatccagtccgttcagggtaaagagcgctatgaagacgagatgttcatcattaaatactttaagaagggatctgcacacatcactttcaaaaggctggaactgattgacagaattaacgatataatagccaggtactttccttctgtgctctcagcctgatcccgagtgtgattccctttcgatatcaaaagggactgcgggtataattgagggtacatttttaatcaaaccaaataaattatattaatatcaatatgataaaagaaattttcgattccgagtccggcaccactaattcttaagaacccgcccacaaggcgggtttttgcttttggatctgacaataaccttcacgaaaaaagtttgcttataaagtctgggggaattactctcgccacgttaacgagagtaattttattgatactaatctcctgatactttacccccgtccaaactccagccgctgcacattcaccatcccagtcttctcagcagcactggcatcaatttgtgtcacccgcagcgcatacttttcatccagcgcgtttaaccagttcagcaggtcattaaacaccaccggatctatccagacctgaatattctccccacgctcggctatccgcttgatgactaccgagtgcgcggaagcgctgtcactgataacccgcgatacctgcgcaggcgttgttgtggcggattttcgcgccgccataatatccggcgcggcgctcctcagtctggtgttcatcgccaccagttgctgcaacattgtctcctgttgttctatccgttcgctcaacggctgccagatgaggacgtaatatccgacgctaaacaggaacaccaccgctgccagtaacatgcccttttcacgcggagaacgccccgccaggtgttgtgccagccagtgttcgccacggcttaactggcgttcacgccattgctgaaaatagtgaataaatttatcgcgtaacatgttatttcctccgcaacgttacgccgccggaaaccgcatcaccctctttctgtaacgcgtcctgttgcacaacataatcggttgccagtgcactacgcagtttgtcgaaactggcaaagttcgcggcccgtagctggaggtgaagtatctggcgtttttgatcaaaggtaaaaccacgcatttcgatgtcggaaagtgacgctgatttcagggtgctggctatcgctgacaactcggcgagcagccgggtatcgtcggcctgtgggcgatattttttcagcgccatcgtcacctgagagcgtaaattcacaatccgcttctgctccgggaacaacgttaagaactgttcctccgcctgggtgcggctttgcgccacctgttcgctgacgctccataacgtcacgccccgctccactgccagcgcaaccagaatcagcaatatcggcagaatcatcacccgccagcgcgcccactgttttcggtagctgacgcgaggctgccacggccctgtcagcaggttcccttccggttcgccataagtggtaatggcgggcagagctgtaacggtcaggcgttcagcgtctgcgccagcccatgctgatagcttttccggtgcaatgccgactacggttagcgaaagcggtaaatcctgctcattgagctgggcgcggaacatgaccggagccagcgccagcccggcgctccatccccggcattcatcgatgcggcagataacccgttgcgcatcgcaagccataaacccacaaggaatggacatccagtccggcgcgacggtagcgcgggtgatgccgttttcctgcaaccactgcgcaatgttgcgcatatgctgttggtgaatcactgctacggttgccagttgctggtcgatattcaacggggcgaaatgcagttcatcgatatcctggttcagctcttcttccagtaaggcgggcagaatggtcggtatctgcttacgggcgacatcaggcagttcaacctgccagacgctgatccattcgccgggaatgtagagtcgaatcgcatcagtttgcagccattgctggagctgttcgttagcaacgtcagaccagataccgtgctccacatcgggtgtacggcgctgccaatggatgggatcagcggcgcaaagcgggaaaaaaatctcaaggatggaactcactcactttctcctgtctgatgccagagaaccgaaaagtgttgtgggcccatgcggacaattaacgagttcatcgtcagttcaatctcattcacggtgatatctgaacgcagccagaagtaattgctgtccacgctcaggacggtttttagctgttttttagtacgctcatcgacgtcagcaagtagcggctgtgcaagaaactgatcgacatcttcccagcccttcgccggacgttgttgtaataacgcccgcgcctgaacagggcttaaccacgggtcaaacagcgcctcaagaatcacactttgcgtgacgtctaaagtattgatgttgatttgctggcgggtcatcggcagcgcacagaccagcggtttcagtttttgataaagcccggcgtccattccctgcaccacgcgcatctcgctgatatcggccagcggttgattggcggcgtagaaaggcaccgagcgggcgagatattcgctgtcttcacggcccagacgcgtctgcacgctgcggtcttcatcaataaactcccacaggctttcggctatcagttcggcccgataagcaggcacatccaggcgcgtgatcagggcaatcagttgttgtaccgcgagcggacgcgacgccgttgtgggctgagcgagggcattcaggttaaagcaggcctgtgcgtcacgcagagtgacggcgatttgcccctgcggcagtgggaaaaaacgagggccggaagcccacggctgttccagatgcacgcgcttttcatttttcaggctcagactgagcgcgctcagcgccaggctttctgcactggcgctgtaccacagcgcctgctggtactcctgctggctgcgcgttcttcccagttgctgctgcatccgcccggaaagcgtgatggttaccagcatcataactgccagcaataccagcaccacgaccagtgccattccgcgttttggtggtgaggtgatcatgattattgcggcccgcgtaacaaccagatgcgttcaatctcgccccattgcggcgaatgcagggtcatgcgtaccgccacagggatcgcctgtactgacgaccagctctcctgccagcgcgtgccgtcgtagaactgcaaacggagcgaatcggccggaatcaacttttgcattgtcggcttcacgctgcctgcggcatcggtcagcggccaggctaaccgttcgagataaccgtcatgaatgcggtaaccgacggtgagcagattactgcgcggcagacgcatcaacgggttaaccacaccgccgcgcacaaaacgcattccttcactctcagacgccagcacgccagcgccagccagtaacgctggttcacgctggccctgatcgcctcttaccggacgcggcatcatttgggtcagatcgtgggtcagaaaactcatcgtttgctgcatgaggtttagtttttgatcgtgtccggcgacggcgctattcacgcgcgtgacgccgttagtcacctgctgcgccatcagtgccagcgaggcaaaaatggcaattgccaccaacatttccagtaacgtgaaaccagcgcgagtccttctcactgttggcctcccacggcgctaaaccaggcgcgtcgtgactgaatcaccgacgaaaagtcttcgtgaaggctgacttcaatatccaccgcctggagcagcgcgttgcctgtactcagcggtgtggttcgccagtaccagcggcttcctgccatatcgctctcgccctgctgcctgaccgcccgctgctcgcgggtcatcaggtagagcagcgcggtctggttttcagccacccagcccgctaccgttttttcctcaagaatttgctgattactcagcgcaccgctggcaatctgtaacaccgccgtggcagccagcgcaaaaatcgccagcgcgagcatcacttccagcaaggtaaatccgcgcttcatggcatcctctcatcacattgattgagggataacgcgccatcgtgtgccagctttaccgcccaacatgcgttttgcgccgccgagtagaagcgcagcgtaaacggcgtggcgggttcaaaaggcgaaaaacggatctgcggcgtcttctttttcgcctctttttgcagctcaagttcaatatcgtgcagcgtcagtcgacgacgttgcagctccagcgcatattccttctgccagatatcacttccgggttgtaacagcatctgcacctgtttcggcaccgtaacctgtgccgataaccgggtcgaggaaacgggcgaccactgcccctgacgacgctgcataaactggtagccaggcgggtcgattagcacaccgagtgttttcccttcgatcactgccctgtccttaaactgcgcaaagcgagtcagaaaatcctgcgccgcttttttcgcgggcgattcagaatcggtcgcaaaagtctgtaccacgcccgcactggcaaggccgataagaaaaatcaccagcatgatttccagaagtgtgaatccgcgttcaggcactgcttactgaaactcctgcaaattccagttaccgatatctgcgccagcgccttccccgttttcctgaccatccgcccccagggtataaacatcaaacagccctttttcacccggactgagatactgataatcattgccccacggatcctttggcagtcgtttaatgtatccaccagtacggtagttgcgggagtccgccatattggctggctgctggatcagcgcctcaagcccctgttctgtggtcggataacgcccgttatccagtcggtacatatccagtgcgttttccagcgccacgatatcgctgatggctttttgccgatcggctttctctttgttgcccaacaggttaggcaccaccagacttgccaggacgccaagaataacaatcaccaccatcacttccagcagggtaaaacctgcccgtggtttttgtgtgcgggataacgaattcatgtgataactccgtaaattacattccaaccatattattcagttgcagcatcggctcgaggatggcgatgacaataaacagcaccacgcccgccatcatcaccaccagcgccggttcaaacagccctaacgccagccccacctgggtatcaaattcccgttcctggttgactgcggcctgctcaagcatggtttccagttcgccgctctgttcgccggaggcgatcatgtacagcatcatcggcgggaacaggcgcaactccgccagcgcggcgcgcagactgcttccttcgcggacgcgatctgccgccagcagtagttgttgttcgacatagcgatttgccgacacggcggcagcagtctgaataccttccagtagcggaacactgctggcggtgaggatgcttaaggtgcgggaaaaacgcgccgtattcagcccgcgcgcaacacgccccgtcacaggcaggcgcagcacggtttgatcccagcgcaggcgcatagcaggatttttaagtagccgttgccccagcaccagaagccccagcaaacccgccagccagtaaacgccgctggcctgtaacgcgtcgctcatggcaataagcgtgcgggttgaggcgggtagcgcgtgtccgagatgatcaaactgttcgatgattttcggcaccactgccgtcagcaaaatagtgactacgcccgttgccaccaccagcagaaccagcggatagagcatggcctgcaatagacgtgatttcaggcgctgtcgctgttcggtgtaatctgccaggcgattaagcaccacgtcgagatgcccggatttttctccggcagcaaccatcgaacaaaacagagaatcaaagacgcggggatgttcgcgcaggctgtccgacagggtgtaaccttcctgaatccggctgcgcagcgccattccgaggctttttacatgcagtttttcactttgctcactgaccgcctgtaagcaggtttccagcggcattgctgcctgtaccagcgttgccagttggcgcgtgaacagcgcaagatctgccgccgccacgcgacgatgtgcgtgccgccgacgctgcaacatcccccctgacgaagtattcatccgggcttcaatatgcacggggataagctctttaccgcgcaacaactggcgggcatgacgcgcggaatccgcctcaatcatacctttggttttgcgaccattacgctccagcgcctgatagtaaaacagtgccattacgcctccatggttacccgcagaacttcatcgagagaggtttctccggcgagcactttctcaatgccgttgctgcggatacccgcagagtgttgtcggacataacgttccagctccagctccccggcctgacggtggatcaaatcacgcaatgtggcatccaccacgatcagctcatggatggcagtccgtccgcgaaaacctttgtgattacaggcgggacagccctgtggatggtacagagtgacggtacgggcgtcggtaattcccagcaggcgtttttcttcgtcagtggctggtgcgggctggcggcagtcgggacacagcgtgcgaaccagtcgctgcgccatcacgcccgtcagactggaagagagcaggaaaggctccacgcccatatcctgcaaacgtgtgatcgcccccaccgctgtgttggtatgcagcgtggaaaggaccaggtgtccggtaagtgaagcctggacggcgatttctgcggtttcggtatcgcggatttcaccgaccatcaccacatccgggtcctgacgcaaaatcgcgcgcagcccacgggcaaaggtcatgccgacgcgggtgttaacctgcgtctgaccgatcccttcaatcatgtattcgatgggatcttcaaccgtgagaatgttgcgcgaatggttgttcagctcctgcaatccggcgtacagcgtggtgcttttgccggaacccgtcggccccgtcaccagaaagatgccgtgcggtttgtgtaacagctggcgcaactgcgcggtcagttgctggctaagccccagacgctccagcgtcaggcgggcctggtttttgtccagcagtcgcagcaccacgcgctcgccccaggcagaaggcatggtggagacacgcacgtcaatcgcccggccgcccagcaacagcgcaatacgtccatcctgcggcacgcgcttttcggcaatgtccagccgcgccatcaccttgatacgcgacaccagcagcgaggccagtttgcgccccggacgcagcatttcatgtaatgtgccgtcaacacgaaaacggatcaccagactcttttcaaacgtctcaatgtggatatccgaagcgccttctttgattgcctctgccagcatggcgttgatcagtttgatgatcggcgcatcgtcgtcgctttccagcagatcttccgtttccggcagttcttccgcgagggtaaaaaagtcctcggcagaaccgagatcttccatcagttggcgagcctcggaagagtcccgctgccagaccgcattcagccgctgttcaaattcggcttcgtcgatttgccgcagcgtaaagggcgcgttcagcccccgctgcagctcctgcaaaacagagagcgatagcggatgaacgtggaggatctccagcgacgcttcgcaccatgccaccaggctaaaccgacggctgaaactgtagggcagacgcacggtgttggcggtggtttcctgtgctacaggcaccattaacgcgttctcccggcattgaggaacgcgcgaacttccggcggtaaggcctggttttgcgctggcagtaccggctgtgcggtgtgcggcatcaggcttaaaccttgctcatcacgatagatctgttcggcgcgcatatagttatatttgcgctgcgacacgccgtctgccgccataccgtcacgcagaatggtcgggcggataaacaccatcaggttacgtttttcttttttatccgccgtcgatttaaacaggttaccaatcaatgggatatcgcccagcagcggcactttcgccacgctttctcccgcctgatcgtccatcagaccaccaagcacaatcagctcaccatcgttagccagcacggtggttttcagtttgcgctcaccaaacaccacgtcgaggctggtctgtccttccaccttcgagacttcctgctcaatcaccatctgtaccgcgttaccttcgttaatctgcggcgtgactttcagcatgatgccgacttttttcctttctactgtattgaaaggattgctgttattggagccaacggtagagccggttaataccggaacgtcctggcccaccatgaagaaggcttcctggttgtccagcgtggtgatgctcggcgtggagagcacgttcgagctggagtcgtttttaaccgcctgcaccagcgccatccagtcgcctttcaccacgccaaccgccgtaccgctgaatccagaaagaagctgggcgagtgtggagagatcgccgttggtatccggattaatggtggtagcgccgttttcactgatcaccgtggagcctttctgcggtttcgcctgagaaatggctgcccccagcgtgccaatagggatctgcgtaccgttagcaaactgcattaatccggcatctttcgacgcccactgcacgccgaaattgatattgctaccttcggcaacttccacgatcaacgcctcgacgtgcacctgagcacggcgaatatccagttgttcaatcacgctttgcagcgactgcatgatgtcctgcggcgcagtaacaatcagggcattactgtgtttgctggcggcgatggagacaacctcacgcccgctaccgaccgtgccttccgcctcttctttagccgccgtgagcgtgccgctgacctgcttcagcacatcgaccagatcttcggctttgctgtatttgagatagaaaacctggctgttgccgctgcgttccatttctgagtccagccgacggatcaggcggcgcattttgtcccgcgtggccgggtcaccactgacaatcacactgttggtgcgttcgtcggcgacaatttgagatttcagcgtcgcaggctggttctcgccgctgtttttcgtcaggctttccagcacgcgggcgatttccgaagccgaggcgttatccagcgggatcacctcttcggtgcgattacccgcgtgatccacgcgctggatcacttctgtcaggcgctccacaacggaggcgcgtccggtgagcataatcacgttggagggatcgtaattaacaacattgcctgagcctgcgctgtcgatcatctgacgcagaatcggtgccagctcgcgtaccgacacattacgtaccggcactactttggtgaccatttcatcgcccgcgtagttgtcgctgccttcaccgaccagcggcagcggctcgactttcgcagcgctggatttcaccaccttcagcacgtcgttttccatcggtacgacggcatacccctgtgcttccagcaggttaaggaatagctggtaatactggcgttcattgagcggggtcatggtgcgaatactcactttcccctgtacgcccggccccataatgatggttttattaaggttagcgccgacggtttcgatgaacgatttcaggtcggtatctttaaaattagcggtgaaagtggcttcttccgcccagaccggtgaactacataatgccgctgccagcaccagcggcagtaaacgcttttttgttttgaggccagttgtcttcttacgccagaccgacaacgtaatatcacgccaaaacacgatgaatgattctcctggattaaatgcggttagcgcagcgcgatggaaatgtcgtggcgcgcacccttgcgtaaaaccgtaagttgaatggaatccattgaaggtaactgccgcatcagagcaatcattgctcgtggatcagtgaaatcctgctgatttagcgcaatggcgatatcgccttccttgaaaccgctggcatcgaacagagaacgatctgcccccggcttcactgcataaccgacaatcccctccttacgcacaggcgtaagctggatatagttaaaaattttctgcggatctttcgccagtgcctgacgcacggcagtcgggatctcaactggcgcactggcagcaggctcagcaacagcttgctttgcttcgtcactgacagcttttttgttggtcacggcaacggtggaacgctcctcttcagccagactcaggcgctctatttttccctgatagcgcagcatcacatggtcgcgattgatttcctcaatcactgcgttgtgcgagccaagcgtttcaccctgcaaatagacctgctgtttaccgccttcttcaataaccgcgccgggtctggcaccaaaggcaatcccgcgcagcaccacattaagacgcgtttctgccacaggcacaggttcgggttgttttaccggcgtggcgacgggctgatatttgccaaaccagttttgctggctgattaattgcacgtcatttttatcgaacgtttttgcatccgcacggggcggtttattcgccgatggggaaacagccgtatattccgcagaaaaggagaaatagcgccagagtgaatgcgccacttttgcagaaataataagcagcatcagccagaacatcccgcgtacaatttttcgcagatgctctttgtctgtattaaaagattgtctctggttaagagtgtgacgaatttttgtcagccattgaatgagataaattcgtgcgtcacgaaaaacaacccgcgccaatttatatctacccgacgttatgctttgactattccacaggtggtacgatccagtttccgctgatactggttacctgtacgtgtatcattaatcgttatgctgtaattaattccctcggtaatcattaatttcaccgttgggtcagcgcacatttgtcgttgatagctggttaaaaaggcgtcaggcgtctgcgtggtctgagtccccgcttcgctgataatggtcatttttaccgtcgtgccgctactttgtgccagcactaaggtatatcccgcagatttaatcggcaggttttggctgatattttgcgcctgttttttcgccagtaaactggcattttcattatggctggcacagccacttaataatcctgtaacgctcaacaatagcgatattaataccctccctggcatttgttttatcgacatggtaaataatctctaaggttattaataagagttaaaatgtcactttgataatgacgttgttatcattaaaacaatgcctgtagataaattgttgctataccgcccagacttaaacacggtccaaaaggcagtgtggttgatcctctttttgtaataacggcatatatcaggccgcagcatgatgcgattaaagcaacattgggtagcgacaacggccccacccaactacctaacgcagcgaacaataatacatcgcccatgcctaatgcttctttacgcagaactattccggctatccagcgcagagagtaaaaagtgataaaccccaccaggacgccggtgactgcatcttgtagcgtgagcgggctctgctgcgcccatgccgcaattagtcccgtccacaatacgccctgagtaaaaacatcgggcagccattggtgatcgaggtcgatgatgctcgcggcaatcagccaggcggataatatcatcaccgccagcgcccatccactttccggccagaccagactcgccagcaaaaaagcgagtgccgtcaataactccaccagcggataacgcttgctgattttcgcctgacagtcgcggcagcgccctttgagcatcaaccaggagagcagcggaatattgtcacgaacgcggatagtctgctgacaatgtgggcagtgcgaacgcggtagcgcaaggcttatttttgactgcgcactcggcatttcaccatgaaactccgccatttgttggcgcagcatgatggggtaacgccaaatcaccacattcaaaaaactgccgatgatcaatcctccgacggtagccagtatgggcatcgccacggggtattgctgaaaaacatcaaaaagcatggttaaaggttgtttgttgtaacttgccggatgcgggcctgcaggtgtatgccatatggctttcctccaggcccgataagctggcgcaacccggtgcgccttatttcatgccggatgcggcgtgaacgccttatccgggttattcagcaggcatcgaatactcggtaaccttgttaatggtttccggcccttgcttcggtttcggcagattgagtgacgccagcgtgttgtacgccgactggctcacaccgccttcgaagctcatctccgtcgctcccggcaactggtaagcattcgcgcccggattccatttcttaaagaactccgaaagatccgtctgggcgacccaggaggcacacagcatcagcgtgtccgctgcgttaccgttggattcagcacagtaattcttgccgccaaacttgtcattgctgacctcatcgccgcgtgctttacgatgcatcaactggaacaggttccagcctttcatcccttcacgctcgctgtaaaactctggcagaggagtgccatctggataccatttcttgatatcaaagtttttctctgcccattccttcagctgtgcgtacatcagcagacggtcacccgcaccgccgcgcgcccatgcctgaccgttgctttcctccagatattccggtgcgacggtaatatcgtcagcgacacggttcatcttgccgagataacgatcctgcatgtacagcgccagcacgttgttagcgacttcagttgcacccggtacagtcaacggcgtttctgcggcgttatgaccgacttcatgccagatcagccagtcgttcagcggcgtcgtcggcagcgtggtgctgttcggcgagaagctgctgttcattaccggataacccgaatgcgcatcaccgatggagatctgcacatcgttggcgaaacgatgtttgtggcccggcaagtttttataggtaaacatccggtgcttaccgtcttcgctatcacggccgtagaagtcattcatcgagctggcaaaggtatccagatcgttagcgaattgctccagtccgccagtgtaattgctggcattcaggttcttcttcggtgtggtatagacgaacgaggcagactccagttcgcccagcggggcaggggagttcagatcgtgttgccacttaccgtctttatagaacggcgcttttactacaccggtaaaggtgaagtcagctgattgcacctctttgctgtcgcccttgatgtaaatcagaccaccgtaagggactttgaacgtcaccttatcattggctttcaggtcataggtttttgtcactctgggtggacgattcaggctaacttcatgcttctctcgtcctgtcaggtcgtcggccagcgcaacagtcacggtcacaggaactgtcgcctttgactcaatgctgacttcctgctgggcaggtgcccacaggccagttgactgcatgttacctgcaaaccatttggttggagctgagtacaagttaatgttttgtgtgacggtttcgccgtttgtattcaccactcccggatacttctcaacatcaactttgatgttcagatcccaccaggaacggcccagcatcaggcgtgtcagcggtttttccatatagttgagcgggtagctcgggttcatcatgcccgctttgctgctttcttcaccataaatcatcttgttatcgatcagcgattttttcagctcagcagaacactgcgtgccaacgtatgcattgttggtgtagcagttcagaaactcagtgaacgttttaaagcccagctcgtcttctttaccctcttcataacgatatttcgtctcgttccacagccagacggacatgttttggtataaacgttccagatcaacgctgttgagacgctcaccctggaggccattggtacggaaataaagctcatgctgatacaggcgctgaatattggtgcctaaatccgcagcctgcagcatcgctttcgcagtgtcagctccaagatccagctgcgtatactgcggaacatacatgccaccggttaccggcacacccgtgcctgggcggtattccagacagttgacctcatagtgatagtcagaatccttacacacttccagccctgggaacgcgtccagaattctctgttttgccgcagccagtgactcaggcgttttgtggtcggcttcatcaataaaggcgaattgggttacctgtttaccctcaacttcttcctgccagctggcaacttccagcttcggtttgtcatcaggtttgttttcttgctgatatttccagataacttctttcgtggtgtcatcaatggtatacggtggtttaccatcgacagccggataacgctcatagacccaaattggcgttgaacgtcgttgacgaacacggtcagggtagccttgcggatcgttatttactaccgacttgttaagcgccatcgacaaacctgcggcatcaagcagacgtacaaagccagatgcgctctcttccttaagattgctcatcacgttttccatgatcagcaccgatccacctttgttcatataggcgatcaaatcggtcacatcctgctgggtcagcttcggtttgctggtatctgcgcgcagaggaatggagtaaggatcgctatcccattgtgtgacgtattcaaagccattgaggatcaacagaggaacttcatctggattcagattgccatagctggtcattggtttgaccgtgatgccagtgaaatccttgtggaacgcaaacggtgcgctatttcccagcacctgaccatgttttttgaaatataccgtgtccaggttagtacccacggtcatactggattttgcatccggcaaccagcgatcatttgacagatagcgcagcacgttctccatgaagttcttcatgtcatccgggtcgctgttgagcgtacactgtccgtctttattaacgcccccgttccagctgtagccgttcgggcaacgcaggatgctgttgtagtgtgggttaccgataaccatcagcttgccatcgcccacttgccccagcgagataaacggcaggttgaaggtggcggtttcgcgtgtcacgttctctggtcgcacaatggaaggcgcttcagtaatgtacgccagctcatttttatcccaggcgcgtttttcgccaaacgccagccagtagtttttatcattacgcgccatcagaatcgggaaggccgcgttggagatattcaccaccgcctgaccgcgcgcattacccgtgctgccatagaagttggtagagtcatggaatacatggaacttactgacagatttgtagttcgtatccacgccccacagcttgttgataacgccctgaatctggccgtcattaacattgcgcgttgtcagcgagaaccagcgagcctcgttacaaccatcggttttcgcacaaatcgcggtatcgatctctttggcctgacccgtcttaaactgctcgataaattcgttaggcagattaacgacttgctcaccttcccccagcgtcgcaccattggataacgagagattgataatctcgttaatcacgttgggatattcagcaaaaaccttgcgcacttcatccggaactacacgcgtgtgattttgtccagccttcgaatagcggtgaatcaactgatcgatatttgccccgcgaacttcatcacccagttcagtcaatgcaatagtcgacttgttaccacgcacagaaccaagctcaaaagtgtcgatgccaaaggagatggtttccccccaactaaaggaaaattccccgttttctccggttacaccacggccggaattggtgtaatagttgacaccaacaacaccatccccctgactatcgaccagtcgaccttcagagagaatgatttcagtgggttgatactgataaaactgttccgcgttagccgacacgaaggaagcgtttagatccggttttgttcccggagtggtggcgggcacgaccggtgaagtatgagtggatggcgctttatcggtcgcggcattgttttccacctcttcattgaccagctttttgaattcttccggtgccagatcgatttgcttatacagcgagtcgaaacgtttactctcgatcaccgaggagaactccaggcacacctgttctgtattcgccgggcaactgttcatggaggtgaccagcgagagcgcattgcttttcttgttgtcggaacccgccagttcttgcgcgtcctcaagactaaacgacactttttcaaccgcacgcaggctacgcgcagcttctgactgggtgtcgaaggtagcaattgtcgtgttgttccctgccacacaggtgactttgtcgcctggtgtaaaggtaaagccatcgctggattcatcattacaggtgatatcaccagttacccgcaggcttccgcccagagtcagataacccgttttcgtaggaacaggttctggctccggttctggtgttggctcaggatcaggtgtcggttccggcgtaggttctgggtccggcgttggctcaggtgtcggctccgggtttggtgttggatcaggtttcacttccggcaaagaccctgttccagaatctacaggcggcgtatcggaggaagatccggagccaccgccatcacaaccggctaacagggttgcactcaaaatagccgctaaaagcgatttcttatatttaaatttcttattcattaataacgcaagtgacaaaacaatgttaaaaaattcgtaactgggagaaatagttttatgctttatcttctttaataatttcctccattcttaagaaaacgacatcattgatagaaaacaggtgaaatttataagaataacccctatttgatgtctggctggctatttttacgaaatttcaataaacaaaaaattaacaacatttcacaacgcaactatataaattcgttggtagttttaacgattaagattgcaaaagcaacagatagaacggtgtttgctcatcaagcgaacataattaatacagacttgttttgcgtgataaaaaaaatagatgttctcacgctcttaattatttagcaggttatctgaacacaaaacattattgccgcatggataataaagcgagaaataattttcaattaataagacagaataatgtaaatgaagccggatgatattaacgatcatccggcattattgatttacgagaccaacattccagtaaacacatacgcctgcaacaacgtgatgacgccgataacgctggcaaaaatcagactgtgcttcacggtgtagcggaatagttcagattctcggcccaccatgcccgtcgcggcgcaggccacggcgatagattgcggggagatcatcttgccagttacgccgccgctggtatttgctgccaccagcagagtgtcagagacgttgatttgctgcgccgtggtcgattgcagtgaaccaaacagggcgtttgaagaagtgtccgagccggtaaggaatacccccagccagccgaggaacggtgagaaaaacgggaacatcacgcctgtacctgccagtaccagcgccaacgtggtggacatgccggaatagttggtgacgaaggcgaacgccagcaccatgccaatcgacaatatcggccacttcagactaattagcgtttcggcaaagacgccaatccctttcttgatgcccacgccgaggatgaagatagagataatcgccgcaataaaaatagcggtgccgccagccgagagagggtcgaatttaaacaccgcatccattggcgttggttgggcgacaatgggtgccgctttcaacacttgttgatgcaaatgagggatctggaaattaatcaccagtgaataaaacgcgccgcccggagcaaataacgctttaaacggcttcatggtccagatggtgaccagcaccgttaagattaaaaacggtgaccacgcacgaatgatttgccccagactatattctgaaggcacgggaccgccagaagatggcttatttaccaccatcgcacctgcggattgccccatgctgattgccgtttcggtatttttcggccgccagactttaaggaataaagcgagtgagacgatactcaccagcgccgaagtaatatccggcagttccggaccaatatagttagaggtaaagaactgagtgacagcaaagcttcccccagcaaccagcgccgctggccacgtctctttcacccctttccagccgtccatcattgctaccagccagaacggcacaagaaccgacaggaacggtaactgacgtcccgccattgcgccaatgtggaacggatcgattcccgttacctgaccggcgaccagaatcggcacgcccaacgcaccaaacgccactggcgcagtgttggcaatcagacacagccccgccgcgtataacggtttgaagcccaggcccaccagcagcgcaccggtaatcgccaccggcgcaccaaagccagccgctccttccagcaacgcaccaaaggagaaaccaatcagtaacacctgcaaacgctgatcgtcggtgatggagataaccgagctgcggataatatcgaactgaccgctggcaacggttaatttatagaggaacaccgccgcgacaataatccacgcaattggccataatccataaataaagccatagcctgcagcagcaaatgccatatcaatcggcattttaaaggcgaatatcgcaatcaggatagataagataagggttattgctccagcgacatgtcctttcagacgtaataccgcgagtgcaacgaagaagaatattatcgggatcagggcgaccagagcggatagccccagtcctcccatcggcatatacatttgggtccaggtaaccatattgttcagtctcttattatctttatatgcttgatatacttaaggttgtaataagcaaaagaggactgaactgtaaaatataggcgttatactttacagcaacagtacgccgctaacgcaattgctacctctggcataacaagtatatcgggtaagggtttctgttccgcacacgcaggcgcagagtatcgttaagatgtccatattgttgttataggcccgctagtaatgcgctacgggtatttaatattgttaaaccctgataatcgctccggttaattccgggataaatgtactaccgcagttactatcatagccccgacaataaaacttgccggggctttttttgacgctattaatgactttctttttcgcgtaaacgccaggcgtgtaataacggttcggtatagccgtttggctgtttcacgccgaggaagattaaatcgctggcagctttaaaagcacacgagttagcgaaattccccgccatcggacgataagccggatcgccagcgttttgctgatcaaccactttcgccatattctccagcgacgcctgcacctgttctttggtcagaataccgtgacgtaaccagttggcgatatgctggctggagatacgcagcgttgcgcggtcttccatcagcgccacattgtgaatatccggcacttttgaacaaccaatcccctgctccacccagcgcaccacgtaccccagaatcccctgcacgttgttatccagctcttgttggatctcttgcgccgaccagttagcgttttcagcaaccggaatagtcagcagctcgtccagcagcggttcaaattcagcattgaactcggtctgggcaatgttggcttgcacgctctgtacgttggtttggtggtagtgcagcgcatggagcgtagcagcggttggtgacggaacccaggctgtgtttgccccggcacgcagttggtcgcccttctggctgtacatgtctgccatcaggtccggcattgcccacatgcctttaccaatttgcgctttaccgcgcagcccacagaacagaccggaaagcacgttattacgctcgtaggctttgatccacggcgtcgatttcatctggtttttacgcagcatcgggccagcttccatcaccgaatgcatttcatcgccggtacggtcgaggaaaccggtattgatgaacgccacgcgattgcgcgcctgagcgatacagctacgcaagttcagcgaggtccgacgttcttcatccataatgcccattttcagggtattcggtgccataccgagcattgtctcaatgcgggtaaacagtttgttggcgaacgccacttcctgcggaccgtgcattttcggtttcacaatatagacgctgccagtgcgcgagtttttctgcacttttaaatcatagagggcgatcgcgccagtcatgacgccatcaagaatgccttccgggatttcattgccttcgctgtcccaaatcacaggaatggtcatcaaatgacccacgttgcggataaacagcagcgagcgtccgtgcagagaaatttcagagccatcggcggcggtgtaatgacgatcgtcattcagtttacgcacgatttgtcgaccgtttttctccattttctcttgcagagtcccctgcatcaggcccagcagattgcggtacagcaggattttatcttccgcatcaaccgccgcgaccgaatcttcgcagtcgagaatggtactgatagcagcttcgacgataacatcgttgatgtgcgccggatcgtctttgccaatccgcccgttggcatcaatttgcagttcaatatgcaggccgttatttttcagcaaaatgcaggtcagcgcagcggcatcgccacggtaaccgacaaactgcgccggggtacgtaacgtggtttctttaccatttttcaactggatgcgtaattgtttatcgaccaccttaaacgccaccacatcctgatagctgccgttttccagcggtagagattcatcgaggaaacgccgaacccaggcgataacctgctcaccgcgttgcggatcgtagccgctgaccaccgccccttcctgcgggatgatgtcgctgccgtataacgcatcgtacagtgagccccagcgagcgttcgccgcgttcagcgcgtagcgggcgttcattgccggaaccaccagctgtggccccgcctgactggtgatttcgctgtcaatgcccgtggtttccaccgtcacgcgctccggttgcggcaccaggtagcccagttcacgcaggaaagatttataggccgctttatcttttaccggccccggattgctgcgatgccactcatcaagcgccgcctgaatgcgatcgcgttctgccagcaactgacgattttctggtgccagatcgtgaacgatctcatcaaaattgcgccagaacgccgcagcgtccagccctgttcccggtaaaacttcttcatccacaaaacgtttaaaattggcgtcaatgcgtaaacggccctgggttatggtttgactcattgtttatctcctcgttttcgcttatttcgccaacaccgctgctgccgctttcgcgacctgcgcatcctgtgctccggttaaaccagaaacgcccacggcaccaataatttgcccatcaacaacaaccggtacgccgccttccagcgacgttaataacggcgcagtcacgaacgcggtacgtccgttgttcaccatctcttcatagcccttagtttcacgacgccccagcgcggcggtacgcgctttctcctgggagatgtaagccgcaatcggcgcgcaatcgtccatgcgacttaacgccagcagatgaccgccgtcatcggcaacagcaatggaaaccgaccagttatttttctgcgcctcttcctgacctgcggcaataattgcactcgccatttgctggctaagaatgactttagttttcattttgttattccttttcaagggcttgttctacaatttcaatccagtgacgcacagaggtacgaccggcgctcgccagatgcgtctggcaaccaatgttggcggtgacgatcatttccggtttgccgctttccagcgcattcattttgttatcccgcagctggcgtgccagatcgggatgcgttaacgcatatgttcccgctgaaccgcagcacagatggctgtcgggaacgtccgttaaggtaaatccaagacgaagcaacactttttccacttcgccgttcagcttttgcgcatgttgtagggtacacgggcagtggaaggccagttttttatcgccgcgaactgccagtttttccagcggttcctcgcgcagaagctcgactaaatcgaccgccagttcactgacttgacgcgctttatcggcatataacgcatcgtttttcagcatctgcccgtactctttgacaaacgcgccgcaaccgctggcggtttgcaaaattgcctcagcacctgcttcaatcgcgggccaccaggcatcaatattattgcgcgcccgtgccagccctttctcctgcgcattaagatgatagtccaccgcgccacaacagcctgcttcgttagctgacatgacgctgatccccagacgatccagcactcgcgcagttgccgcgttggtgttgggcgaaagcgtaggctgggcgcagccttccagcattaaaacccgacgcttatggcgcagcggcggacgcggtttagctttcaccgtttcagcaggcagttttgctctgacctgttccggtaaaaacggtcgcagcaccagccctacctgcgtcagcgcacggaagaccgccggacgcggcactacctggcgcaatccttcgcgcagcattcgctccggcagtgggcgtttcactttctgctcgacaatatcacgcccgatatccagcaaattgtgatagcgcacaccagaaggacaggtggtttcacaattgcggcaagtgaggcagcgatcgagatgctcctgtgttttaagcgtgacttcgttgccttccagcacctgtttaatcagatagatgcgcccgcgcggcccgtccagttcatcgcccagaagctgataggttgggcaggttgcggtacaaaatccgcagtgaacacaggcgcgcaggatgctgtcggcttccagcgcgcgcgcgttctgccgcatctcttcagttaattgggtttgcatagcctgctcctcaaagttccgcgtacatgcgaccggggttaaacacgccgcaagggtcgagctgctgtttaagctgctggtgatagcggaataaaggagccgatagcggggcaaagccaccatctccggcactaaagcgggtcgcatgaccgccagcgttgcgggcgatgcgatggatttgattgtcctcggctgtcgatttcagccagcgtaacgctccgccccagtcgatcagttgctcgccgggtaaatccatcatcggcgcatcgctgggtaatgaaatgcgccataaggtacctggtaacgagaagaacggcagttgttgttcacgcaattgctgccagaactgacccgcaacctcttcgccccccagcagttcacgcgccgcttttaccgatccttcgccgccctcaaggcggatccacaacgcattgtcgaagtaacataagccactaatgggtagcggctggagttgccactgggcgatttcgttcatggcttcttgcaggctgatttcccgacgcaggctcagggaggcgcgcggtcgcggtaacactttcatcgagatttcagtgagcacgccaagacaaccgtagcttccggccattaaccgtgagagatcgtatccggcaacgtttttcatcacttcgccaccaaaacgcagatgttttccagcgccggtaatgatgcgcgtgccgaggacaaaatcgcggaccgaaccgctccacgggcgacgcggccccgccagcccgcaggcgaccatcccgccccaggtggcttcttcaccataatgcggcggctcgcaggggagcatttgcccggcgctctccagcgccgcttcaatcgccaccagcggcgttcccggcacgcgcggttatcaccagctcggtcgggtcgtaattaacaatgccgcgatgacaacgcacatccagcgtttgcccggtgacagggcgacctaaaaaggctttgctattgctgccctgaatcaccagcggcgttttatcgctaattgcctgattcacctgctccagcagcgcctggctgtaatcacactcgcgtagcatcagaaacgctccagttcagggaaaggtaaatgaccgtgatgcacatgcatggcaccaaattcagcacagcggtgtagcgtgggaatgtttttcccagggttcagcaaaccatcggggtcaaacgccgccttgaccgcatggaaggtcgtgatttcatcgctgttgaactgggcgcacatttgattgattttttctcgcccgatgccatgttccccactgatgctgccgccaacttcaacgcagagttcgaggatcttcccacccagctcttccgcgcgggcaaattcaccgggttcgttggcatcgaaaaggattaacgggtgcatgttgccatctccggcatgaaagacgttggcaacacgtaaatcatattgctgcgataaacgggcaatgccttccagtacgccaggcagggcgcgacgcgggatggtgccatccatgcagtagtaatccggggagatacgtcctaccgccgggaacgcatttttgcgaccggcccagaaacgtacgcgctctgcttcgtcctgtgccagacggacgtcagtcgcgcccgctttcaacaagatgtcgttaacccgctcgcagtcttcctgtacgtcagactccacgccgtccagctcgcataacaaaatcgcttcggcgtcgacgggataaccggcatgaataaaatcttccgccgcgcggatcgacaggttatccatcatctccagcccgccggggataatgccattggcgatgatgtcaccaactgcaagtccggctttttctaccgagtcaaagctggctaacagaacccgcgccacgggcggcttcggcagcagttttaccgtcacttcggtggtcacgccgagcataccttccgatccggtgaacagcgccagcaggtcaaaaccaggtgaatccagcgcgtccgatcccagcgtcagcgcctcgccgtccagcgtttgcacttcaattttcagcaggttatgtacggtcagaccatatttcaggcagtggacgccaccggcattttccgccacattgccgccaattgaacaggctatttgtgaggaagggtccggtgcgtagtagagattatgcggcgcaacggcctgggagatcgccaggttacgcactccaggctgcacgcgcgcgcggcgaccaacggggttaatgtcgaggatctctttaaagcgcgccatcaccaacaacacacctttttccagcggcagcgcgccaccagaaagcccggtgcctgcaccacgggtcaccaccggtacacgcaggcgatggcagacagccagaatcgctgtcacctgttccatttgcttaggcagaacaaccagtaatggacgcgtgcgatacgcgctcaacccgtcacactcgtaaggaatgatctcctcatcggtatgcaggatctcaagtccagggacatgctcacgcagtgccatcagtaccgatgtgcggtcgacatcgggtaaagcgccatcaagacgctcttcgtacaagatgctcatgagtaggcttcgctttgttgtgttgtgtggcagctgatttttgcgcgctgcttctgtgaacagttattaagcgggcttttcgttttcgtctatctctttagctaccggtcagaccattttttttccagctctgtgaccttgccttggttaactcaatgttaaattgatgtaacataatcacttacgtgatgtgcgtgttttgcgagttaagaacagaaaaattggtcctacctgtgcacgaggtccgggaatgaaagatgaacgtcgccctatttgcgaagtggttgcagagagtatcgaacggttaattatcgacggcgtactgaaggtcggtcagccacttccctcggaacgtcgactgtgtgaaaagctcggcttctcacgctccgcactgcgtgaagggctgaccgtgctgcgcgggcgcgggattattgaaacggcgcagggtcgcgattctcgtgtcgcacggcttaatcgggtgcaggacaccagcccgctgatccatctgttcagtacgcagccgcgaacgctgtacgatctgctcgacgttcgcgcattactggagggcgaatcggcaaggctggcggcaacgctgggaacgcaggctgattttgttgtgataacccgctgttatgaaaaaatgctcgccgccagtgagaacaacaaagagatttcgctgatcgaacatgcgcagttggatcacgctttccatctcgccatttgtcaggcttctcacaatcaggtgctggtgtttacgctgcaatcattgaccgatctgatgtttaattcagtgtttgccagcgtaaataatctctaccatcgaccacagcaawaaaaccaamttattgatagtgtttnatgttcagataatgcccgatgactttgtcatgcagctccaccgattttgagaacgacagcgacttccgtcccagccgtgccaggtgctgcctcagattcaggttatgccgctcaattcgctgcgtatatcgcttgctgattacgtgcagctttcccttcaggcgggattcatacagcggccagccatccgtcatccatatcaccacgtcaaagggtgacagcaggctcataagacgccccagcgtcgccatagtgcgttcaccgaatacgtgcgcaacaaccgtcttccggagcctgtcatacgcgtaaaacagccagcgctggcgcgatttagccccgacatagccccactgttcgtccatttccgcgcagacgatgacgtcactgcctggctgtatgcgcgaggttaccgactgcggcctgagttttttaagtgacgtaaaatcgtgttgaggccaacgcccataatgcgggcagttgcccggcatccaacgccattcatggccatatcaatgattttctggtgcgtaccgggttgagaagcggtgtaagtgaactgcagttgccatgttttacggcagtgagagcagagatagcgctgatgtccggcggtgcttttgccgttacgcaccaccccgtcagtagctgaacaggagggacagctgatagaaacagaagccactggagcacctcaaaaaacaccatcatactgctggaagacagattsgcaatatttccattcctattaatattctgctggatgtcaaaacccctgcgcaattaatggaaactctacttccatggctggagaataaataatggggctatacgataaatatgcgcgccttgctggcgagcgactgcaatttagtgacaacgggttaacaccgtttggcacctgtattgatgaagtgtattccgccaccgaaggccggatcggcaataaaaaagtgattctggccgggaccaataattatctcggtttaacctttaatcatgatgccatcagcgaaggtcaggccgcgttagcggcccaaggtaccggcaccaccggttctcgtatggcaaacggcagttatgcgccgcacctggcgttagagaaagagattgccgagtttttcaatcgccctaccgctatcgttttttcaaccggttataccgctaatttaggcgtcatcagcgcacttgccgaccataacgccgtggtgttactggatgccgacagccacgccagtatttatgacgcctgttctctcggtggcgcggaaattattcgtttccgccataacgatgctaaagatctggaacggcgcatggttcgcctcggtgaacgggcgaaagaggcgattatcatcgttgagggcatctacagcatgctcggtgacgttgcgccgctggcggaaattgttgatatcaaacgtcgtctcggtggttatttgattgtcgatgaagcgcattcgtttggcgtgttaggcgcaacggggcgcggactggctgaagctgtcggcgttgaagatgatgtggatattatcgttggtactttcagtaaaagtctggcctcgattggcggttttgctgtcggttcggaagcgatggaagtgctgcgctacggcagccgcccgtatatttttaccgcctctccttctccgtcctgcattgcgaccgtgcgctcgtcgttaagaactattgccacacaaccagagctgcggcaaaagctgatggataacgccaaccatctgtatgacggtctgcaaaaactgggttatgagttaagttcacatattagcccggtagtgccagtaataatcggttcgaaagaggaaggtttacgcatctggcgcgagcttatctcgctgggcgtgtatgtgaatcttatcctgccgcctgccgcgcctgcaggcatcacgctgctgcgctgtagcgtaaatgctgcccacagtcgtgagcaaatcgatgccatcattcaggcatttgctactctgaagcagtaatgtgagcccgccgtggtgttgtgccacggcgggtttaatgttgcctatcaaatagatacaccagaatcaacgccgccagcacaaatgccataggtaaaccgagtgcagcaacgggcgcactcagcgcaaataataatcccagattgaccattatttggtagcttatccaggtaagtaagccaacgatgacgcctacagcaagacggctgcccatccccggcgagcgcggggcgctaaaggtaaaaggcactgccagcaaaatcatcgccagggttaaaatgggatgccccagcttttcccacaatgccaggcgatactcactgctcggttgtccggtttcctgcaagtaattgatgtaatggttgagctgacgaacggaaaagctattgcccggcatcgacagttcttcaagattcatactggtgaatgtcgattgccaggcaagattatctaatatttccagcgtttctttgccattcagccattttttatgattcacaccatgcagaatccacgttttgtcgtcttcaatggtggcactgcgtgcataaatgtaggattcgagcgagagatcgtcgcgataatgaaatatctccacgcccacaggctggccctgttcattcagcgatttcaccgtcacaaattcattaccgcgcctggcccacagcatattgccggtaatatcatcgtcctcccccaacgcggtggcggtcgatttgatttgcaacgcctgttgctgcaatggcgacgccacccactcatctatcgcgcctaacgaaacagtccacaatatcccggcaaccagcgccaccagtgcaatacggaagatagaaaaccccgtgctgcgaatggcggtaagctcactgtttttcgataactgccccagtccaacaataccacccaataacgcgataaacggcgaaagttcgaccagtgtgcgcggtaaggtcattagcaccaccagcaccgcctgagtccagcgataaccgcccgggttgacatcatccagttcgttaatcaggttgaaggtggtaaaaagcggcagcaatagccctgcggcggcggcaaaaccgagaaagagatgacggattaaatagcgactgaaaacattcatcgggaaaatttctgcagcaaagagaagtcgcgtgcgaccagcatcagcaggcccattagcatgagtccgggtactaaccacaaaccaggaatgaggggaatcgcgccgttagccaccagcgtacggcagacgtcgccgccataaaaaatggcaataaacagcaacgtcagtggcaataatgttgaaaatcgcccttgccgcggttttacccgacttaatgaaatggccagcagcgccatcaacaatgctgtcaggccacggctttgtcgccattgcagttcggcatgatcggcaggaaaggcggagcgcgccagctccgtgaccgattttgctttgcgtttgacgttagggctttgatccagcggattcagatgtaattgcagattacggtagatctgttcgttgtcgtcacgcccctgatgatcgagaagataggcagtgccgttgtgcaacataacggtcggtttctcgggtgatgggtcaaccacatcaaccgaacgggcgcggaaaatgcgggttcgattggcagtagaagtataaatcagcgcgtcagtcaggcgattattatcctgatcaaccgtctgcgaaaggatcattcgtccgttatcgttagtgttaaatttctttgcccgcaactggcgaacatccagctccgactgcgactgctgctccagttgataaatctgcgtataagcccacggacgaccatacatcgacagaagggtgacaaaaatacttagcggtatcgccagataaagaacggctttgtacaagcgtcccggactgcccccgccgcagagatagcggtaatttccgagtcggtatacatctgccctagcgtcacgccaactgacacatacagaccaacaggtaacaacatctccagtgcaatcagcactttgtagaaaacgatatccagcacaacatcaagagctaatgtcccatttgccgcttcggtcagataacgctgtgcggagtagctggcgaaaataaagatcagaaaaccgacgataatcagcaccagacggcgcgtaccacgcatgatgtagtgttcaaccagcttcatctcactaacgccctcaatcctttgaattttttattcattgatcagtttctgcgccagcgcaatgacatgatctacctcttccggcgtcaggctgccgtcctttgcccactgaatttgcccggctttattcagcaccagaatggttgaactctgctccggcaagcgccaggcaacgcgtccctgtccattgccgtcaataatgaattgcgcccacggatagcggcgtttatttttttcgattttgccaacaacaaaatagccagtaccaaagatggcatcatcggtgttcacaatggtggtgggctgaaaacgatcctgcggaaagtttgccgcttcaaccgctttaattaacagtgagttctttttcttcgccgacttacgcccggcgatatactgaataatgcggacttttcccgctaattgtgtgctgttccacttttggtagtgaatttcgtcgtcgctattcagaagcagctcgccgccttcctggatataaacaggggtaaccgttttgccagtgacgaaattgtgtgcctgcacacccggggctaaaagcatgataatcagcgcaataatcaaacgagatgacatcattgctccggttatagcggaaaacgcgaaatcagcagctctaagcgctgacgaatatcgctatccagcgccaccggtgcatcatacgactggcggttttccatatcatccgccaccatgtcgtcgtgtttatctcccatcaggccattaatggcggcgaggaaacgggaaatctgtaacgcctctttattttcaggatcaagcgatcttaaggtgtcgtaataagaaacctgttggctgatgatttttcgcacatcatgaaattccctgccggttagtcgcggtttggcaataatctctttcagggtatgcatttgcttttgccgataggcaataaaactgcttacgctttctaactggctatggcgtaatgaatagttcaccaacgaccagaccggagagcttaaataaatccgtaacaggttgccgtaatacgacacaatatttttcttaccgttacgaaagccgtcctgaaaacgccccagaaaaacggtcgttttgccgaataaaaatccggcctgatgcttctttaaatacagccgttgcgcaaaacgcaggtgcttgtagcgcgctcgcatgtatttaaattgtttgcgctcatcagcagtcagctcatcgcctttggcttgtttgcgaactaaacgcagtaattcctgacgatcaacgccattgagccagaattgcaggcataacgcgtaattatcatgaatgatttcggtggtacaacttagtgcaatagtcggcggcaaactaacctgtgcatcaacgacatcatcttcttcaatcgcaacaaatagacgctcgctcgcctcaagcgggaaatattttctcatcatcaggatttctctccggctgcgttataaagcaaggaatggcgctgaaaaaatgcctttaaggttggaattaacgagagcgccacgtccagacattgcccaccgaagtaagcaaacgctgctcccagcacaccaaacagatgacagaacatgaacagcaatacgatgtagccgattgaggcgatggtttgcgccacgagaaaagcgcgctgttttcccgccatcaatagcaatgactcctgagggaagcccagcatcgaaatcacaattgcgcccagcatcacctgaatcaggtcatacgcttcgagatacttaacgccaaacaccagcgaaatgagcggcttgccgacgataaacaccgcgagcgccaccagaataccgattccgcccgccagtaaaccggacttcacacctaacaaccacggtctggtggtgcgcggatctaaacgcatcacctctgggtaaaaacttttacccagcaaacccgctggcgttccggcggcgtcgaagaatgtcatggcgattttaaataacccggcggcagcgggtcctaacacgatccccaccagcactgtgctgcacgagttacgcgccgaccagatggagtgggcaatgttggttgaccagacaaaactccacgcgcctttgatgtgtcgggcagactcaaacagattcaatttgaaggcattatggatatttctgcggcgtaattcgcgcgctgcaaaccaccagtacatggtgccgccaaccagattcgacacgtaccaggcaataacaaaacccgcaaaaccaaagtcaaaataccaggctacgacgctccccgctgcgcgcagaaaaggtttcgtcgcctgctgtacagcaattaaatcgaagcgatctaccgcacgcagaatgccggtcggcgtggaggaagccattgaaggaatgagcgtgcaatacagcgccgccagccaaaagctttggtcatccagacctaatgaatgggaaaggaatggcagtaaggcaatgccgccgacaatcgccaccgcgccgctgacgatatccagcgagaaggaaaatgagacgacattgcgaaattgctgcggattattgttggtcaaggctggcgttccgtactgaaccaccagttgccatgtctgaaacttaataaaatcgctgatcgacttggcgtacgattgcacaatcaccagtacgccaaacatggcgggcgtcatccctttaccggcacacgagagcgccaacagacccagcaaggcgctcacgacattactggagcctaaccaggcgctattgcgaataatggtgcgaaacgcgccatctgcaaaccaatgtttgatgttaaaacccgccaattcagcctgaccttatcgttgatagtaaaaagtatcccgccagccttaagttaaacttcggcggtcagaaacgatggcaaccagagaaaccgccttctgtgcctgttccagcacttcgctgtagggcgctctggaatcaatctcaagaatttttgtgccgttatagccaatcgtcgacatgacgccgattttgtcctgcagctcggcatagtcatggtcaggcttgcgggagatggcagtctcaatatcaatgcccaggcgaataattaattccgggcgatattgcgccatttgttggtataaacgccgttcgcgctgcgccagaaacatgctgattttcccggtcgcacgttcgacgccaatccccggtccatcataataaaagcccgaaatttcagcctgcgggaagcgatcgctgaccaccagaacgccactttgcgccagtcgctgaaccttgcgtagattcgccattcttcgcagcgagaagcagtacataatcaccgccgcccatagcgccggagatttggttttcatgctttgggttttcgaggatttggccgccagtcgccgttccagccagacgccaaccaacggcaatcgtttgattttgtcgccgtcttcgccggagagcagccccagatagcgccgctcggtttgccagtgttgttgcagcgatttcaccaggtcggtggtcagtgtggatttaccggtgccatcacacccgaccaccgcaatcagccccggaatgtagttgggctgcggcgcggttgtactattaacagtttgagtttgtagtgcatccattcgttaaatcatcccctatccattttggtgatcaggaaagcgcggcgtgaattgcgcgtagtgacgcttgcagaatttcatcggcggggtgtcgcccatccagttcaaggatctttgcgccattgaatgtcagttgcggcgtaacggcgattttttcctgtaacgctgccagttggtggtcaggtttacgcgcaaacgcggtttgttcatcaatgccaagacgaatcaacaatacgggcaaataagatgccatccattggtacagcttcagctcgcgctgccttaacatttttatccaaccgttaccgcccgtggtttttgccaattgcgggccatcaaagcgaaaacccggcacttcaacctgcgggtagcggtcggtgatgagcagaaagccttgctggcttttacacaacattttgcgaaacttgtacgcccgccagcaggaaagcagatagataaccagagcagtaatattgccaggcggtgttgagggcttttcgtgcacatgtgccgctttacttcgcaaataacgcccaaaaggtgcgccaataacagggagctgtgaaatccattcgccaattcgcccggacgattgcccgagataaatgtgttctgctggcattcttgctgccagttcatttaccaggctagccgtgagggtcgatttacctgaaccatcacatcctacaatggcaataacacgcactggcgtggaattaattattgacatatcacgttgattcacgaaaaacccggcagtaaataatgtattgaatattacgtggtccgtgctcagaatatccgttcaaccttattgtgacaatggttaattgtgacattgacctgaattacgctttcataaaaacatattaaccaaataaatattttggatggatatttaaatttaaggatatattcatgcagtcaataacacctccattaattgccgttattggtagcgatggttcaggcaagtcaacggtgtgtgaacatcttattaccgttgtcgaaaaatatggtgctgccgaaagagttcatttaggaaaacaggccggaaatgtcggtcgtgcagtgacaaaattaccgttgatgggaaaatccttacataaaacaattgaacgaaatcaggtgaaaacagcaaaaaaattgccaggaccagttccggcgctggtaattacagcgtttgtcgcccgtcgcttactgcgctttcgtcatatgcttgcctgtcgtcgtcgcgggttaattgttctaaccgaccgttatcctcaggaccaaattcctggcgcttacgatggtacggtgttcccacctaacgttgaaggtggtcgttttgtctcatggctggcaagccaggaacgtaaagcgtttcactggatggcgagccataagcctgatctggtcatcaaactcaatgttgaccttgaagttgcctgcgcgcgtaagcctgaccacaaaagggagtcgctggcaagaaagatagccataacgccacagttaacctttggtggtgcacaactggttgatatcgatgccaatcagccactggaacaggtgttggttgatgcagaaaaagcgattatggattttatgaccgcgcgtggttatcactagccaaaaatggaaatgcccgatcgccaggaccgggcattttcaggaaggttaaatcaactgcaatgctatccagtacagcccaccagaaagaaaaatcgccgccggtaaagtaaatacccacgccatcaggatgctggttaccgttttacgctgtaacccaccgccgtccaccaccatcgtccctgcaactgcagacgagaggacgtgtgttgtggagacgggcatcccaatataactggcaagaccgatagacactgccgccgtcatttgtgccgccatgccttgcgcatacgtcatgccgcgcttaccaatcttctcaccgatggtcatcgctacacgacgccagccaatcatggtgccaatgccgagcgccagtgctaccgccatgatgatccacaccggagcgtactcaatggtgcttaacatatcgctgcgcagttttttcagcaggttctggtcttctttactgacgcctggcagtttcgccagcttcgcggaggtatctgagatgcacagcataatgcggcgcagctggctgcgctgactcacgcttaacggctcgtaactttccatattgcctggcagcatcgttttaacgcgcgcaatcgcatcaaaggtatttgccggatgacagtgaaactctgttacttgcgcgccatcagtcgatgccgcaggcaatggaggttccatcgcaatcaacttctgcggcagttcaggatgctgttgcagatagtgttcgaagttggagacggcatcgcgagtacgggtaatttcatagccggacgcgttcatattgacgacgaagccagcaggggcaatccccaccagtaccagcatcaccaggccgatccctttctgcccgtcgttcgcgccgtgcgaaaacgccacgcccgcagcggaaacaatcagcgcaatacgcgtccagaatggcggtttacgtttgccttttttctttttgcgatcttccggaatgcggtgaatacggtcacgctttttcgtcccgctccagaaacggcgcagcaggaaaatcagaccacccgcaatgaccaggccgacgataggggaaacaatcagcgaggagaaaattttggtcacttcacgcaggtttaacgcatccatcaccgatgagccggttaacagcgcgttggttaaaccgatgccgataatcgcgccaatcaaggtgtgcgaactggaggccggtaaaccgaagaaccacgtccccaggttccatataatcgccgccagcagcatggaaaagaccatcgccagaccgtgggttgaccccatattcagcaacaaatcggttggcaacatatggacgatggcataggcgacgctaagcccgccaagcaacacaccaaaaaagttaaaaaacgccgccattactaccgcaagatgcggctgcatggcacgagtataaataacggttgccaccgcgttcgccgtgtcgtgaaaaccattgattgcttcgtagaacaacacaaatgccagagcaagtaataacaaaagccccgtatatatatcaaggccaacaaataaatttagcatatattagattacgccattttgaatttacgaacggacgcattatcagtgactttcacggcgtgggcaaagtgaaatatcatcttttaacgataaaaagagtgttatttcttgtgtatcagacaataagcattcattcaaaatctttagaaataatcaaaacacaggtattccactggttaatatattcacatatgaaatgaataaatattggaatatataaatattgaatattttgattaatccccgtactgattattcttcataatcagtacggggttgctacaacatgtattactttttcaccacaattaacggttcaatatcactctctttttgatgaccagtgattcatcaccgcgcaaacacgtcccaccgtagttgccgccaacggtgaaggtacatacctgaatgtatttaccgtccactttcggcaaacaccacagttgctgatagatgtttttctgctcggcaaatttaccgctggttttgtccagcacctcttcatgatggctgacgaggtcgatattgctgccacagcgaccggcgatcggtttcactgcgtaacctgttttcaccagttcatcattaacagtgaaatcggtatccagcaggtaacgatggtgcgggaacagcgaccagaggatcggcagaatcgctttgttgccggggatcaccgtccacagcggctcaaagaccagcacttccgggcgcagcaatacgtcgataagacgcacttcgttttgcggatgaccggtacggattggcaccgcagcaaactcacggtcgctaacttcacgaatctgatcaaacgcggtttcccacgcccaggttttccacacgcagttaaccagccgtccttccccatcaatcagttgcccggcagcatcccagcccagttcatccagcccgcgcaagatacgcgtttcaaagcccgcctggtgcagcgcctgctccataaactgcgcgtgatagttttcctcgatatctttgtcctgcatgatatggacaaacggacgtgcacgactgtgtttccaggcaccagccagttcgttaatcagcccttccgccggattgaagccgttgcctttatagccctgctccgcccaacgttcgaggatcaagcccgcttcggtatgacatgaggcagagtcggcgttgtactcgtaaaccttcagaccacgctcatccatgcagaaatccatacgaccggtgatcatatggtgacggcgacgctgccaggagagacgcaaacgtggccagaggattttcgggatgtcgaacagcgctagcaggttgtcatctttcagcaccttgtcggttgcgtgaagatacatcaggtgcagctcgttggtggctttaattagctcctgctcggcactctcggtaatggtgtagtaatgataaggatcctgattgatcacctgaccgttggcctgcacataggcgttttgcagcggatctttttcatccagccatttaccgtcaaactggcctttgttttccaggcgcgctccgctgattttcagcagctcgcctgcaatttccggctgcggtaagctgtattcagtatcttccgtctggatcatccagcccagaatggtggtgtcatcaaaagtgtctttcagggtatagcagccgttttcgaccaccatctccagctcacgcgtccactgttgcccttgcggcaacggggaatgaatcacgttctgttccgcaatacggactttgttgccatgcaattgggtaatgatggcgacatggccagtgtctttaaattcaccgcctttatcccagataagaagcgcacccgcgaccggcgcacgcggcgagccgttaggaaatgcctgcaatggcaggatgttgtcattaaccacttctcgcaggaagcgcagcgagaaaatctcccacgccatacccacgtcagtaaagaccacaccgtaattcagaaagagaaaacggcgagcaaattcaacgcattgccacttgtggcccatatattcgtcgtcgatatagctacggaatacggcgtcatcttcgtattcctgcggatcgagagaactgtaatctgaagagtagattgctaccccacctggggcgtagcccaataatgtcccgaacggggcatcctggctggtcgttcctttgctcatcactttacctttaacaatacaacctaagcagttggcgtaattgttgtgctctgattacctgctcagcgacattaaccggacagaggtcagactaatcatacacctcatcgcagcggctggcgcaaagggttaaaaaattcacattctgtacagcaagtgacctgctacactgcttcaacactaccactcagaaggcaactcactatgacagacaatacttatcagcccgcgaaagtctggacgtgggataaatccgctggcggcgcgttcgccaatatcaatcgcccggtttctggtccgacgcatgaaaaaacgctgcccgttggcaaacacccattgcaactttattcgctgggaacgccgaacggtcagaaagtaacgattatgcttgaggagctgctggcgctgggcgttactggtgcagagtacgacgcctggctgattcgtattggcgatggcgatcaattctccagcggctttgtcgaagtgaacccaaactcgaagatcccggcgctgcgcgatcatacgcataatccgccgatccgcgtgtttgaatctggttcgatcctgctttatctggctgagaaatttggctacttcctgccgcaggatttggcaaagcgtactgaaacgatgaactggctgttctggttacagggcgcggcaccgttcctcggcggtggttttggtcacttttaccattacgcgccgatgaaaattgagtacgccatcaaccgctttaccatggaagccaaacgtctgctcgacgtgctggataagcaactggcgcagcataagtttattgcgggcgatgagtacaccattgcggatatggcgatttggccgtggtttggcaacgtggtgttaggtgatgtgtatgatgccgctgagtttcttgatgcgggcagttataagcatgtacaacgctgggcgaaagaagtaggcgaacgtccggcggtgaaacgtgggcgtattgttaaccgcaccaacggaccgctgaatgagcagttgcatgagcgccatgacgccagtgatttcgagacgaatacggaagataagcgtcaggggtaagggttggtgttcgtcgcagcaagccatccaggccggataaggcgttcacgccgcatccggcaatcgtgcacaatgcctgatgcgacgctgccgcgtcttatcaggccttgtattatccctccagtgcagagaaaatcggccagttttctctgcctgcagtccgcatgccgtatcgggccttgggttctaacctgttgcgtagatttatgcagcggactgcctttctcccaaagtgataaaccggacagtatcatggaccggttttcccggtaatccgtatttgcaaggttggtttcactatggaacatgaacttcattatatcggtatcgacaccgctaaagagaaactggatgtcgatgtgttgcgtcctgatggtcgtcatcgcaccaaaaaattcgctaacaccactaaagggcacgatgagctggtgagctggctgaaaggtcacaagattgaccatgcgcatatctgcatcgaagcgaccggcacctatatggaacctgtcgctgagtgcctttacgatgctggctacatagtgtcagtcattaatcctgcgctggtaaagctttcgctcagagtgaaggactgcgtaacaagactgataccgtggatgcgcgcatgctggcagagttctgtcgtcagaagcgccctgcagcctgggaagcgcctcacccgcttgaacgcgcgttgcgtgccctggtagtccgccaccaggcgctgacagatatgcacacgcaggaactgaatcgcactgaaacggcgcgggaagtccagagaccgagcattgatgctcaccttctgtggcttgaagcagagctgaagcgtcttgagaagcagataaaagacctgacagacgatgatccggatatgaaacaccgcaggaaactgctggaaagcatcccgggtatcggagagaaaacatctgcggtattgctggcttatatcggtctgaaggaccgcttcgcccatgccagacagttcgccgctttgcgggtctgacaccacggcgttatgaatcaggtagcagtgtgagaggggcgagccggatgagtaaggccggacatgtgtcgcttcgcagggcgttgtatatgcccgcaatggtagccaccagtaagactgagtggggacgggcgttccgcgaccgtctggcggctaatggcaagaaaggaaaggtgattctcggcgcgatgatgcgcaagctggcacaggtggcgtatggagtgctgaagtcaggcgtgccgttcgatgcgtcacggcataatccggtagcggcgtaaaaatcgcggaagggatgaaaaaaacagcgcctgacggcgctgtgtctggcatgcctgcaatccgggaaaccggaccaggaaaaaacttgcaggccataacagtatctacgaaagctaatcatcatgcgctggtaatgtcgtaatccatttggcgcagtgcgtctaatgtggctttggcttcatcttcgtcgatgatgctcatggcaaatccgacgtgtaccagcacccactggcccagtagatcggcagggttaccttcacaaatcagggcgatattcacatcgcgcttgataccacatacttcaacctgcgcaagctggtgaatatcttcaccgacagccagcacctggcctggaacgccaatacacattattaactccggttattcaacttcaatacttttgacgatcagcgaatcgccggtatcgacacgcaaccgctcgccgtgacagagcggacactgcgcatcgtgctgatgaatctccaccacctggctgcaatcccagcaccaagcctgggcgggtttatagacgatatgtaaatcgcacccttgcgccaccgttccgtggcagacaatttcaaaactaaaacggacggcactctcctcaacgcaggagagcgcgccaatttccagccacacggcggtgacgcgcttaacatcgtgctgctccgcctgccgttggataatttcaacggcgctctggcaaagcgacaactcatgcattttcgccactcctgcgaccaaacagcagggcgcgacgccctgcgtgtggtacatccggattcgtgactggcagcgaaaggatcattcgtgcgcagtcatccgtcaggcgttggccctcttcaatcgacatactgtgcgaaagcggtgacatcagcgaacaggagaggtattgcgaaacaccgtccagttcgccaacggtaaaggtcatggtgccatacggcagttgcagaccaattttttcactcactttgcgcagcggccagagttgatccgggccggggaagataactgcactcagcatccacggggtgatcacacaccccgtccactgaccttcgaacagcgtaaaatcagaaacatacaccggcattgaaggatgcagaaaagagagatcgtgcatcgaacgccgggcaatttcttcaaacgctgcctgtacttgcgccttcggggaggtctggaaacctgctatctcttcagtcatgaatcgcctcccgtgggatggcttccacgcctgattcgcgcagcgcagccagaacctgctcaagcgcaggttcaatcattgcttcaaccgtcggcgttaagccgatgtgtggctccagcgattccgggatcacgccgaccagggtcagctttttcggaaactcgccggtgaagcgcagggccgacaagacgtcggccaggccaagctgatgcggagagattttgttggtaaacaacgccggaacttcttcatcccgcaggatcatcatcgttcccggcgcgctcttcttcgacacaatggcatccgcaataatcagatgatcgcgatttgccatgtcgccaagcagctccattcccgccgtgccgccatcgaggatctcaacataatccggcagaatgtatcgttgctctaacgcttcgacaatccgcacaccgatggcttcatcggtcagcaaaatattgccgacccctaagactaaaatacgcattacagaaccttcactgaaaccacttcgttgccgtcggcatccactacgtgtaccgcacaggccatgcacgggtcgaaggagtgaatggtacgcaccacttccagcggtttattcggatcagcaaccggtgtacccaccagcgactgctcgtaaggaccgacgtcatcattgaagttacgcggaccagagttccaggttgatggaacaactgcctggtagttgctgatgataccgtctttgatcaccatccagtgagagagcataccgcgcggcgcttcgaggaagccaacacctttgaactcacccgttgccggaatgttcggtttcacaaaggtggtgtgatcgcctttgccgatattggtgatcagtgcactgtattggttttgcaggatatcctgcaattcacagcagtgaacggtacgaccaataatacggcccagcgtggagtgcagctgtgccacttccagcgtgttgccagtcagtttctgataaatcgcaacgatttcattcagtttgttctgggtagattctcgacctgccgccagtttcaccagcatattagccagcggccccacttctaccgttttgccgtagaaagtcggtgatttcacccaggaatatttcccgtcgtcagaccaaccatcataagccggaatggtggtaccttcccacggcgcctgtggcgcttcgtctttataccaggagtgcttcgcgctttcctgaatgcctttgatcaggtattcatcggaatgagaagtgatcggacgatacgaggacagatccgcattctcaatgtagccgcccgggaacaggaagctgccgtttttgctgtcggtcgggaattccggcacgctcaggtagttcaccgcacctttaccgcgcgtcagccattccgggtagaacgcggcgataaccgcggtatcaaccttataaacctgctcaacaaagtcgctcagtttgtcgatgaaagacttgatgtacatcaggcgctcaaggttcaacacgcccaacccgtcgaggttgattgggttcgcgacaccacccactgccaggttctgaatgtgcggcgttttaccgcccagcagcgccacgacgcggttagcgtcacgctggcactccagcgcctgcaggtagtgcgctaccgcaatcaggttcacttccggcggcagtttcatcgctgggtgaccccagtagccattagcgaaaatacccaactgaccgctggcaaccagatctttgatcttgttctgaactttagtgaactcttccggactgttcagatgccaggtcgaaacgcctttcagcatttcggaggctttggttgggtcagcttgcagtgcagaagtgatgtccacccagtccagcgccgaaagctgatagaaatgaacgatatggtcatgcgtggtgtgcgcagccagaatgatgttacggatgtattgcgcgttaaccggaacgtcgatattcagcgcactttctgccgcacgaacggaagacagcgcgtgagtggtagtacatacgccacagatacgttgcacaatcatccatgcatcgcgcggatcgcggtttttcacgatctcttccatgccgcgccacatggtaccggaagcccatgctttcgaaacgacgccattttcgatttcgcaatcgatgcgtaaatgcccctcaatacgggttaccggatcaatagtaattctctggctcatgctttgctcgcctcatgacgattatgatcgttttgttttaaaggaggaagtatcggcagtagacgaatgagtacgatgtaagcgcaaatctcaatagccacaaaaccaatagaaatcaacagttcttcccaggtcgggaagtaggcgtaaccgccgcccgggttgaatgccaccagcgaataggtcagacgccaggttgcacaacctaacagtgcgctcagtgctgacaggaacagcatgcgggaatcattacgcagcttcgccacacgcagaacgaccagcgggaagagcatcagcaggacttcaatccagaacatcacggagtagaagtcaccggcaaacgctaacgacagcttgtcgcgatagataagctcgccaaagcgcagcacgatgaaaatcgccagcaacacactgatggtgttggtcagcttaacaaacagactcttttcatccggaccgttgccacgcagacccgcctgcaccagcgaaccttcaaagatgacaatcgagaagcccatgatgaacgccgtcagcagcgagaacagcggcaacatttcatagctctgccacaacggatgcaccttgtagcccgccgagatcatcagcgaccccattgaagactggtgcatggtcggcagcagcgcaccgagcgcgatgatgaagaacatcaccttgtttagtcgctgtagcgacaccttccaccccagacgttcaaacagtgccggagcaaactccagtgccatcacgccgatatagatggtcatacagaccgccgtctcgaacagtaccgagttcacgttgaagtgacccggaatgtagaagtacggcaggttccagtagcgacccacgtcgatagtgatcgacaagccacccagtgagtaaccaaacagactcgccaacagcgccggacgcaccagcggatggtattgcccacggttaaagacgtataccgcccacgccagcgcccagccgccacaggcaaagccggtgccaatcagcaggtcaaacgcgatccacacgccccacgggaagccgccgttcaggtcagagacagagcccagaccgaacaccagacgcttcacaatcaggagcatacagatgacgattaacggtccaaaaatcatgaccggtttactgatgattttgccgcccagcggttgtggatcatgactcatgatcgtctcctccgtcgtgatggtcgtttttggtgttgcgacgaaccagcacggttaagccgccagcacagccagtggtagcatcatgcctttatacagggtgtgttgaatattttcggaacgcgcaccggtagaaagatcgtccagtttcggcaggtcgagattttcataaggcacacccgtcagtaccagaacctgagtaccgccgccctctttctcgccgtacagatgcggataatatttcggcaccgtatgcaggtaagtgtcgccagatttcagcgtctgacgcggatagtggtattcgctgccaggcttcagcgccagacgttttttcgcctccgccatcagctcttcacgcgtaccgaaaatcaccgcgcccgccgggcacacttctacgcagccaggcagaccgcctttatcgagacgttccacacctttctggttgcacagctcgcacttatgcagcgcaccaaacgggttgttgtagtcgtacttcggcacgttgtatgggcaggcgaccatgcagtaacggcaaccggtgcacacatctttgtcgtaatggacaatgccggttttcggatcttttttcagcgcagagaccgggcacacagagacacagttcggatcgacgcagtgcatacactgtttcttaatgtacgcgtagccgttctcctcctggtctttgttgacccctgtgccgctggtccacacctgaatgatgttattggtatacggcgacagtttgtcgttgttcgaccaggtctgttccccttgcgggttacgttcagggaagttgatatcctgacacttggtgacgcaagcctggcagcctacgcacaaggtcgagtcgtacaacatccccagcgatcccggaattggcgggcggttttcagcagccgcatgactgacagacggcagcgcgcccgtcagcaatgccccgcaggaggctgctttaataaaattacgtctgttcacggttattctccccgtgagtcagcgttatctttcttttgctgacgacccagttcacgcaccgccatcacgctgacaccggcaaccagcccaaccacaccgccgagcaaaccaatagcgcctgcagagacgttgccgccctctttagcgttaacatccggtttctgtgaacgcggagtctgattttcgacgttggcaagctgatggatgcctttatggaagccgataccttcttcgttacagccatagcatgggtgaccaatcgctaccggccacacgccgccaacatcgcagaattgcagcgttgagcagttgccgtaagtttctggccctttacagccgaggtggtacaggcaccagccttcacggtggccttcatcaccgaactctttggcaaaacgaccagcatcgaagtgcgggcgacgttcgcagtgttcgtgaatcagacggccataggcgaaggtcggacgatttttgtcatccagtttcggcggtttgccgtaagtgatgatgtgcgcaacggtcgcgaggaagttgtgcgggttcggcgggcagcccggaatattgataacggttttgcctggcagaacttcttgcaggctgactgcgccagttgggttaactccagctgcggcaacaccgccccacgcagagcaggaaccgatagcgataatcgctgctgcgccttctgccgctttgcggatgtgatccacaatcggctcaccagcaaccatgcaataaataccgttatcttttaatgggatggaaccatccacaaccaacacatactgccctttgtacttctcaagtgcgttatgtttgttctcttcgacctgatgaccgaaggcggcggaaagcacttcgtgatactccagagagatagtctccagcacgaggttttctaccgttggatgcgttgcacgaagcagagattccgtacaaccggtgcactcctgcgcgccaatccagataactggcggacgctgcgggttagtaaccgattcggccatctctgcagcggctttgctacttaaccccatggtggcggctaatgctgcacaaagcttcatgaaatcacgacggttaatgccgtgagaatggatgagggtgttatctccagtcatttatagttattccgttgcgaagacctggcatatattttgcctcaatcgcaaaatcaataatgcgatcgatgcgccatttaccacacatttattatggttatcgatatcatgatactgcggcggggcgctaaaacgaagggaagaagcattagtgtaattaattaaagcaagataatacgtatgtttgatcaattttcgaggcgataaccggccataaaaaagcgcaacgtagaacaggaattattctcacgaaagaaatccattaccatctctttatccagtccatagcggcgcgtcagaatacccgcttcccaggcgctaagctggcgatctccggtcttttcgtacatccggtgtgagtagcctaatacaaaaccgcgtttataatcggcacagaattttgtcacattaaccgcactgtcggcatgcgttgcttttaatcccgccattaagcctttaccaaaatggttattcatcgttcacctcattcgttatatatagccatatatagcgatattttaggcaaagaacgacttttgcgcacgctattttttcatgcttgtttaagacgtaatccagtaagagataaacctatcaggagagatatttatcgaaccatttcagtgtcctttgccaggcaagatcggcggcagatttgtcataacggggcgtggaatcattatggaatccgtgattaacccccggatagatatacgcctcataaaccttattattggctttcaacgccgcctcgtaagcaggccagccctcgttgattcgggtgtccagttccgcgaagtggagtagtaaaggcgcttcaatcttcgccacatcggcagtgggtgcctgacgaccataaaacggcaccgcgcaggccagttccggatacgcgacagccgccgcgttcgatacgccaccgccatagcaaaatccggtaatacccactttgcctgccgcttgcggatagcgttgcataaactcaattgcggcaaagaaatcattcatcagtttggttggatcaacctgctgttgcagctcacgacctttatcatcatttcccggataacctccaacggaacttaagccgtcaggtgccagggcgatataccccgccttcgccactcgccgtgccacatcttcgatatacggattcagtccacgattctcatgcaccactaccacggctggcgttttgccgctcatttttgcgggtttcaccagataaccccgtacctcgccgtgaccatttggcgaaggatacgtgatgtactcagcaacaatctccgggtcggtaaactctacctgagtcgccagcgcataatttggcttgagcaaatcaaacaacgctaatgccgtcatcccgcccaccgcatacttcgccgcaaggttgaggaactcacgtttcgagattttcccgtgagcgtaatagtcgtagtaatccagcaactcttgtgggaaatctttggcggttaaacgcggcatcgttgcactcctcaattggtgtttttttaagcaaagcataagcgcgtgtttttgcccagtttttcgtcactctgtgagccagactacgggatacgcgctggcgaatcgctaaactagaaacattgtttcgaaattgaacggtggaaaggagaggtcatggtctggttagcgaatcccgaacgttacgggcagatgcaataccgctattgcggaaaaagcggtttacgcctgcccgcgttatcgctcggtttatggcacaatttcggtcacgttaacgcgctggaatcacagcgtgcgatcctgcgtaaagcgtttgatttgggcattacgcactttgatttagccaacaattacgggccacctccaggaagcgcagaagagaactttggtcgcctgctgcgcgaggattttgccgcttatcgcgatgaactgattatctctaccaaagccggatacgatatgtggcccggtccgtacggctctggcggctcacgtaaatacctgctcgccagcctcgaccaaagcctgaagcgtatggggcttgagtatgtcgatatcttttactctcatcgcgtcgatgaaaatacgccgatggaagaaaccgcctctgcgctggctcatgcggtacaaagcggtaaggcgctgtatgtcgggatctcctcttactcgccagagcggacgcaaaaaatggtcgagttgctgcacgagtggaaaattccgctgttaattcatcaaccttcgtacaatttactaaaccgctgggtggataaaagcggcctgctggataccctgcaaaataacggcgtgggctgtattgcctttactcctctggctcagggattgctgaccggaaaatatctcaacggcattccgcaagattcacggatgcatcgtgaagggaataaagttcgtggtctgacgccgaaaatgcttaccgaagccaacctcaacagcctgcgcttattgaatgaaatggcacagcagcgtggacaatcaatggcgcaaatggcgttaagctggttgctgaaagatgatcgcgtgacgtcggtattgattggtgccagccgcgcggagcaactagaggagaacgtgcaggcgctgaataatctgacatttagcaccaaggagctggcgcagattgatcagcatatcgccgatggcgagctgaatctgtggcaggcgtcgtccgataaatgacctgttaataacgggcgcgcgaaccgcgcccgaatcagatcagtgattatgacgagtcagtcggtcaagatagcccatcacaaatgcagaaagcacaaacgtcagatggataatgacgtaccacatcagtttgttatccgggacatttttcgcatccataaagacgcgcagtaggtgaatggaagaaattgccacaatcgacgctgctactttgtttttcagcgacgttgcgtccattttccccagccagttcagcttctctttgttctcggagatatccagctgtgagacgaaattctcataaccggaaaacatcaccatcaccagcaaaccgccaaccagcgtcatatccaccagcgacagcaacacgaggatcaaatctgattccgccatcgagaagatattcggcagtacgtgaataatctcctggaagaacttcagcgccagggcaactaacgccagcgaaaggccaaagtacacgggggcaagcagccagcgagaagcatacattgcattttcaagaaaacgttccatacattcctgtcgtgtagttaaaacgggcaacagtatatcgcaattgagtaaacagcacgcaacagcaaatcaacatatacgttaaacctttgtcgcataattctgaggtttagggatcttcctggttcccttatcaacgcatcgagagcgtctacccttaaaggacgttgaacctgaagggagaaaaacgatgtctcatttaaaagacccgaccacgcagtattacactggtgaatatcccaaacagaaacaaccgacgccaggcatccaggcgaagatgacaccggtaccggattgcggcgagaaaacctatgttggtagcggtcgcctgaaagatcgtaaagcactggtgacagggggcgattccggaataggtcgcgctgccgccatcgcttacgcgcgtgaaggggctgacgtggcgatcagttatcttcccgtggaagaagaagacgctcaggatgtgaaaaagatcattgaagaatgcggacgcaaagccgttctgctgccaggcgatttaagcgatgagaaattcgcccgttcgctggttcacgaagcgcacaaggcgttaggcgggctggatattatggcgctggtcgccgggaaacaggttgccattccggatattgcagacctcaccagcgaacagtttcaaaagacctttgccattaacgttttcgcgctgttctggctaacccaggaagcgatccccctgctaccgaaaggtgcaagtatcatcaccacttcgtcaatccaggcataccagccaagtccgcatttactggactatgcggctacgaaggcggcgattctgaactacagccgtggcctggcaaaacaggtcgcggagaaaggtattcgggtgaatattgtcgcgccaggcccgatctggacagcactgcaaatttccggcggacaaacgcaggataagatcccgcagtttggtcagaaaacgccgatgaagcgtgcggggcaaccggcggaactggcccctgtatatgtttatctggcaagtcaggagtcgagctacgtcaccgcagaagtgcacggtgtgtgcggcggcgagcatttaggttaaaaaatgcccggttgtgaaaagcaaccgggcatcatttttatttcgctttggcggtttcttcgccgaccagacctatcttcaggtaacccgcctgatgcagcgtatccattaccttcatcaacgtctcgtaatcgacggttttatccgctcggaagaagatggtggtgtctttcttgccttcggttaacgcattcaacgccgtaatcattgtttcatcggtgaccggatcgttaccgataaacatcgagttgtctgccttcaccgacagataaaccggtttttccgggcgcggctgcggcgtgctggtagaagcaggcaagttcaccttcacatctaccgtcgctaacggtgccgccaccataaagataatcagcagaaccaacatcacgtcgataaacggcgtcacgttgatatcatgcatttcgccgttatcgtcgaggttttcgttaagatgcattgccatcggatattatcctgcgcgtaatttttgtgcgacacgaaccggatgcgcagcggcgctggcttccagatccaggtcacggctttgcagcaacaatacctgcgctgcaacatcacccagcatcgctttaaagccgccaatctggcgtgcaaatacgttatagataacgaccgcaggaatcgctgccacgaggccgattgccgttgctaacagagcttctgcgatacccggcgcaacgactgccaggttagtggtctgcgtttgcgcgataccaataaagctgttcatgatgccccagaccgtaccaaacagaccaacgaacggagaaatcgcgccgatggttgccagatagccgttaccgcggcccatttgacgacccactgcggcgacccgacgctccagacggaagctggtacgttctttaataccttcgttatcgtcgctgccttctgacagttccagctcattctgcgcttcattgagcaaatgcaggcttaagcttttgctaccaaaatcagcggcgatatcgttggcctggtttaaggaacgcgcttcagccagcagttgctgctcgcgcttaaggcgacgcttctgattgaagaactctacgctcttactgaagaagattgcccaagtgactacggaggccaaaataagcccaatcatcacgcacttaacgacaatatcggcgtgctgatacataccccagacggaaaggtccgtctgcattaaattattacccactgtgtatctccaggacgcaagtcacaaaatctgcgcataataatatcaaaatgacgtcgaattgatagtcgttctcattactatttgcatactgccgtacctttgctttcttttccttgcgtttacgcagtaaaaaagtcaccagcacgccatttgcgaaaattttctgctttatgccaattcttcaggatgcgcccgcgaatattcatgctagtttagacatccagacgtataaaaacaggaatcccgacatggcggacaaaaagcttgatactcaactggtgaatgcaggacgcagcaaaaaatacactctcggcgcggtaaatagcgtgattcagcgcgcttcttcgctggtctttgacagtgtggaagccaaaaagcacgcgacgcgcaatcgcgccaatggcgagttgttctatggacggcgcggaacgttaacccatttctccttacaacaagcgatgtgtgaactggaaggtggcgcaggctgcgcgctatttccctgcggggcggcagcggttgctaattccattcttgcttttgtcgaacagggcgatcatgtgttgatgaccaacaccgcctatgaaccgagtcaggatttctgtagcaaaatcctcagcaaactgggcgtaacgacatcgtggtttgatccgctgattggtgccgatatcgttaagcatctgcagccaaacactaaaatcgtgtttctggaatcgccaggctccatcaccatggaagtccacgacgttccggcgattgttgccgccgtgcgcagtgtggtcccggatgccatcattatgatcgacaacacctgggcagccggtgtgctgtttaaggcgctggattttggcatcgatgtttccattcaggccgctaccaaatatctggttgggcattcagatgcgatgattggcactgccgtgtgcaatgcccgttgctgggagcagctgcgggagaatgcctatctgatgggccagatggtcgatgccgataccgcctatataaccagccgtggcctgcgcacattaggtgtgcgtttgcgtcaacatcatgaaagcagtctgaaagtggctgaatggctggcagaacatccgcaagttgcgcgagttaaccaccctgctctgcctggcagtaaaggccacgaattctggaaacgagactttacaggcagcagcgggctattttcctttgtgcttaagaaaaaactcagtaatgaagagctggcgaactatctggatagcttcagtttattcagcatggcctactcgtggggcgggtatgaatcgttgatcctggcaaatcaaccagaacatatcgccgccattcgcccacaaggcgagatcgattttagcgggaccttgattcgcctgcatattggtctggaagatgtcgacgatctgattgccgatctggacgccggttttgcgcggattgtataacattgccacttttggacaattttgcagacattttattgtgaaaagtcttaaattgttgcgtccgggatcaaggcgtcccggacgattcaggagtacaataggcaaataaaggcttaaacgctgttccacaggaaagtccatggctgttattcaagatatcatcgctgcgctctggcaacacgactttgccgcgctggcggatcctcatattgttagcgttgtttactttgtcatgtttgccacgctgtttttagaaaacggcctgctgcccgcctcatttttgccaggcgacagcttgttgatactggcaggcgcattgattgcccagggggttatggattttctgcctacgattgcgattctgaccgccgcagcaagtctgggctgctggctaagttatattcaggggcgctggttagggaataccaaaacggtgaaaggctggctggcacagcttcctgctaaatatcaccagcgcgccacctgcatgtttgaccgccacggtctgctggcgctgctggctggacgttttcttgcatttgtccgtacgctgctgccaaccatggcgggaatttccggtctgccaaaccgccgtttccagtttttcaactggttaagcggattgctgtgggtcagcgtggtaaccagtttcggctatgccttaagtatgattccgttcgttaaacgccatgaagatcaggtaatgacgttcctgatgatcctgccaattgccttgttaaccgctggcttgttaggcacgctgtttgtggtgattaaaaaaaaatactgtaacgcctgacgattttccctgttcccggttgctgtaccgggaacgtatttaattcccctgcatcgcccgcattcttgccgcatcttcccccggcgtcacaccgaagtaacgtttaaactcacggctaaattgcgatgcgctttcatagccgacgcgcatcgctgctgcgctggccttcatgccgtcatggatgatcatcatccgcgccttatgcagacggtaattcttcaaatactgcaacggcgaggtactggtgacagacttaaaattatggtggaacgccgatacgctcatgttggcttctgccgccagttgctcgacgctcaggttttcggtgtatttattctcaatccgtttcagcacgcggctaatcagactgaagtgagtctggcgactgaccagcgccagtaacgcgccgccgcaaggtccggtcagcacgtagtacagaatttcgcggatgatctgtttgccgagaatacgcgcatccagtggtcgctccatcacgtcgagtaaccgctccgccgcgcataaaatctcttctgataacgtggcggagttaatcccgctggctgccaccgacggctggaaatgctcatcttcgccaatgtccatcaacagttcctgtaactgcaaaatatcgacattgagacgcaaccctgccagcggcacctctgacgtggcataggtttcgcactcaaacggcaacggcaccgtcagcagcaggtattcattggcatcataacgaaacacgcgttcattgatataaccgattttatgcccggaaaagagaattatgatgccaggctcgtacatcaccggtgtacgtgcgaaaggcgtctcgccatacaacaaacgcacatcgggcaacagttctgacaaactattttctttatttttcagtttattaactttatccgccagcaagcggcaaatctcttcacgtttcatatcgcgtaatttcttaggaataatgcggcaatttgattgtgcgcaattttgtagcatttctccagcactctggagaaataggcaagacattggcagaaatgagcattgagagccagggcgctggcgatcacaatgaaaaacatcaggcagatcgttctctgccctcatattggcccagcaaagggagcaagtaatgaacaactttaatctgcacaccccaacccgcattctgtttggtaaaggcgcaatcgctggtttacgcgaacaaattcctcacgatgctcgcgtattgattacctacggtggcggcagcgtgaaaaaaaccggcgttctcgatcaagttctggatgccctgaaaggcatggacgtgctggaatttggcggtattgagccaaacccggcttatgaaacgctgatgaacgccgtgaaactggttcgcgaacagaaagtgactttcctgctggcggttggcggcggttctgtactggacggcaccaaatttatcgccgcagcggctaactatccggaaaatatcgatccgtggcacattctgcaaacgggcggtaaagagattaaaagcgccatcccgatgggctgtgtgctgacgctgccagcaaccggttcagaatccaacgcaggcgcggtgatctcccgtaaaaccacaggcgacaagcaggcgttccattctgcccatgttcagccggtatttgccgtgctcgatccggtttatacctacaccctgccgccgcgtcaggtggctaacggcgtagtggacgcctttgtacacaccgtggaacagtatgttaccaaaccggttgatgccaaaattcaggaccgtttcgcagaaggcattttgctgacgctaatcgaagatggtccgaaagccctgaaagagccagaaaactacgatgtgcgcgccaacgtcatgtgggcggcgactcaggcgctgaacggtttgattggcgctggcgtaccgcaggactgggcaacgcatatgctgggccacgaactgactgcgatgcacggtctggatcacgcgcaaacactggctatcgtcctgcctgcactgtggaatgaaaaacgcgagaccaagcgcgctaagctgctgcaatatgctgaacgcgtctggaacatcactgaaggttccgacgatgagcgtattgacgccgcgattgccgcaacccgcaatttctttgagcaattaggcgtgccgacccacctctccgactacggtctggacggcagctccatcccggctttgctgaaaaaactggaagagcacggcatgacccaactgggcgaaaatcatgacattacgctggatgtcagccgccgtatatacgaagccgcccgctaagctttttacgcctcaaactttcgttttcgggcatttcgtccagacttaagttcacaacacctcaccggagcctgctccggtgagttcatataaaggaggaacgtatggctaatccaaccgttattaagctacaggatggcaatgtcatgccccagctgggactgggcgtctggcaagcaagtaatgaggaagtaatcaccgccattcaaaaagcgttagaagtgggttatcgctcgattgataccgccgcggcctacaagaacgaagaaggtgtcggcaaagccctgaaaaatgcctcagtcaacagagaagaactgttcatcaccactaagctgtggaacgacgaccacaagcgcccccgcgaagccctgctcgacagcctgaaaaaactccagcttgattatatcgacctctacttaatgcactggcccgttcccgctatcgaccattatgtcgaagcatggaaaggcatgatcgaattgcaaaaagagggattaatcaaaagcatcggcgtgtgcaacttccagatccatcacctgcaacgcctgattgatgaaactggcgtgacgcctgtgataaaccagatcgaacttcatccgctgatgcaacaacgccagctacacgcctggaacgcgacacacaaaatccagaccgaatcctggagcccattagcgcaaggagggaaaggcgttttcgatcagaaagtcattcgcgatctggcagataaatacggcaaaaccccggcgcagattgttatccgctggcatctggatagcggcctggtggtgatcccgaaatcggtcacaccttcacgtattgccgaaaactttgatgtctgggatttccgtctcgacaaagacgaactcggcgaaattgcaaaactcgatcagggcaagcgtctcggtcccgatcctgaccagttcggcggctaacatgcaaattctcccggtggcggtaatgttccgctaccggacttttcagaaatcatttattcccctcgcgtcccgcccgttgttactcttccttgttcaggaatgccaaatataaggacatcatcatgcagagccggaagctcttaaaagaacaactcatctatatccgggataaacgcaacggagaggtgaaaaacagatgaaaataatacttctgtttttagcagccctggcaagttttaccgtacacgcacagcccccctcactgaccgtagaacaaacagtccggcatatttatcagaactataaatcagatgccactgccccttattttggtgaaaccggagagcgggcgataacttctgcgcgtattcaacaggcgcttaccctgaacgacaatcttacgctgccgggcaatattggctggctggattatgatccggtttgtgattgtcaggattttggcgatctggtgctagaaagcgttgcgataacccaaactgacgccgatcatgccgatgccgttgtgcgctttcgtatctttaaagatgataaagaaaagaccacgcagacactgaaaatggtggcggaaaatggtcgttgggtcattgacgatattgtcagcaatcatggcagcgtcttacaagcagttaatagcgagaatgaaaaaacgctggccgctttagcttcgttgcaaaaagaacagccggaagcctttgttgccgaactctttgaacatattgctgattatagctggccgtggacgtgggtggtttccgactcttaccgccaggcggttaatgccttctataaaaccaccttcaagacggccaataatcccgatgaagatatgcaaatagaacggcaatttatttacgacaatccgatctgttttggcgaagagtcgctattttcacgcgttgatgaaattcgagtcctggagaaaaccgccgattccgcccgcattcatgttcgttttacgctgaccaatggcaacaacgaagagcaagaactggttttacagcggcgcgaaggcaagtgggaaatcgctgattttatccgcccgaacagcggcagcctacttaagcagattgaggcaaaaaccgccgccagattaaagcaatgagctgaattaaataacaattagccggaacaataaataaaagggaacactatatgaaaacgattttcaccgtgggagctgttgttctggcaacctgcttgctcagtggctgcgtcaatgagcaaaaggtcaatcagctggcgagcaatgtgcaaacattaaatgccaaaatcgcccggcttgagcaggatatgaaagcactacgcccacaaatctatgctgccaaatccgaagctaacagagccaatacgcgtcttgatgctcaggactattttgattgcctgcgctgcttgcgtatgtacgcagaatgataaaaaaatccccggcagcatgtcagttgccggggattttttttaacgtccaaccgccgctttagggcgtttcttcgcaccagcattcaccggacgagattgcgtagacgacgctttttttgccgtagcaggcgtctgacgctgggtcgccatcggcgtatgtttcgtcaacgccggacgggtattgcggttctggcgacgagcttcacgcatctcttcaatggttggcgcaggcactaagcaatcgcgacggctgccaatcagatgctttttgcccatcgcttccagcgcctggcggattaacggccagtttgccggatcgtggtaacgcaacaacgctttatgcaaacgacgctgtttgtcgcccttcggtacgaagacgtcttcgctcttataaccaatcttcgccagcgggtttttcccggtgtaatacatggtggttgagttcgccagcggcgatgggtagaagttctgtacctggtcgagacggaaacgatgctttttcagccacagcgccagattcaccatatcttcatcacgcgtaccggggtgcgcggagatgaaataggggatcagatactgctctttacctgcctgttttgagtaagtatcgaacagctctttaaagcggtcatagctgcccatgcccggcttcatcatcttcgataacggcccttcttcggtatgttccggggcaatcttcagataaccgccgacgtgatgggtcgccaactctttgatatagcgcggatcttccacggcgatgtcataacgtacgcctgaggcgatgaggatttttttaatgcctttcagatcacgcgcacggcgatagaggttgatcgtcggttcgtggttagtgtccatgtgcggacaaatatccggataaacgcacgacaaacggcgacaagtttgttcagcgcgtggcgatttgcagcgcaacatatacatgttggcagttggcccaccgagatcggaaatcacgcccgtaaaacctggaacggtgtcgcggatcgcttcgatctcattaatgatcgaatcttccgaacggctctgaataatgcgcccttcgtgctcggtaatagaacagaaagaacagccgccaaagcagccgcgcataatgttgaccgaaaaacggatcatttcgtaagccggaatacgggcattgccataggccggatgtggcacgcgcttgtacggcagcgcaaaaacgctgtccatctcttcggtagaaagcgggatagcaggcgggttgatccacacatagcggtcaccgtgtttttgcatcaatgcgcgggcgcagcctgggttggtttcgtggtgcagaatgcgcgaagcatgggcgtacagcactttatcgcccttcactttctcgaaagaaggcagcaacacgtaggttttttcccacggtttcgggcgcggtggctgcacggttacggctttggcttcctgctttttcggtgccaccggtttgttatccgcgcacggcaaatcttcaccatacggatgcgggattgggtcgatttttccaggggtatcaagacgggtggaatccacgccgctccagccaggcagcgcctctttcacgataatcgcggtattacgcacatcgcggatttcactaatcggctcgcccatcgccagacggtgcgccacctccaccagcggacgctcaccgttaccaaacatcagcatgtcggctttcgaatccaccagcacggaacggcgcacggtatcggaccagtaatcataatgtgcggtacggcgcagactagcctcaataccgccgaggatcaccggtacatctttccacgcctctttacaacgctgggtataaaccagtgtggcgcgatccgggcgcttacccgcgacgttatccggcgtgtaggcatcgtcatgacgtaaacggcgatcggcggtataacggttgatcatcgaatccatgttgccagcagtaacaccgaaaaacagattcggtttacccagacgcatgaaatcgtctttgctgctccagtctggctgggcgatgatcccgacgcgaaagccctgtgcttccagcatacgaccgcaaatcgccatcccgaagcttgggtgatcgacatacgcgtcgccagtaaccaaaatgatgtcgcagctatcccagccaagttgatccatctcttcacgagacatcggcaaaaacggtgccggtccaaaacaggcggcccagtactgcggccaggagaacaggtcgcgatccggttggatcagggagatagagctcattttgcttccagaaatgataaaaaaataatcaaaggccggggattataagccggaacgaaagagaaatcgaaaggtattccatactcgccctcctcgggcgagtatgaagattacggtaccggattgaccaaaagttgccctatcgagccacggtccgccatttccagcgtctgactgttgaagtagaacgggaagtgcgcccaggaaggctgaccgaaataaacaagcagctccacttgtccgtcaacccaaacggtatctttccagcctctgtcttccgggaacggcatcgcgccattcacgttacggatctggaacattacgccttcaatatggaacgcttgcggctcgtccgcgcgtaccgtccagcgttcccacgttccttgctgcgcggtgacatcaatacggttgacgtcccacagctgtccattaatacccgggtcatcacccagactgatatcgcgactgcgaattggcgaaccagccatgatttcagttggcagcaagcgcatcggaagactgtctgtgaccagcggcagaaggccggttgggcgcagcgttagcaccagggtagaaaccagaatactggatggctcaaagaagccgcgaatacgatcaacaatgctcgccgcttcgccacaggtgatcgacacttcatcgccgttgctcatatccaccagaatctcgcggcgctcgcccggtgccagcgaaagttgcttcaccgatacaggagcaggcaggaatccctgatcgccagaaatcacatgtaacgggcgaccatcgctcatctgtagttgatagcgacgagagttcgacgcgttcagcagtcgcaagcgcacccagccacgcgagacttcaacgtacgggctttgtacaccgttaaccagcagcgtatcaccaacaaagccgccgcttcccggttcgttgtattctggcgtaccaaagttatccagccgtttatcctggataatgaccggaaaatcatccacaccataatggttggggataggcagcgacttgctgacttcatcttccaccagccacattccggcaaggccgttatagacctgctgagccgtgcggttgggagtattggcgtgataccacagagtagctgcgttctggcgaatgggcagtacgggtgcccagtcagcgtttggcgacatcatccgtgccggaccgcccatcagcgggcctggtacctgtagcccggccaccgtcattgagacattttctgtcaggcggttgctgtaaataagcttaacatcgtcgcccttccagacgcggatagtcggccccaggtaacgaccattgattccccagaccgacgcgcgtgtccctggcgtaaatgaccagtgcgcacgttgtacagtcataaacagcggttgcccacggcgagattcaagtagcggcggaacgggtagcggttgctgttgcccggctgcgctggccttcaggggaacagcgcctgcacaaagtgcaatccccgatgcctgaatgaactgacgccgactgagtgacatatttgctccatgtaaaactggctaaagtaataccgtgcaggaaagtgttccccgcaaaaatacagattgccgacttaaacttttccggcggcttcgcgttctgcgacttctttatcgagctcggcgatttttgttccattatcgaacgacaatgggcagccagctcacgaacctgatctttgccatactgactgacgtcaattggcggcagcatttcgacaatcaccagaccgttgtgcagtcgattaagattaatcttattcgaagttgtagagacgcacacgggaataatcgggacgcccgccgcaattgccgcgtgaaatgctccagtcttgaacggtagcaggccgcgaccacggctgcgggttccttccgggaacatccagatggaaatacggcgttttttgaaatgattcacgacttccgcaatggtgccgtgagctttagtgcgattgtttctgtcgatcaataagttgccggttaaccagtacaactgcccgaagaaggggatccacagcaagctctttttacctaccgtcaccgtcggcggttgcacaatgttcgatgctgtcaccatgtcatagttgttctggtggttagcgatatagatagcattgccgtagctttcagcatctgcaggtttgcggcactcaactttcaggccgaacagcggcgcaagacggccaaacatatgcccaaaggtggccacatgtttcgggttacgcgggctgaaaaggcagtaaatggagccgaatacacagactaagatgctgtaaatcaaggtaataataagacgaaagatatatagcataacaccctctgaaggtctgagagactggcattgtacgtcacctgaaatcaggttagggcattgttaaaagccgctctctggaaaagcgtattgttaatcgcaacgcatgaataaacaacggtttcaagggaatttttatcgtttccgggggttgaatacgctgccggatgacgacttaacgtttcatccggcgttccttgcaagcgggaggaaacaggccctccccggcatattactcttcgctatcaccgctgctggcacggcgaggagagtcgatctcaacacgatcgatacgctgcaaaccgcgcatcaacgtaccgcggcgtccacgttcgccagtgactttctgtaactcttccgggcgcagtttaattttgcgtttcccaacatgaatggtcagcgtgctttgcggcggcagaacgtacaattgcgccagaccatcttctccacgcgcggcttctgccgatggaatgttgataatcttgttgcctttgcccttcgacagctgcggcagatcgcttaccgggaacatcaacatacggcctgcctgagtgattgccagcagcatatcggaagcatcttcaatcaccaccggcggcataacatgggcattttccggtaaggtgatcaaagccttacctgcacggttacgcgccaccagatcgttaaaggtgcagacgaaaccgtaacccgcatcggaagccatcagcagtttctgatcgtcgctttccatcagcatatggtcaacggtcgccccaggcggcaacgttaatttgccggtgagtggttcgccctgaccacgcgccgacggcagcgtaatcgggtcgatggcatagctacgaccggtggaatcaacaaacactaccggttggttgctcttacctttcaccgccgctttgaagctatcacccgctttataattcaggcccggcgcgtcgatatcatggcctttagcgctgcgtacccagcccatctgcgacagcacaatggtgacaggttcagacggcagcatgtcgtgctcgctcatcgctttcgcttcttcgcgttcctgcaacggcgaacgacgatcgtcaccgtaggcttgcgcgtctgcctgcagttctttcttcagcaggttattcattttacgctcggaagccaaaatgccctgcaactggtcgcgctctttttccagctcactctgctcaccgcgaatcttcatctcttccagtttggcaagatgacgcagtttcagttcgaggatcgcttccgcctgggtttccgtaaggccaaaccgcgacatcagcgccggtttcggttcatcttcgttacgaatgatctcaatcacttcgtcgatgttgagaaacgccaccagcaaaccttccaggatatgcaggcgcttgaggactttctccagacgatagttcagtcggcggcgcacggtatcgcgacggaacaccagccattcggagaggatttccagcaggtttttcaccgccggacgaccatccagaccgatcatattgaggttaatgcgatagctcttttccagatcggtggtagcgaagaggtggttcatcacctgatccatatccacgcggttggaacgcggcacaatcaccagacgggtcgggttctcgtggtcagattcatcgcgcagatcgtcaaccatcggcagctttttgttgcgcatttgcgcagcaatttgctccagtacgcgcgcacctgaaacctgatgcggtaatgcgctgataaccaccgcgccatcttctttcttccacaccgcgcgcatacgcactgaaccacgtccgttctcgtagattttacggatctcggcgcgcgaagtgataatttccgcttcagtcggataatccggcccctgcacgatatccagcagctgatcgagcgtggttttcggctggtcgattaatgcgattgccgcctgagctacttcacgcaggttatgcggtggaatatcggtcgccatgccgacggcaataccggtggtgccgttaagcaaaatgtttggcagacgagcaggcagcattttcggctcctgcaaagtgccgtcgaagtttggcacccagtcagccgtcccctgccccagctcgctcaatagcagctcggaatatttcgacaaccgggattcggtgtaacgcattgccgcgaacgatttcggatcgtccggcgcgccccagttcccctgaccatcaaccagcggataacggtaagagaacggctgcgccatcaggaccatcgcttcataacaggcgctatcgccgtgcggatggtatttacccagtacgtcaccgacggtacgggccgattttttaaatttggcgctggcattcaggcccagttcagacatcgcatacacaatgcggcgctgaacaggtttcagaccatcaccaataaacggcaacgcacggtccatgatcacgtacatggagtagtttaagtaggcgttttccgtaaattcatgtagcgcaaggcgctctgccatatcgctcattaattctgattcctcaacttattcgccagccttcaaaggggctatattgccggagatactacattatctgccgcgtcgagtcacaggagatcagcgtgaatagcgccgccggacgtgctccgacggcgataaaggcatcaatgtgccttgatatacaactctttgctgtagacttgatcggcatagagggcagcacaaggttgcgcccatgccacaccactcggcatgggggtccgctccgggcgattcgagaagttgaggttatgcgagtccagggaagcctaaagcatcaaagtagtcgactgtaagtatacggttcagcccagtttagctgtgtctccaccagtgccccgcgcctcctgccataagtgcggcttgctcatgggtacccccgagacggcttacggcgcaccggataataaatttcgcgtatacatggtattccttaccggagaaattataagcccaacaacaatacgcctgtggcattgttcgctcaaacttatcgcgagtgatttggctcacactccggtaaagattccccatcacgccaacggcacataaacatccgtttccagtcgctgctctgtcaccccttcggcaagattggtgtagtgaaacagaatcggtgctttacgcattttctcgccgcttgcaggcagccagtggcgaataatgccccatatcgtgtgtgaaatatcgtccagctcgccaacgtggcgggccacggcataacgtccaccggtaagttcaccattgctcacaccataacgattatcgggaatcggttcgctaacgctgccgcagatatcaaagcgaaacgcttccggtgcggtggtggcagggtcgtcccaggcgacgccaaaagtctggctttggttaacaggagaaagccccgtctctttacgccacatgataaatttcgccacactgtagttgagcaactcagggctacagcggtgcggcaacatcgccacagggattgatgggaaatcgataatgtttacatccagtgtcaggtttgtcattttgcctccctgcgaaattattcccgggaacgcgtcccgggagcggtaacaattacggatttactttgcggatctgtttgacgtcaatttcaacagaattccagtctttatcgacttcaccctgaatctcaaccgtatctttcggcgtcaccgtcacaccgttccagcgtttgtggtcgatatcaacattgatagtaccgctggcatctttaaacacgtagagatcgtcagagatgcgttcaacgatattgccgcgcagggttacccaggtgtcgtcacgcagggattttgcgctttctacggtcgttacgctgccgttcggcccctggaatcctccggcctgactttgcgttgccgatgggccagaaaaaccgccctgctctgctgccatcaccggtgcgctgcacagggccattactgcgattactgctgcgaattttttcatgtttattactccctttaatgtctgtttccgagcatttaacaagatagtccttaacaacttcttaagggaaaaaaataaaatttagtgctgtacagagcgcgttacaacacggtttactggcagcaaatacggttatcgcagggatgaaaaaatgcgaattttactgatagaagatgacatgctgattggcgacggcatcaaaacgggccttagtaaaatgggttttagcgtcgactggtttacacaaggtcgtcagggaaaagaggcgctttatagcgcgccttatgatgcggtgatcctggatttaaccttaccaggcatggatggtcgcgatattttgcgcgaatggcgagaaaaaggtcagcgtgagccggtactgatcctgaccgcgcgcgatgcgctggaggaacgtgtagaagggctgcgtctgggagctgacgattatctgtgtaaaccttttgcgttgatagaagtcgccgccaggctggaagctctgatgcgccgaaccaacggccaggccagcaacgagctgcgccacggtaacgtcatgctcgaccccggcaaacgtatcgccacgctggctggcgaacccttaacactgaaaccaaaagaatttgccctgctggaattactgatgcgtaacgctggtcgggtactgccgcgcaaactgattgaagagaaactgtatacctgggacgaagaggtcaccagtaatgccgttgaagtgcatgtgcatcatctgcgacgcaaactcggtagtgattttattcgtaccgtgcatggtattggctacacattaggtgagaaatgaaatttacccaacgtcttagtctgcgcgtcaggctgacgctaatctttttaattctggcctcggtgacctggctgctttccagctttgtcgcctggaaacaaacaacggataacgtcgatgaattgttcgacacccaactgatgctgtttgccaagcggttaagtacgctcgatctcaacgaaatcaacgcggcggatcgcatggcacagacgccaaataaattaaaacacggtcatgttgatgacgatgcgctgacctttgccatctttacccacgacggcagaatggtccttaacgatggcgataacggagaagatattccttatagctatcaacgggaaggttttgctgacgggcaactggtgggcgataaagatcaatggcgttttgtctggatgacctcacctgatggcaaatatcgcatcgttgttggtcaggaatgggaataccgtgaagacatggcgctggcgattgttgccgggcaattgatcccgtggctggtcgcactgccgattatgttaatcatcatgatggtactattgggtcgtgaactcgcgccgctgaacaaactggcgctggcgctgcgtatgcgtgaccctgactcggaaaaaccactaaacgcgactggcgtacccagcgaagtgcgtccgttggttgagtcgctaaatcaactgttcgcccgcacacatgcgatgatggttcgtgaacgacgctttacctccgacgcagctcacgaactacgtagcccgttaacggcgctgaaagtgcaaaccgaagttgcgcagctttctgacgatgatccgcaagcgcggaaaaaagcgctgcttcaattacattacgggatcgatcgcgctactcgtctggttgatcaactgctcactctatcgcggctggactcactggataaccttcaggacgtcgcggagatcccgcttgaagatctcctccaatcgtcggtgatggatatttaccacacggcgcagcaggcgaaaattgacgtgcgactgacactcaatgcccacggcatcaaacgcaccggacaaccgctattgctaagtttgttggtgcgaaatttgctggataacgccgtgcgctacagtccacagggcagcgtgatagacgtcacgctgaatgctgataatttcatcgtgagggataacggccccggtgtgacgccagaggctctggcgcgaattggcgaacgcttctatcgcccccccggacaaaccgctaccggcagtggacttgggctatcgattgtccagcgaatcgccaaattgcatggcatgaatgttgagtttgggaatgcggaacaaggtggatttgaggcgaaggtaagctggtaacttctctgtctatgagagccgttaaaacgactctcatagattttactaatagcaaaatataaaccgtccccaaaaaagccaccaaccacaaaccagacaaataccgagcgaaaatacatatacccaaaactcgaacatttcccgcataaagagttttcttaagataagaataataagtggcgtaagaagaaaaaatgctgcaatcattgcttgcaatatacgatcttcgcctgaaacggaaggtatactgcaaatattgtctcccgactcaagcatccagtcatacttattgaaagcaaaaaaagcatctattaaccaataagtaagcattatgtataacagagcttcaaatattgtttgaattttatgctttaacatatatcagtacgctcataaaaatccatttataattatcaacatgacacgttgatattttcatcttttacttattcaaagccatattttcaatcccaaaaaaaaccgaaccaaacgtgtaaattattccggtgcgagtaagaattatgaggaatggctatcagtattgtcattttcagaaaatatttatcctgcatcggtgagtcagagcaagatcagacttttgctaaattcgcaaaagactttgcacattttgctaatttcaccgtaccgctctgtgacgtactatagtcggcaaacgtctcaccttgaggttaaaaaatgagcaacatcctgattatcaacggcgcgaaaaaattcgcccactccaatggtcaactgaacgacaccctgaccgaagtcgcggatggcacactgcgcgacctcgggcatgatgtccgcatcgttcgcgccgacagcgactacgatgtcaaagcggaagtacaaaactttctctgggctgatgtggtgatctggcagatgccaggctggtggatggcgcgccgtggacagtgaaaaaatatattgatgatgtattcaccgaaggtcatggaacgctgtatgccagcgatggccgtacccgcaaagatccgtcaaaaaaatacggttccggcggcctggtacagggcaaaaaatatatgctttctctgacctggaacgcaccaatggaagccttcaccgaaaaagatcaattcttccacggcgttggcgtcgacggtgtgtatctgccgttccataaagcaaaccaattccttggcatggaaccgctgccgacatttatcgctaatgacgtgataaaaatgcctgatgttccccgctatactgaagaatatcgcaagcatcttgtggaaatttttggttaactagagctcaggctttagaaggagttaaccatgcttaccgtaatcgcagaaatccgtactcgtcctggtcaacatcaccgtcaggcggtattggatcagtttgctaaaatcgttccaaccgtactgaaagaagaaggttgccacggctatgcgccaatggtggattgcgctgctggcgtgagtttccagtctatggcaccggattctatcgtgatgattgagcagtgggaaagcatcgcgcatcttgaagcgcatctgcaaaccccgcacatgaaggcgtacagcgaagccgtaaaaggcgacgtgctggagatgaatatccgcatcctgcaacctgggatttaaacctgccttgtttgcccggccatcctgaccgggcaatgttctttcctttaaacctcaatctccgccatgtcgcctttctcttgcaaccagttgcggcgatcttccgagcgtttcttcgccagcagcatatccatcatcgcgtcagtacgctgatcgtcttcatcatcgatagtcaactgcaccagacggcgagtgttcggatcaagcgtggtttcacgcaattgcatcgggttcatttcccccagacctttaaaacgctggacgttcggcttgcctttcttgcgttttaattgctcaagtacgccctctttctcttcttccgtcagcgcgtaataaacctctttcccgagatcaatacggtagagcggtggcagtgcgacgtaaacgtgaccgtgtttcaccaacgcgcggaagtgttttacgaacaaagcgcagagcagcgtggcaatgtgcagaccatcagagtccgcatccgcgaggatacagattttgccataacgaagctggctcagatcgtcgctgtcaggatcgataccgatcgctaccgaaatatcatgcacttcctgcgaggccagcacttcgtcggaagaaacttcccaggtgttaaggatcttacctttcagtggcatgatcgcctgatattcgcgatcgcgcgcctgcttggcagatccgcctgcggagtcaccttccacaaggaacagttcggtacggttaagatcctgcgcggtacagtcagccagtttgccaggcagtgctgggccgctggtcagctttttgcgcaccacttttttagccgcacgcatacggcgctgggcgctggaaatcgccatctccgccagcagctccgccgcctgaacgttctggttcagccacaggataaaggcatctttcaccacgcctgaaacgaatgccgcgcattgacgcgaagagagacgctctttggtctgcccggcaaactgcggatcctgcattttcaccgacagaacataggcgcagcgatcccagatatcttccgccgacagcttcacgccgcgcggcagaatgttgcggtattcacagaactcacgcatcgcgtccaacaggccctgacgcagaccattaacatgggtaccgccctgcatcgttgggataaggttgacgtagctttcggtcagcagttcaccgccttccggcagccacagtagcgcccagtccacagcttcagtatcgccagcgaaattaccgataaacggtttttctggcagcgtcggtaaaccgtttaccgcttccgccaggtaatcattcagaccgtcctgatagcaccagcgctgttcggtgttgttgatctcatctttaaaggtaatctcaacgccggggcacagtactgctttggccttcagcacatgcgtcaggcgtgaaacagaaaaacgcgggctgtcaaagaaggtttcatccggccagaagtgcacgctggtaccggtattgcgtttaccgcaagtgccgacaacctgtaaatcctgcaccttttcgccattttcaaaggcgatgttataaacctgaccatcgcggcgcacgttaacttctacgcgcttcgacagggcgttaaccaccgaaatccccacgccatgcaggccgccagagaactggtaatttttgttagagaatttaccgcctgcatgcagacggcaaagaatcagttcaaccgccggtacaccctcttccgggtgaatatccaccggcatcccgcgcccatcgtcaataacttctaacgactggtcagcatgtaagattacatccacgcgttttgcgtgacccgccagtgcttcatcgacactgttatcaataacttcttgccccaaatggttagggcgagtggtatcggtatacatccccggacggcggcgaaccggctcaagcccggtgagtacctcaatggcatcagcgttataagtttgcgtcatggtttaagttagcaattcgagttgatcgtcagagatggtgcagaccaagaaaatcgacgatcgggttgaaataatcttcgaagcccgtgaatgcgtggttgccgccttctatgacagtctggcggcaggaagcgtagtacgccaccgcctggcggtaatccagcacttcatctcccgtctgttgcagcagccagatcaaatccggcgcttccagcgggtcaatctgcatgactttgagatcgtaaatatggcgtgactctagcacatattgctgcccggtgtaggggttctcgttctgaccgagatagtccgtcagcagttcaaacgggcgcaccgccgggtttaccaccactgcgggcagcataaaacattgtgacaaccaggtggcgtaatatccccccagtgacgaaccgacaatacccagcgaatcgccgccatgttccaggacaatggattccagcagctctgccgcgtcggaaggatacggcggcaactgcggaatgatcatctcaacgtcagggtgatgttccgccagccagttttttaacaagctcgcttttgcagagcgcggcgagctgttgaaaccgtgtaaataaagaagcgtagacatcagtagccttctgaagcggtatcaggttggaaacgtgtgtccgccaggcgatgcacctcggtggtcagcgtgccatcagcatgtaactcgagagtacgccagccgggcgcgatagtatccagcgtaaagttggaacagtgcggcttaaactgcacacaggtcgacggcgttgccagcaggcggcgaccgttccagtcgagatccagctcctgatgaatatgaccgcacagcaagtatttgacgtgcggaaacttcgccagcacggtatccagttcgcccgcgttacgcagactgtgttgatcgagccaactacaacccgcaggtagcggatgatgatgcagcagcagcaacgtatggcgttctggcgcatcggccagtttacgttccagccactcaagctgaaactcgctcagctcaccgtgcggcacgccaaacacctggctatccagcaacaggatttgccattgctcaccaataaacacgcgcttcgccggggagatacccgcatcctgtaacgcgctgtacatcgcgggctggaaatcgtggttgcccggcagccagacgcagggcgcacgaaaacttgcgatgccttcagcgaaatgctgataggccgcagaggattgatcctgcgctaaatcacctgtcgcgacaatcaggtcgaattcgtgctgatgtggacgaatcgcctccagcaccgcctggtagctttcccaggtgtttacccctaacagggcttcgtgcttttgtgcaaacaggtgagtatcggtaatttgtaaaatcctgactctggcctcaccagccagaggaagggttaacaggctttccaaatggtgtccttaggtttcacgacgctagtaaaccggaatcgccatcgctccatgtgctaaacagtatcgcaaccagtccgctaaaaactggttaatttgatgcttttcgtcgcgttgatgcaactttttattaggataatcataccgcgctttgaagcgaaaaatctgctggcttgaacacacttcagccaccatcgcgtcatgatacagacgcaccgtcattgacggaaggctccagtaactgatcgcgggcgcagtctgttctattgtcaccagggtagtgtatcgggtcgattccacaatcgtcagccgatattgtgcgtttgccacctgatagcttacagtttcgccgggtgcgtcattgcgcggtaacaaacggcgcaattgtgaaaagttcatctcgcacaggcgcatcatttcaggaaagtcaggtgtgtaacgcttcatttatgcccactcattttttaacgcttgatgatgcagctgcagccattgcaaagcgatgaccgacgctgcgttgtcgattttcccctcttctacccactggtatgcctgttcccggcttaccacatgaacgcgaatatcttcgttttcatcagccagaccatgaataccgcttgcggtcgtggcgtccacttcgcccaccataattgacgaacgctcactggtgccccccgggcttgccaggaaacttaacaccggtttggtccgtttgactatcagtcccgcctcttcaatcgcttcgcgacgggcaacatcttccacactttcaccctcttcaatcatcccggcaaccatctccagtagccagggggtttcgctggtgtcgtacgcggcaatccgaatctgctcaatcagcacaacttcatcacgcactgggtcaaagggtagcaagactgcggcgtgaccgcgctcaaaaatttcccgccgtacctcatgactcatttgcccgttgaatagacgatgacgaaatctataaagatctaatgaaaaaaagccgcgataaagtgtttctcgtgcaataatttctacatcgtttttgccaaatgtaacgggcaggttgtctggcttaagcattgttaatgtcctggcactaatagtgaattaaatgtgaatttcagcgacgtttgactgccgtttgagcagtcatgtgttaaattgaggcacattaacgccctatggcacgtaacgccaaccttttgcggtagcggcttctgctagaatccgcaataattttacagtttgatcgcgctaaatactgcttcaccacaaggaatgcaaatgaagaaattgctccccattcttatcggcctgagcctttctgggttcagttcgttgagccaggccgagaacctgatgcaagtttatcagcaagcacgccttagtaacccggaattgcgtaagtctgccgccgatcgtgatgctgcctttgaaaaaattaatgaagcgcgcagtccattactgccacagctaggtttaggtgcagattacacctatagcaacggctaccgcgacgcgaacggcatcaactctaacgcgaccagtgcgtccctgcagttaactcaatccatttttgatatgtcgaaatggcgtgcgttaacgctacaggaaaaagcagcagggattcaggacgtcacatatcagaccgatcagcaaaccttgatcctcaacaccgcgaccgcttatttcaacgtgttgaatgctattgacgttctttcctatacacaggcacaaaaagaagcgatctaccgtcaattagatcaaaccacccaacgttttaacgtgggcctggtagcgataaccgacgtgcagaacgcccgcgcgcagtacgataccgtgctggcgaacgaagtgaccgcacgtaataaccttgataacgcggtagagcagctgcgccagatcaccggtaactactatccagaactggcagcgctgaatgtcgaaaactttaaaaccgacaaaccacagccggttaacgcgctgctgaaagaagccgaaaaacgcaacctgtcgctgttacaggcacgcttgagccaggacctggcgcgcgagcaaattcgccaggcgcaggatggtcacttaccgacgctggatttaacggcttctaccgggatttctgacacctcttatagcggttcgaaaactcgtggtgccgctggtacccagtatgacgacagcaatatgggccagaacaaagtgggcctgagcttctcgctgccgatttatcagggcggaatggttaactcgcaggtgaaacaggcccagtacaactttgttggtgccagcgagcaactggaaagcgcgcatcgtagcgtcgtgcaaaccgtacgttcctccttcaacaacattaatgcatctatcagtagcattaacgcctacaaacaagccgtagtttccgctcaaagctcattagacgcgatggaagcgggctactcggtcggtacgcgtaccattgttgatgtgttggatgcaaccaccacgctgtacaacgctaagcaagagctggcaaatgcgcgttataactacctgattaatcagctgaatattaagtcagccctgggtacgttgaacgagcaggatctgctggcactgaacaatgcgctgagcaaaccggtttccactaatccggaaaacgttgccccgcaaacgccggaacagaatgctattgctgatggttatgcgcctgatagcccggcacccgtcgttcagcaaacatccgcacgcactaccaccagtaacggtcataaccctttccgtaactgatgacgacgacggggcttcggccccgtctgaacgtaaggcaacgtaaagatacgggttatctgccgcattcttcccccttctcgcttcaatttcgaccagccatcctctattctgatgggtatttaccactggtcccggaagacaaaaatgaaacggacaaaatccatacgccacgcatcgttccgcaaaaactggagcgcgcgccatctgacaccagtcgctctcgcggttgccactgtttttatgctggctggctgtgaaaagagtgatgaaacagtgtctctctatcaaaatgctgacgactgttcagctgcaaacccaggcaaaagcgccgaatgtaccaccgcgtacaacaatgcgctgaaagaagccgaacgtactgcgccgaaatacgccacccgtgaagactgtgttgctgaatttggtgaaggtcagtgccagcaggcaccagcccaggctggcatggcaccagaaaaccaggcgcaggcccagcaatccagcgggagtttctggatgccgctgatggccggttacatgatggggcgtctgatgggcggcggcgcgggatttgcacagcagccgctgttctcctcgaaaaacccagccagcccggcttacggtaaatataccgacgcgacgggtaaaaactatggcgcagcccagccaggccgcaccatgaccgtaccgaagacagccatggcaccaaaaccggcgaccaccactaccgttacccgtggcggttttggtgaatctgttgccaaacaaagcactatgcagcgtagcgcaactggcacctcttctcgttcaatgggtggctgataccgatggaaagagtcagtattaccgagcgcccggactggcgtgagaaagcccacgaatacggtttcaattttcacaccatgtacggcgagccgtactggtgtgaagatgcttactacaagttgaccctcgcccaggttgaaaagctggaagaagtcaccgccgaactgcaccagatgtgcctgaaagtggtggaaaaagtgatcgccagcgatgagctgatgaccaaattccgcattccaaaacacacctggagttttgtgcgtcagtcatggctgactcaccagccatcgctttattcgcgtcttgatctggcatgggatggcactggcgaacctaaactgctggaaaataacgccgatacaccaacgtcactatacgaggcggcgttctttcagtggatctggctggaagatcagcttaacgccggtaacttgccggagggcagcgaccagtttaacagtctgcaagaaaagctaatcgatcgctttgtcgagttgcgtgaacagtatggcttccagttgctgcatctcacctgctgtcgcgacacggtggaagatcgcggaaccattcagtatttgcaggactgcgcgacggaagctgaaatcgctaccgagttcctctacattgacgatatcgggttaggtgaaaaaggtcagttcacggatttacaggatcaggtaatttccaacctgttcaagctgtatccatgggaatttatgttgcgtgagatgttctccaccaagctggaggatgcaggcgtacgctggctggaaccggcgtggaagagcattatctccaacaaagcgcttctaccgctactgtgggagatgttcccgaatcacccgaacctgctgcccgcttattttgcggaagatgatcatccgcaaatggaaaaatatgtggttaaaccgatcttctcccgtgaaggcgcaaacgtgtcgatcattgagaacggcaaaaccattgaagcagcggaaggtccgtatggcgaagaagggatgattgttcagcaattccacccgttaccgaaattcggcgacagctatatgctgattggtagctggctggtgaacgatcaacctgccggaattggcattcgtgaagaccgtgcgttgatcacccaggatatgtctcggttttatccacatatttttattgaataatcaatgatgccggatggcattcgccatccggtaattgttaacctatctgcaccgacagcatactcaggctgcccatttctataccatcgaccggaatggtaattggctcctgcccatcccacgcacctaagacatacaacaacggcagatagtgctccggcgttgggttcgataacgcgccaccttcatggtcgaggtaattcaccagaggatgctgctctaccgccccttgccacgtcagattcgctttcacatactcattaaacgacatcgcccaaggatatggtgaactatcaccgtgccacttcactgtacgcaggttatgcaccacgttgccactggcgaccaacattattccttcatctcgcagcgctgccagtttgcgccccatttcgaaatgccaggcggcaggtttgctactgtcgatactcaactgcaccatcgggatatcggcgtcaggatacatcttaatcagcacgccccaggaaccgtggtcaaagccccaggcttctttatccagcgtcaccgggaccggcgctaacagctcaaccagatgctgtgccagcacaggcgaacccggagcaggataatgcgtatcgtacagcgcctgcgggaagccaccaaagtcatgaatcgtgggcggcgtctccatcgcggtcactcctgttccacgggtaaaccagtgagccgaaaccaccacaatcgcttgcgggcgtggcaatgtcatccccaacttctgccagctgcgggtatacaaattatcttccagcacgttcatcggactaccgtgacctaaaaacaatgctggcatacgtgttgaagacatgatgatatccttaactaaaggtgtcattttgatatcctcacaatacgcttgttcggcggagtaagaacccggataacaatgatgatgatcatcagttattttgacgatctgcctgaaggtgaagatttataaggagttgtcgatgtcagtacctctcattctgaccatactggcgggggcagccacgtttattggcgcgtttctcggcgttctcgggcaaaaaccctcgaaccgcttactggcgttttcgctaggatttgcggcggggatcatgttgctcatctcattaatggaaatgcttcctgccgcactagcagctgaaggaatgtcgcctgtgttgggttatggaatgtttatcttcggtctgcttggctattttggcctggaccgcatgttgccacatgcgcatccgcaggatttaatgcaaaaatcggtgcagccgttgccaaaatcgatcaagcgcacagccattctgctcactctcggcatcagtctgcataacttcccggaagggattgccacctttgtcacggcgagcagcaacctggagctgggatttggcatcgcactggccgtcgctttgcacaatatccctgaaggtctggcagtggcaggcccggtttatgcggcaacggggtctaaacgcaccgcgattctgtgggcggggatttctggactagcagaaattcttggtggtgtgctggcgtggttaatcctcggtagcatgatttccccggtggtcatggcggcaatcatggcggcggttgcaggaattatggtggcgctctcggttgatgaattaatgccgctcgccaaagagattgaccctaataataaccccagctatggcgtactatgtggaatgtcagtgatgggattcagtttagtgctgctacaaacggcgggaattggttaaaaacaacatcagaagttgtccagcacatggacaacttctgccagcttcacgaaagccttattctaccttttcggctgtctcttctctcgtactgtttaagtatttgttccgcgcttcaagcagtgcgtctctgtcctggcgaaacgcccgacaataacgtttcaaatgcaggaaataacccaccacaaccagagcaatcaatacaatccagtaccaggcgataaacatccttttacccttaatatttaacaatactaaacatttagcgcataaatttcacatatcctttttcggatatattcatatggtcgcataataacggaacaattatatgattttgatcataatgaaaaagaatgcctgatattaatgaaattttctcatagaaagagaagcggaattaacatcttgcatagcggggcaaaataaaaaccgaagccagctacaacttcggtttcttgattaaggcagtaattaagcagcggttttcagctggctttacgctcatgtgcctgacggtatgccaccaggtcttcaatagtcacgagcgccatattgtgtttattggcaaactcaatgcactctggtgcacgcgccatcgtgccatcgtcattagtcagctcacacagcacaccagccggtttaaagcctgccagcgtcatcaaatcaatagtcgcttcagtatgaccgccacgcgtcagtacaccacctgcctgcgcgcgaagtgggaaaacgtggcccgggcgattcagatcagaaggttttgcgccatcggcaatcgctgcgcgaacggtcgtaatacgatcagcggcagaaacaccggtagtcacaccttcagccgcttcaatggtcacggtaaaaccggtgccataggcgctggtgttattttctaccatcattggcagatcaagttgtttacggcgatcttcagtgatgcacaggcaaacaataccgctaccgtggcgaatggtcagcgccatctgctcaacggtcatggtttctgccgggaagatcatatcgccttcgttttcacggtcttcatcatcaagcaccattacaccgcgtccttcacgcagcgcagccagtgcattttcaacacgttcgaaaggcgtaccaaaagaggaaagtagcgtctgattcatggtaaaaaaacctcactaaaattatggttaccagaatcagggcagtcttaggagtggcggcatatagccaaaataacgtgagcgggtccatgcccgacagaatcgttactctctcccatccggactctaaccgtcggccccggaattacaccggatctgctgtcctttgagttcgcacccaaagcgctcgcgggctttcaactgagttgatttaccgccggtggggaatttcgccccgccctgagaataagcggattcactataacgctaatgattagcggcagcaacgcatagcttcacataattctggtttatgacttacccttatcgcactacaatggcactcaacacctatcagtacagggaaactacaatgattgacccgaaaaaaattgagcaaatcgctcgccaggttcacgaatcaatgcctaaaggaatcagggagttcggggaagatgtggagaaaaaaatccgccaaaccctacaagctcagctgacgcgcctcgaccttgtaagccgtgaagagttcgacgtccaaacgcaagtcctgttacggactcgtgagaaactggcgctgcttgaacaaagaatgagcgaactggaaaatcgcagtactgagattaaaaagcagccagatccagagactctccccccaacgctgtaaacatttgtctttaatgcactgtaaattatgaattaatcctctaatttacagtgctttctattaccttatcgcttaattccattcagaatatcatcacaaaaatgaatgagtgcaattgaaaatataattgttatgtatttttttaagttttacttaatccatatttagataaactaatttcataaaacccgnaaagtnaaatataatattngaannntnnncaatccttaaataacagttactaatcattcattttctacttatatttatataaaggaatattatgtctgcttttaaaaagtcacttcttgttgctggcgtagcaatgattctttccaataacgtatttgctgacgaaggtcacggcattgttaaatttaaaggtgaagttatctctgctccatgttcaattaaaccaggtgacgaagacttaactgtaaatctgggtgaagtagcagataccgttctgaaaagcgaccagaaatctttggctgagcctttcactattcacctgcaagactgcatgttgagccagggtggaaccacttattcaaaagcgaaggttactttcaccacagcgaatactatgacgggtcagactgacctgctgaaaaacaccaaagaaactgaaatcggtggtgccacaggcgttggcgtacgtattctggatagccagagcggcgaagtgactttaggtactccggtagtaattacattcaacaatactaacagctatcaggaactgaacttcaaagctcgtatggaatccccaagcaaagatgctaccccgggcaacgtttacgctcaggctgactataagattgcttacgagtaatcacattaggccgggttcgcccggccacatcattaacggattaatgataagtggaacagatgtataaaaaattaaaattaaccacaataagcgaattgattaaaaatatttattgttcattatccgttctcatcattggttgtgcgtcagcttatgccgttgaattcaacaaagatttaatcgaagccgaagatcgtgaaaacgttaacctttcccaatttgaaactgatggccaattacccgtaggtaaatactcattaaacgctcttattaataataaaaggacgccaatccatctggacctgcaatgggtattaattgataaccaaactgcagtttgtctgactccagagcaattaacattattaggctttactgatgagattattgaagaggctcagcaaaacctgatcgatggttgttaccctatcgaaaaagaaaaacaaattacaacttatctcgataaagggaaaatgcaattatccatatctgcacctcaggcatggttaaaatacaaagatgcaaactggacgcctcctgaactttgggatcatggtattgctggggcatttcttgactacaatttatatgcctctcattatgcaccacatcagggcgataattcacaaaatataagttcctatgggcaggctggggttaatcttggggcctggcgcctgcgtactgattaccagtacgatcagtcatttaacaatggcaaaagccaggcgaacaacctggattttccgcgtatttatttgtttcgcccaatcccagcaattaatgcaaaactaactataggtcaatacgatactgaatcctctattttcgactctttccatttttctggcgtttcgttgaaaagcgatgagaatatgttgccgcctgatctacgtggttacgcaccgcaaatcacgggtgttgcacaaacgaatgcaaaggtcactgtctcacagaacaaccgtattatttatcaagaaaatgttcctcctggcccatttgctattactaatttattcaatacattacaggggcaactggacgtcaaggttgaagaagaggacgggcaagtcacgcaatggcaagttgcatctaatagtattccttatctgacgcgtaaagggcagattcgctacaccactgctatgggtaaaccgaccagcgttggtggtgattccttacaacaacccttcttctggactggtgaattctcatggggttggctgaacaatgtatccctgtatggtggttcagttttaacaaaccgtgattatcaatctctggctgccggcgttggctttaaccttaactcattgggttcattatcttttgatgtcacacgatctgatgctcagttgcataatcaggataaagaaacgggttatagctaccgcgctaactattcaaaacgttttgaatctaccggtagccagctcactttcgctggttaccgtttctctgataaaaactttgtgacaatgaatgaatatatcaatgacactaaccattacacgaattatcagaatgaaaaagagagttatattgtcacgtttaaccagtatcttgaatcattaaggttaaatacatacgtaagtttggctcgtaatacttactgggacgccagcagtaatgtgaattattcattttcacttagccgcgattttgatatcgggccattaaaaaacgtctccacttctctaacatttagccgaataaactgggaagaagacaaccaggatcaactgtacctaaatatttcgattccctggggaaccagtagaacattgagctatggtatgcaacgaaatcaggataacaagatttcgcatactgcttcgtggtatgactcttccgatcgaaataattcctggagcgtttctgcttcaggcgacaatgatgaattcaaagatatgaaagcgtcactacgcgccagttatcagcataataccgagaacggtcgtctctatctctccgggacatcacagcgagacaattattattctctgaatgccagttggaatggttcattcacggcgactcgtcacggagccgctttccatgactatagtggtagtgctgactcgcgttttatgatcgacgcagatggtgcagaagatattccgttgaacaataaacgcgcggtaactaatcggtatggcatcggagttattccatcagtcagcagttacataacaacatcattaagcgttgatacccgaaatcttccagaaaatgtggatatcgaaaactcggttatcaccaccaccttaaccgaaggtgctattggctacgccaaacttgatacccgcaagggctatcaaatcatgggggttattcgcctggcagatggtagtcacccaccactggggattagcgtaaaagataaaaccagccataaagaattaggactggttgctgatggcggctttgtatacctcaacggcattcaggatgacagcaaacttactttacgctggggtgataaatcctgttttattcaaccacccaatagcagcaacttaaccaccggaacggttattttaccgtgtattagccaaaattaattcaggatgaaactaatgcgctacttaaacacaaagaatctcattgcagcaggagtattactcgcctgcatgagcagcattgcctggggtgccatcatcccggaccgtacccgtatcataatgaatgagtcagataaaggggaagcattaaaacttactaatcaaagcaaaaatctaccctatctggcgcaaacatggaaagaagatacgaaaggcaataaatcacgtgactttattgtcacggttccccctatggtacgtttaaatcccagtgagcaaattcaaataagaatgataagtcaggaaaaaattgctcaactgcctaatgacagagaaacgctcttctattttaacgtgcgagaaataccgccaaaaacagataaaaaaaatgtgatgcaagtcactatgcagcacgcattgaaactattctggcgaccaaaagctattgaattagaagatgatggggtaatgtcttacgaaaaagttgaaatcatccgtagaaatgatggttcgatccgctttaacaataagatgccttatcacgttacgctgggttatatcggaacaaacggaatcacaatgttgccacaaacgcaaagtttaatggtaaccccttatagccatgcagatacgcagtttaaaaatgttccgtcagcttttcaggttggttatatcaatgattttggtggattaagtttttatgaaataaactgcccgacggttaataactcttgtaatgtttccgtagccaaacgagataaataatatgcgctacttattaattgtaattatatttattataggttttagtgcattacctgtatgggcaatggactgctatgctgaacatgaagggggaaataccgtagtcattggttacgtaccaagaatttctatccccagtaatggtaaaaaaggtgataagatctggcaaagcagtgagtattttatgaatgtcttctgtaataatgcattacctgccccatcacctggagaagaatacccatcagcctggactaatataatgatgtttttaccaggcggtcaggacttttataatcagaactcctatatttttggcgtaacatacaatggagttgattatgattcgactgcccctaatgctatcgcagcaccagaatgcattgatataaaaggagcgggtacctttaataatcactataaaaaccccgctgtctgtagtggaggtcctgagcctcaattatcagtaacctttccagctcgcgtacaactctatattaaattagcaaaaaatgccaatagagttaataaaaacctggtgttacctgatgaatatatcgctctagagtttaaaggtatgagtggcgcaggagctatagaagtagacaaaaatttgaccttcaggattcgtggattaaataatattcatgtccttgactgctttgttaatgtcgcactggaaccagctgatggcgttgttgactttggtaaaataaattcccgaacaattaaaaataccagcgttagtgagacgtttagtgtagtcatgacaaaagatcctggtgcggcctgtactgagcaattcaatattttagggagctttttcactacggatattttgagtgattatagccatctggatatgggtaatggactgctattgaagatatttcataaagatggaacagcaacggaatttaaccgcttctcacaatttgcttctttttcatcgtctagtgcaccttcggtcaccgcaccattcagggcagaacttagtgcgaatccggcagagactgttgttgagggaccgtttagtaaagacgtcatcctcaaaatcacctataactagcatctaatacaaacactaaaacgggccatcaggcccgttatatcagtgctctaactccagctctcttgcctgcatcatctgttgacaataccaggcataacgtgcgcaaaaccaggttctatgttcttcatccatgttaccagtaacggcaagaatatcgaccgggcgaccttctgcgtgcattctggcaaaactacgcgccaggaaatcgaaattatttaaagaattaagactatgatccataagcacatcctccggttatcgcataccttttaaggccatatgctttttctgatttcagtattccccaatcagtgtagtgcctttaaacataacgtgcgtaaatatattgtccccgatcacactttttagtgaaaaataaaaaaccatattaaaaaactttctcttccagaacttctctaacatgtgttattattaacaaagataaatgtaagcaaggaaactatcctaaagtaaatattgcgtcactaaatggacattggagtgacatatgattttattcgccgactataataccccttatcttttcgctatttcctttgtactgttgatcggccttttagaaattttagcgcttatctgcggtcacatgctctccggtgctcttgatgcacatcttgaccattatgattccataaccacaggtcatattagccaggcacttcattatctcaatatcggaagattgccagctctcgtcgttctctgcttgctggctggtttttttggtcttattggcatcctgttgcagcatgcctgcatcatggtctggcaatcaccactgtcgaacctgttcgtggttcctgtcagtttactgtttacgattattgcggtgcattataccggtaaaatagttgcgccctggattccacgcgaccatagttcagctattacagaagaagaatatattggtagcatggcattaattaccggtcatcaagccacttcaggtaatccctgcgaaggaaaactcaccgatcaatttggccaaatacattatttactactggagcctgaagaaggaaaatttttcactaaaggagacaaagtgttaattatttgccgactttctgcaacgcgatatttggcggaaaacaatccctggccacaaatattgtaatttattaatcaaaaggaaatttaataatggatgatattgttaattctgtgccctcctggatgtttaccgcgattattgccgtatgcattctgtttattattggaattattttcgccaggctctatcgtcgcgcttcggcagagcaagcttttgttcgtactggtttaggtgggcaaaaagtggtgatgagcggtggcgcaatcgtgatgccgatctttcatgaaataatccccatcaatatgaatactctgaagctggaagtcagccgctcaaccattgatagcctgattacgaaagatcgtatgcgtgttgatgtagtagtcgctttctttgtacgggtaaaaccgtctgtagaaggcatcgccactgcggcgcagacgttggggcaacgcacgctatcaccagaagacttacgtatgttggttgaagataaatttgtcgatgccctccgtgcaacagctgcacaaatgaccatgcatgagttacaggatacccgcgagaacttcgtgcagggagtacaaaatactgtcgcagaagacctgtcgaaaaacggtcttgagctggaaagcgtttcacttaccaactttaaccagacctcgaaagaacatttcaatccgaacaatgcctttgacgccgaaggtttaaccaaactgactcaggagacggagcgccgtcgtcgcgaacgtaacgaagttgaacaggatgtagaagttgcggtgcgtgagaaaaaccgtgatgcactttcgcgcaagttggagattgaacaacaagaagcgtttatgacgcttgagcaggagcagcaggttaaaacccgtactgccgaacagaatgcacgtattgcggcttttgaagctgaacgtcgtcgtgaagcagagcagacgcgaattctggcagaacgacaaattcaggaaacggagatcgagcgcgagcaggccgtccgctcaagaaaggttgaggctgaacgtgaagttcgtattaaagagatcgaacaacagcaggtcaccgaaatcgccaaccagacgaaatctatcgctattgccgccaaatcggaacaacagtcccaggcagaagcgcgtgctaaccttgcactcgcagaagcagtaagtgcgcaacaaaacgtagaaaccactcgccagaccgcagaagccgatcgtgctaaacaagttgccctaatcgctgccgcgcaggatgcagaaaccaaagcggttgaactgaccgtgcgggcgaaagcagaaaaagaagccgcagagatgcaggcggcggctatcgttgagttagccgaagctacacgtaaaaagggtctggcggaagcagaagcacaacgtgcgctgaacgatgctatcaacgtactttctgatgaacaaaccagccttaaattcaaactggccttgttgcaggcgctacctgcggtaatagaaaaatccgttgagccgatgaaatctattgacggtatcaagattattcaggtcgatggtctgaatcgtggcagcgctgcgggtgatgcaaacacgggtaatgtggggggcggaaacctggcggaacaagcattatcagccgctctctcttaccgcacacaggcaccgctgattgactccttgctcaatgaaattggcgtttcaggcggctcactggcggcattgacttcacccttaacctcaacaactcccgtcgccgaaaacgtagaataaattttcagctatgaacgtccctggcacaaaaagccggggattttttatatctgcgttccgctaaaaactgcaaatgatcaggtcgttgcaacgttttgcgtgaccgctcggggaaggcaaaactgcctctgggaaagcgttgcgcgaggtccggcgctcatcaacaatcggggagtcagcaaagggctgaaacgggaaagcccctcccgaggaaggggccttacagaaggaaagggttatgatgaagctcgtcatcatactgattgtgttgttactcgtaagtttcgcagcttattaacagccaatcagaggggggagaaatcctccctcacccttgttcctttactttaggttgaaaaaaaatcagcgtcaagaaggtttcattaacacatatccctggcccaaaaagccggggattttttatatctgcgttccgctaaaaggtgcaaatgctcaggacgttgcagcgttttgcgtgaccgctcggggaaggcaaaactgcttcagggaaagcgttgcgcggggtccggcgctcatcaacaatcggggagtcagcaaggggctgaaacgggaaagcccctcccgaggaaggggccttatagaaggaaagggttatgatgaagttcgtcatcatactggttgtgttgttactgttaagtttcccgacttactaacaactgatcagaggggggagaaatcctcccttacccttgttcctttactttaggttgaaaaaacaacagcgtcaataggcctgcctgctacgaagcgagatctgtgaaccgctttccggttagccttttttatcctgttggatcttcttgatgatgttagtggtcgagcaaccgtcttcgaagttgagcaccagcacttcgccgccgttggcccagacttctttactcccggcaatttcttctggtttatagtcgccgcctttcaccagcagatctggcaggatcccggcgatcagacgctgcggcgtgtcttcttcaaacgacactacccagtcgaccgcttccagtgcgcccagcacaatcatacgctgctcgagtgggtttaccgggcgggaatcccctttcagccgtttggtggaggcatcgctgttcacagcgacaatcagacggtcacccagtttgcgagcatttgccagataggagacgtgcccggcgtgcaggatgtcaaagacaccgttggtcattaccaccttttcgccgcgtttacgcgctgccgctacagcaagcttcagttcctcttcggtcatcacaccaaagccggtatctgcgcgcccacgcactgcattttccagctcgatcggcgaaaccgtggaggttcccagtttgccgaccaccacgccagccgccgcattggcaaagaagcaggcttcttccagcgaattacccgctgccagcgttgccgccaggacgccaatcaccgtgtcgcccgcaccggtaacgtcatacacttcctgcgcctgggttggcatatgcagcggcgctttacccggttgcagcagcgacataccctgttcggaacgggtcactaacagagccgagagttcgtaatcggcaatcagtttcatgccgcgctcaacaatctcttcttcggtcttacatttaccgacaacagcttcaaattccgagagattcggcgttaacagcgtagcgccgcggtagcgctcaaaatcggtaccttttggatcaatcagcaccggaacgcccgctttacgcgccagttggatcatctgctgtacgcttgccagcgcacctttggcgtagtcagaaagcaccagcgcgccaatcgaactcagcgcctgattaatccgctcgtgcagcggctgcggatcaacaccttcgaaaccttcttcaaaatccaggcggatcagctgttggttgcgggaaagtacccgtaatttggtgatagtcggatgcgtcggtacagaaacgaagtcgcatttgacgttgacgtcggccagagatttactcagcgcacgcgccgcatcgtcaatgcccgtcagcccgaccaggcgagcattggcaccgagagaagcgatgttcattgccacgttagccgcgccgcccggacgttcttcgatggtattgactttaaccacgggcaccggcgcttccggcgagatacggctggtgggaccgtaccagtaacgatccagcatcacatcaccaaccaccatcactcctgcacgttcaaactctggcagcgttactttcattcctgtctcctgagagattcaaaatttgcgcgcgataataccatacttcattcttccaccagccacttctgccagcttgcccgcaccagttcacgctctgcggtgaagcaatcctccggcacatggcccggcaattcctgtaatgccagatgatgaagttcatcgcgcagcgtagtataagcacgggtcagcgccatcgcttcctgctcttccataatgtcgttttgcgccagtagttccagaatgcgcacgttgtctgaccagcgcgttaacttcggtttttcatgagcgtagcgcaacaccagatattgggtaataaattcgatatcggtaattccgccttcatcagctttgatatcaaagcgatcgcgatgtttattgccgagatgagcgcgcattttctcgcgcatttcccgcacttccgtttgcagagttttaccttcacgcggcagcgtcataatctcgcgacgcaccgcgtcaaagtgcgcggtgagctgcggatcgccgtacactacccgcgcacgcaccagcgcctgatgttcccacgtccaggcctcgtttttctgataatcggcaaatgcttctgcggatgtcaccagcattcccgcggccccggacgggcgtagccgtgcatccacttcatacaaaatgccggaagaggtacgcgtactgaacagatgcataatgcgttgcgccagacgcagataaaactgtcgcccgtcgatttcccgctcgccgtcagtcatcgcatccattgggcaatcatggaggaagatcaggtcaagatcggaactgtagcctaactcccagccgcccagcttgccgtagccgaccaccgcaaaaccacggccttcgcgatcgttgaggtgatttggcttaccgtagcgggccaccatttgaacccacgcctgctgaacgacggcatctatcatagcctctgccagccaggttaagtgatcgctcactttcatcaccggtagcgtaccagcgatatccgctgcggcgatgcgtaacagctgcgcctgtttgaactgacgcagcgcctcaagctgttgctcttcgtcatcttccggcacgcgcagcaaatactggcgcaactcatcgcggtaggcatcggtcgccgtcggctggtaaagggtgtttggatcgagcaattcatccagcaataatggataacgcgccagttggctggcaatcatcggcgacgcggcacacagagaaatcaaatgtttaagcgccgcggggaattcactgagcaattctaaataggtggtgcgggtaacaatccccaccagcaaggcggtaatgcgcgacagcgtaacggcagcgtcttcacgcgcacagacatcacttagcagatgcggcatcagatggtcgagcacctgacgtcctcgcggcccgatggtgcgcttatccagctctttgcggaaatcggcaatcagcgttagcacctgtttgcgatcatcctcgctaagatgcgccagcactggcgtagtgtcatcttcctgcaacgcatcctgccacagctcacgccactgttccgacagcgactcttcctgagtttcactttcgtcgtcgccaatcaattcattaaacacccggcgcacattggtcatatgtgcggtcagcgccccggtcagttgcggccagtcagcaaagtccatcgcccacgccagccgcgcacggttaagctcatcagaaggaagcgtctgggtttgttcgtcgttaatgctttgcagcaggttttccagacgccgcaggaacagatacgccactcgcaattgttcagcatcgttttcagaaagcagatgcagcgcggcaatgacgctgagcgttggcagtaaagagcgcgactgcagcgacggttcgcgcccaccgcgaatgagctggaacacctgaacgataaattcaatttcgcgaatgccgcctgcgccgagtttgatattgtcggtcaaaccacgtcgacgcacttcacgggcaatcatccctttcatgttgcgcagcgactgaatcacgctgaaatcgatgtaacgacggaaaacaaacgggcgcagcatcgcacgcaactcgttagcatagacgccttcgctatcgcccataatccgcgccttgaccatcgcgtaacgctcccagtcgcgcccctgctcctggtaataatcctccaacgcggcaaagctcagcaccagcgggccactttcgccaaacggacgcagccgcatatccacgcgatagacgaagccatcctgcgttggttgatccaacactttaatcagccgctgccccatgcgggtaaaaaactgcgcgttatccagttcccggcgtccgccctgcgtacaaccatgttccggccaggcaaaaatcagatcgatatctgaggagaaattcagttccccaccgcccagcttacccatgcctaaaatcagcagcggttgcgcttcgccctgcgcattgcacggcgttccccactcgcggcagcaagcgtcatacagccagtcacgcgcggcgacaatcagcgtctccgccagatggctgagctgctgcaatatgctctcttcagtaaccaaagccagcgtttgcgcccaggcgatgcgcaccataatgcgccgccggaatagccgcagctcgcgcattaacccggcttcgtcactcacattactgagcgcctcctgcaaccatgccgcgtaatgctgccattcgtcggcctgcggcggttggctttccagttccgtcagccactctggatgcacaatcacgctgtcctgcacaaaatcactaaaagtaagtactgacttcgcctgtgcgctaagtgattcctcggctaaaggctctggcagccgctcaacaacggtctgccagtactgctgtaacggtgaagagagcggcttcataagcgattttatccttgcctgattaacgttttccgctgtgcaaccagaacggttcctgattgtttgcctcattacggaaatgttcaatttcaatgcgttgcccggtcgcaatagcgtgacgcagcccctgccagttctccagccaggcttgcgcgacgacaggatcatagtaacctgccagcagcagtattgagtcaatatcacgcgtcaggcgtggcaactgatcatggtagcgatcgcctaacggctggcagaaaacgcttttcagttcagcggcatggcgggaaagatggatatcggcaaagcgtttgaaggaatcgctgattttaccctgcgctttggcatctaaaaacggctgccaggctttgcttaccaaccattcggtcaacgccagctttgccattgccgtttcggtagagtagaccgccgtcacggcagaaaccgcagaagcgatggtcgcttcgcattgagtcagcaaatcacgtaagtgagtgctcgctttacgcggcacaatgccaccgaacagcatcagtgcatggcgaacaaggccaatggctgccagcacctgctctttcgccgcatcgttgccgcgtacccacagttcttcatgatactgccattgcgctaacgccagctcgaacgccgcttccagcccctgttccacatcggcttttgccgcaacatgcaaaatggtggtcggtttgatttcacgcgccggattgccctgcgccagatgatagccacgcgccgctttgctcaggctgccctggcgtaatccggtttgcgataccagttggttcgccagtttcagcaccgcgcgcgtgtcgccgctaagcagttccagttccagctcacagataggttcagcaaattcccccgctttcacctccccctgatcgagagcgatttcaattcggctgtcatcgaccgccaccagccatttttcgcgataaaaatcggtgctgaacagcggttgtacgcgggaagcgagatcggcgggcaattcgccgttcggccagacttccgtcggtaactgcgccaggtcgagcgtcggttcgctcaacgccacgttatattccgggcgctggtgtaagccgcctgtcactcttcctgcaactttcatggtcatctcatagcgaccgttttcgccacgaatacgtaagcccatatcgtgcccacgcagccagttatccggcgtttcgtagtaaatattcagcaactgcacggggtcatggtgctcgccgcccagcgtattgagatggtcacgcaacgcctcaacggcactgtgattaacaataaactttaattcgatttcctgagccatggcctttacttatcggttatgtcacataagtgacgatgaacggcgaacttaatgcgatcttttttgtcagtagatagtattttgcgccaaattgccatgcaacgggcaatttgacgggcgtaaaagtttgaagcagtggcaagacctgacacagaggattccgattgatgtcgaatgctttgcgtagcgacactgatgccactactatcgttccactttccatgacaataacgacagcctgatgccaaaattacgcctgatcggattaactttactcgcacttagcgccactgccgtctcacacgctgaagaaacgcgctatgtttctgatgaactgaatacctgggtccgtagcggtccgggagatcattatcgcctcgtgggcacggttaacgccggcgaggaagtgaccttattacaaactgacgccaacaccaattatgcccaggtgaaagacagctctggccgtaccgcctggatcccgttgaaacaacttagcactgagccaagcctgcgctcccgtgtgccagatctggaaaatcaggtcaaaaccctgaccgataaactcaccaatatcgataacacctggaatcagcgcaccgcagaaatgcagcaaaaagtggcgcagagcgacagcgtgatcaacggattaaaagaagaaaatcagaaattgaaaaacgagctgattgtcgcgcagaaaaaggtcgatgccgccagcgtacagttggatgacaaacagcgcaccatcatcatgcaatggtttatgtatggcggtggcgtgctggggcttggcttgctgctcggtctggtactgccacacctgatcccaacgcgcaaacgcaaagatcgctggatgaactaaatcgccttcttcgttgcactgtcttattattaggaattgtgtatttgacgaagggatgatggcgtgaagatttatctggtcggtggtgctgttcgggatgcattgttagggctaccggtcaaagacagagattgggtggtggtcggcagtacgccacaggagatgctcgacgcgggctaccagcaggtaggccgcgattttcctgtgtttctgcatccgcaaacgcatgaagagtatgcgctggcacgtaccgaacggaaatccggttccggttacaccggttttacttgctatgccgcaccggatgtcacgctggaagatgatcttaagcgtcgcgatctgaccattaatgcgctggcccaggacgataacggcgagattatcgacccgtacaacggtctgggcgatctgcaaaatcgtctgttgcgccatgtttcccccgcttttggcgaagatccgttacgcgttctgcgcgtggcgcgttttgctgcgcgttatgcccacctcggttttcgtattgccgatgaaactctgacgctgatgcgcgagatgacccatgcgggtgaactggaacacctgacgcctgaacgggtatggaaagagacggaaagcgccctcaccacccgcaatccacaggtgttcttccaggtactgcgcgattgtggcgcactgcgcgttttattcccggaaattgacgcactgtttggcgttccggcccctgccaggtggcatccggaaatcgacacgggtattcataccttaatgacgctctcaatggcggcgatgctgagtccgcaggtcgatgtccgtttcgcaactttatgccacgatctcggtaaaggactgacgccgccagaactttggccgcgtcatcatggtcacggtccggcgggtgtgaaattagtggaacaactctgccagcgtctgcgcgtgccaaatgaaattcgcgatttagccagactggtggctgagtttcacgatctcatccacaccttcccaatgctgaacccaaaaactatcgtcaaattgtttgattccatcgatgcctggcgtaaaccgcagcgtgtcgagcaactggcgctgaccagcgaggctgacgtgcgcggcagaaccggttttgaatcagcggactacccgcaaggccgttggttgcgcgaagcctgggaagtggcgcagtcagtgccgacaaaagcggtcgttgaagcgggatttaaaggtgtggagattcgcgaggagctgacccgacggcggattgcggcgatagccagttggaaggaacaacgttgcccaaagcctgactgagtataaaactaaacgttaacacgaaccatcccctcgccccttcggggagagggttagggtgaggggaacagaccagcaccggtgcgaacaatcacccccaccccggccctctccctacagagcgagggagaaaaccaggcctgctcccgaaccttttctcaatcaaaagaacacgacgtacaccgcagccgccacaataaagcgataaatggcgaacgggataaacgaaatgcgcttaatcaattgcaggaaggttttaatcgctatcagcgccaccacaaaagcggtgataaacccaacggcaaacatcgggatatcgccggttgtcaggaagccccagcttttgtagagatcgagcgccgttgcgcccatcatcatcggtaccgccagcaggaacgagaactcggaagcagcgtaacggctcacgcccatcagcatcccacctgaaatggtggccccggaacgggagaaacccggccacagcgccagacactggaaacagccaatcataaacgcctgacgataggtcatatcatcaagacccggcgcacgcggctctttcggcttcaggcattcggcggcaatcagcaacaaaccgccaacgaccagcgcatacatcacatttatcgggttaaacaatgacttaatcgtgtcgtggaacaatagccccagtaccaccgccggaatcatccccagcaaaatgtggatcagcgttaaacgacctttgctttcaccttcgtgctgcaacgggcggccaaagtggatgccaatcaggccaaacagacgccgccagaacatcactactaccgccagaattgatcctaactggatcacaacttcaaaggttttcgccgtgtcgccctcaaaccccaacaagtgaccgacaataatcatatggcccgtgctggataccggcagaaattctgtcaatccttcgaccacacccaatattgccgctatcagcagcgagtgcatatcgctcatcaataaacccctaaattattaaaatgtaccgcttgtccggactactgcagtaagaccaggttataaccgtttggtttaacagctgtaaaattaattattttctttcagattattgccacgctcaatgattacgccaacattctccgcccgcgccactgcgcctggcttgctgagtttgatacgcacccacggcgagttgaagcgtgctaacagcagctccgccacctcttcagccacgcgttccaccagcgcaaaacgcgccccctcgacgtggctgaccaccgtttctgcaatgtcagcgtaactgaggcaatccgccacatcatcacttttcgccgctttacggttatcccatgccatttcgatatcgaacactaacttctgttcgatggtctgttcccagtcgtaaacaccaatagtggtgattaccgaaagttgctctataaatacaatatccatcacgtcctgcctgctttttggctaaccggataccacttccggcgaaatgtgcgtattatccacagattcatcgttgaacacgaattttcaaaacggaacagcttatgagtgcaatcgcgcctggaatgatcctcatcgcgtacctctgcggctccatttccagtgccattctggtttgccgcttgtgtgggctgcccgatccgcgaaccagcggctccggcaatccaggcgcaaccaatgtgttacgtatcggtggcaagggagcagccgtagcagtactgattttcgacgttctgaaaggaatgttgcccgtctggggcgcgtatgaattaggtgtcagccccttctggctaggcttaattgccatcgccgcctgtcttggacacatctggcccgttttcttcggatttaaaggaggaaaaggcgttgctaccgcttttggtgccatcgcacccattggctgggatctcaccggagtaatggcgggaacctggttactgaccgtgctattgagcggatactcgtcgctgggagcgattgtcagtgcactgattgctccgttttatgtatggtggtttaagccacaattcaccttcccggtttcgatgctctcttgcctgatcctgctgcgtcatcatgacaacatccagcgtctgtggcgtcgtcaggagacaaaaatctggacgaaattcaaaagaaagcgcgaaaaggatcccgagtgatttctggtggatctacatgacctgatagccttcatcgggcttgcccagccgttgctggcaccatgccgccagaaattccacgcagacacgtaatttcatgctgcgatagagcggctcccggtaaacagcccagatattggcgctttgtgcatactccggcaatacttgcaccagtttgccactctccagaaacggcaacacatcccactcggaacgcagcataatccctttgccctccagcgcccattgcaacactatctcgccgctattggaggaaagatgcccgctaaccttcaccgattttttctcctgaccgttccccaactcccatattccgtgggtcatatcgcgctctttggtcaccagacagtcatgacgacttaattcctgtaatgattgtggctgcggatatttttgcagatactcaggtgctgcgcataatattcttttatttttcgttaacagatgcgcaatataataatcaggaatttcgtcattaatacgaatatccagatcaatattatcctgcactaaatcaatttgccgatcgaacaattcaaaatgcacctgtaactcaggataattgcgcataagttcggtaatggctggcgcaatatggctgcgcccaaaaccaaaactgcaaccaatacgaatcatcccctccgggcgcgttttgatttgcgtgacgtcatcgaccagtcgctgatattgggtgaggatttccagcgcatgttcgtaacaacgttggccactttcagtcagcgccacgccgcgagcggagcggttcagcagcgttgttgccagcgtattttcaaggatttggatccgcttggtgacaaatgcaggcgtttgcccaagcgtcgccgctgcagcactaaaactcccgctgtggacgatttctaccagtacctgcaagtctttggctaaaggccagctattcagcatcgttaattatccgcagttgtgataagcgcagtgtatttcgcaaaacattgccattccctgctctggcgcaatattcattcttattttcgcgttgattcacgaactgttaattacatattcacggtggcaaaaaatataaaaccacatttttagtggtagtttgtggcggtgaatttttccagacaaatacaaaaactggagttgccatgatgagcgaaagtaataagcaacaggcagtgaataagttgacagagattgtcgctaactttaccgccatgatttctacccgaatgcctgatgacgtggtggataaactaaaacagctaaaggatgccgaaacgtcgtcgatggggaaaattatctaccatacgatgttcgacaacatgcaaaaagcgattgacctgaatcgtcctgcctgtcaggacaccggggagattatgttcttcgttaaagtcggttcccgcttcccactgcttggcgagctgcaaagcatactcaaacaagccgtggaagaggcaaccgtcaaagcgccactacgtcacaatgcggtagaaatttttgacgaagtaaacaccggcaaaaataccggtagcggcgtaccgtgggtcacctgggacatcatccccgacaatgacgatgcggaaatcgaagtttacatggcaggcggcggctgcacgctacctggccgctcgaaagtgttaatgccgtcagaaggctacgaaggcgtggtgaaattcgtcttcgaaaatatctccaccctcgccgtaaacgcctgtccaccggtactggtgggcgtgggcatcgccacctcggtggaaaccgccgccgtactctcgcgtaaagccattttgcgtccgattggcagccgccatcccaatccaaaagcggcagagctggagctacgcctggaagaaggactcaaccgtctggggattggtccacaagggctgaccggcaacagttcagtgatgggcgtgcatatcgaatctgccgcccgccatccgtcaaccatcggcgttgctgtctctaccggctgctgggcgcatcgtcgcggcacgctgctggttcatgccgatctcacctttgaaaatctgtctcacacccggagcgcgttatgaaaaagatcctgacaaccccgatcaaagctgaagatctgcaagatattcgcgtcggcgatgtgatctacctgaccggtacgctggtgacctgccgcgacgtttgtcaccgccgtttgatcgaactgaaacgtccgatcccttacgatctcaacggcaaagcgattttccacgctggccccatcgtgcgcaaaaacggcgacaaatgggagatggtctccgtcggcccgacaaccagtatgcgtatggaaagttttgaacgtgaatttattgagcagaccggcgtgaaaatggtggtcggcaaaggcggaatggggccgctgaccgaagaaggctgtcagaaattcaaggcgctacatgtgattttccctgcaggctgcgcggtgctggcggcaacccaggtggaagagattgaagaagtgcactggacagagctcggaatgccggagtcgctgtgggtctgccgggtcaaagagttcggcccgctgattgtctctattgatacccacggcaacaacctgatagccgaaaacaaaaagctgttcgccgaacgccgcgatcccatcgtggaagagatctgcgagcacgtccattacatcaaataaccctcccggagaggctcgccccctctcctttttcgcaggcataacacgatgaaaccttccactgaatggtggcgataccttgcgccgctggcggtcatcgccattattgctctaattccggttcccgcagggctggagagtcatacctggctctactttgccgtttttactggcgtgatcgttggactgatcctcgaaccgtgccgggtgccgtggtggcgatggtgggtatctccatcatcgccatactctctccctggctgctgttcagccccgaacagctcgcccagccaggctttaaattcactgcaaaatccctctcgtgggcggtttccggtttttctaattcggttatctggctgattttcgccgcctttatgtttggcacaggctatgaaaaaaccgggcttggacgccgcattgcgctgtttctggtgaaaaagatgggacatcgcacgctgtttctcggctatgcggtgatgttctccgagctgatcctcgcacctgtaacaccgtccaactcggcgcgtggtgcggggattatctatcccatcatccgtaacctgccaccgctctatcaatcacaaccaaacgacagcagttcgcgcagcattggctcgtacatcatgtggatggggattgttgccgactgcgtgaccagcgccattttcttgacggcgatggcaccaaacttgctgttaattggactgatgaaaagcgcatctcacgccacgctgagttggggcgactggttcctcgggatgttgccgctcagtattttgctggtgctgctggttccctggctggcttatgtgctgtacccgccggtactgaagtctggcgatcaggtgccgcgctgggcagagacggaactgcaggcaatgggcccgctctgttcgcgtgaaaaacggatgctggggctgatggtaggcgcgctggtgctgtggattttcggcggtgattatatcgatgccgcgatggtcggttacagcgtggtggcactgatgctgcttctgcgcattatcagttgggacgacattgtcagtaataaagcggcgtggaacgttttcttctggctggcctcgcttatcaccctcgctaccggactcaacaacactggttttattagctggtttggcaaactgttagcaggcagcttaagcggttattcgccaacgatggtgatggtggcgttgattgtggtgttttatctgctgcgctactttttcgccagcgccacggcgtatacctccgccctcgcaccgatgatgattgccgctgcgctggcgatgccggaaatcccgctgccggtgttctgcctgatggttggcgcggcaattggtctggggagcattcttacaccatacgccaccggacccagtccgatttactacggtagtggttatctgccaacggtggattactggcgactgggggcgatttttggactgatattcctcgtgttgctggtgattaccggcttgctgtggatgcccgtggtgttgctttaagtgaggacggtgccggaaattgctctccggcaccggatagttttacgcagccggtaactctgccagtggccagcgcggacgcacgctaacgccgagatccgccgtcgcgcctgctttaaaccgcaccattccggcataggcgatcatcgcgccgttatcagtacaaaattccggacgcgcgtagaacacttcgccgcggcgttttttcatcatttccgccagcttcgcccgtaacgtgcggttagcactcacgccgcccgccatgaccagtcgcttaaagcccgtctgatccaacgctcgcttacacttaatcatcaacgtatcgaccaccgcatcttcaaaggcgcgggcgatatcagcacgcgtctggtcgtcggtgccgttgtcacgaatcgtgttcgccgcaaaggttttcagaccagaaaagctgaaatccagccccggacggtcggtcatcggacgcgggaaaacaaagcgcccggcagtaccctgagccgccattttcgacagtaacggtccgccaggataatccagccccagcagcttcgcggttttatcaaacgcttcaccggcggcatcatcgatagactcgccgagcagctcgtactgaccaatgccagtcacgctgattaactgcgtatgaccgccggacaccagcagcgcgacaaacggaaattccggcgggttatcttccagcatcggcgctaacagatgcccttccatatggtgtaccgggattgccggaacgttccaggcaaacgccagagaacgccccacggttgcgccaaccagcagtgcgccgactaatccagggcctgcggtataggccacagcatcaatgtcttttgccgttaagccagactcctttagcgccgcctggatcaacggtacggttttgcgcacgtgatcgcgggaggccagttcaggcacgacgccgccgtagtcagcgtgcaatttcacctgactatacaattggttggctaacaaacctttttcatcgtcgtaaatggcgatgccggtttcatcgcaggaagtttcaatacccagtacacgcatgacttgttttacctcgctttattaccgcgcagtgtaggaccaatgcgggttgatgtaaaactttgttcgcccctggagaaagcctcgtgtatactcctcacccttataaaagtccctttcaaaaaggccgcggtgctttacaaagcagcagcaattgcagtaaaattccgcaccattttgaaataagctggcgttgatgccagcggcaaaccgaattaatcaaaggtgagaggcacatgccggtaattaaagtacgtgaaaacgagccgttcgacgtagctctgcgtcgcttcaagcgttcctgcgaaaaagcaggtgttctggcggaagttcgtcgtcgtgagttctatgaaaaaccgactaccgaacgtaagcgcgctaaagcttctgcagtgaaacgtcacgcgaagaaactggctcgcgaaaacgcacgccgcactcgtctgtactaattccccgagagcgttgctctccgatcagaccgagttgtagttgtaaggccgtgcttccgaaaggaatgcgcggcttattttcgtttatgaattgctaaaaatcggggcctatggctggacgaatcccacgcgtattcattaatgatctgctggcacgcactgacatcgtcgatctgatcgatgcccgtgtgaagctgaaaaagcagggcaagaatttccacgcgtgttgtccattccacaacgagaaaaccccgtcattcaccgttaacggtgagaaacagttttaccactgctttggatgtggcgcgcacggcaacgcgatcgacttcctgatgaactacgacaagctcgagttcgttgaaacggtcgaagagctggcagcaatgcacaatcttgaagtgccatttgaagcaggcagcggccccagccagatcgagcgccatcagaggcaaacgctttatcagttgatggacggtctgaatacgttttaccaacaatctttacaacaacctgttgccacgtctgcgcgccagtatctggaaaaacgcggattaagccacgaggttatcgctcgctttgcgattggttttgcgccccccggctgggacaacgtcctgaagcggtttggcggcaatccagaaaatcgccagtcattgattgatgcggggatgttggtcactaacgatcagggacgcagttacgatcgtttccgcgagcgggtgatgttccccattcgcgataaacgcggtcgggtgattggttttggcgggcgcgtgctgggcaacgatacccccaaatacctgaactcgccggaaacagacattttccataaaggccgccagctttacggtctttatgaagcgcagcaggataacgctgaacccaatcgtctgcttgtggtcgaaggctatatggacgtggtggcgctggcgcaatacggcattaattacgccgttgcgtcgttaggtacgtcaaccaccgccgatcacatacaactgttgttccgcgcgaccaacaatgtcatttgctgttatgacggcgaccgtgcaggccgcgatgccgcatggcgagcgctggaaacggcgctgccttacatgacagacggccgtcagctacgctttatgtttttgccggatggcgaagaccctgacacgctggtacgaaaagaaggtaaagaagcgtttgaagcgcggatggagcaggcgatgccactctccgcatttctgtttaacagcctgatgccgcaagttgatctgagtacccctgacgggcgcgcacgtttgagtacgctggcactgccattgatatcgcaagtgccgggcgaaacgctgcgaatatatcttcgtcaggaattaggcaacaaattaggcatacttgatgacagccagcttgaacgattaatgccaaaagcggcagagagcggcgtttctcgccctgttccgcagctaaaacgcacgaccatgcgtatacttatagggttgctggtgcaaaatccagaattagcgacgttggtcccgccgcttgagaatctggatgaaaataagctccctggacttggcttattcagagaactggtcaacacttgtctctcccagccaggtctgaccaccgggcaacttttagagcactatcgtggtacaaataatgctgccacccttgaaaaactgtcgatgtgggacgatatagcagataagaatattgctgagcaaaccttcaccgactcactcaaccatatgtttgattcgctgcttgaactgcgccaggaagagttaatcgctcgtgagcgcacgcatggtttaagcaacgaagaacgcctggagctctggacattaaaccaggaactggcgaaaaagtgatttaacggcttaagtgccgaagagcgatcgggaagcccccgacagccgcactgagaggcagcggcaaatatataagtacgccctcgtaattatcgttggcggtaaacaaccgttggatttcagcgttaacggctgaaggacatcgggtcaatcgcccaacaccaacctcatgaaataagtgtggataccgtcttatggagcaaaacccgcagtcacagctgaaacttcttgtcacccgtggtaaggagcaaggctatctgacctatgccgaggtcaatgaccatctgccggaagatatcgtcgattcagatcagatcgaagacatcatccaaatgatcaacgacatgggcattcaggtgatggaagaagcaccggatgccgatgatctgatgctggctgaaaacaccgcggacgaagatgctgccgaagccgccgcgcaggtgctttccagcgtggaatctgaaatcgggcgcacgactgacccggtacgcatgtacatgcgtgaaatgggcaccgttgaactgttgacccgcgaaggcgaaattgacatcgctaagcgtattgaagacgggatcaaccaggttcaatgctccgttgctgaatatccggaagcgatcacctatctgctggaacagtacgatcgtgttgaagcagaagaagcgcgtctgtccgatctgatcaccggctttgttgacccgaacgcagaagaagatctggcacctaccgccactcacgtcggttctgagctttcccaggaagatctggacgatgacgaagatgaagacgaagaagatggcgatgacgacagcgccgatgatgacaacagcatcgacccggaactggctcgcgaaaaatttgcggaactacgcgctcagtacgttgtaacgcgtgacaccatcaaagcgaaaggtcgcagtcacgctgccgctcaggaagagatcctgaaactgtctgaagtattcaaacagttccgcctggtgccgaagcagtttgactacctggtcaacagcatgcgcgtcatgatggaccgcgttcgtacgcaagaacgtctgatcatgaagctctgcgttgagcagtgcaaaatgccgaagaaaaacttcattaccctgtttaccggcaacgaaaccagcgatacctggttcaacgcggcaattgcgatgaacaagccgtggtcggaaaaactgcacgatgtctctgaagaagtgcatcgcgccctgcagaaactgcagcagattgaagaagaaaccggcctgaccatcgagcaggttaaagatatcaaccgtcgtatgtccatcggtgaagcgaaagcccgccgtgcgaagaaagagatggttgaagcgaacttacgtctggttatttctatcgccaagaaatacaccaaccgtggcttgcagttccttgacctgattcaggaaggcaacatcggtctgatgaaagcggttgataaattcgaataccgccgtggttacaagttctccacctacgcaacctggtggatccgtcaggcgatcacccgctctatcgcggatcaggcgcgcaccatccgtattccggtgcatatgattgagaccatcaacaagctcaaccgtatttctcgccagatgctgcaagagatgggccgtgaaccgacgccggaagaactggctgaacgtatgctgatgccggaagacaagatccgcaaagtgctgaagatcgccaaagagccaatctccatggaaacgccgatcggtgatgatgaagattcgcatctgggggatttcatcgaggataccaccctcgagctgccgctggattctgcgaccaccgaaagcctgcgtgcggcaacgcacgacgtgctggctggcctgaccgcgcgtgaagcaaaagttctgcgtatgcgtttcggtatcgatatgaacaccgaccacacgctggaagaagtgggtaaacagttcgacgttacccgcgaacgtatccgtcagatcgaagcgaaggcgctgcgcaaactgcgtcacccgagccgttctgaagtgttgcgtagcttcctggacgattaatcggtaggccggatcaggcgttacgccgcacccggcactagtccctctgcacaaacgccaccttttcggtggcgtttttatcgcccacgcactaccagcgcctggtccagctcgcgatatgcttcaaccagtttctctagtgaaacgcgacttaaaccgctgggatttggcagcacccaaatctgcgtcgaaccaatggtgagcgtttgtttcccccactgtgcaccgcgctggctgaatccctgttcatatgcttgtttgcccagaatcgccaacgcctgcggctgataatcttcaattttttcaatcagcttacgcccacctgcgtgcagctcctgctttgaaacttcattggcttgcaccgttggacggtctaccagtttggtgacgccacaacgataatccagcagatgctgtgcctcctgcggcttcaactgacggtcggtaaacccggcctgatatatcaccttccagaagcgatttgctggatgagcaaagggaaaaccagtcccagcggatgaaagcccagggttgataccgcaaaacacgacccgtaaccctggagccaaaatatcctcaaccatatttactcctttctaacatcaccaggaaaagtataacggattgaaaatacattgtttataaaaacagcaggcgcacggtaatggctggattgcgacacggagttactttataatccgctaccatggccccttagctcagtggttagagcaggcgactcataatcgcttggtcgctggttcaagtccagcaggggccaccagatatagcaaaggctgacgagaaatcgtcagcctttttctttttatatatcagttactttgcgtgccagtaagccgctgcacgtacccgctgtgggtcatactgttccgcttcaaagcggcggcttaaattcttaacgactttaccttcgccggttatccagatgaagtaatcatcggcagggatttgcatctgcgccagacgcgcatctaccgcctgctcatcatgtgccagccattcgatattaaaaccatcaaggtgcgcgagataatcctgacaggcgttatcccgcacgctaaccagcgcactaacttgcggtttaacggcaagtttgctcaacgtttccaggcggcggcgcagtgcgggcattccggattcatcgcagacatacagctgatacgcgtaatcttccggcaccaccagcgaaccgcgcggacctgccaccgtaagtttatcgcccggttgcgcctgcatcgcccagccgctggcgaccccaccgtcgtgaataaagaaatcgatcgccagttcatggcgtagttcgtcatacagcggcgtatagtcacgcgacggtgggcgtggtccttccggccagacgatgccctcttccgttaccgttggcggcacaaagtgagcgtcaggttgaggaaagaagagtttgctgtgatcgtcaaagccgcgcgatgtaaaaccgtccagcgcctcgccgccgaggacaatgcgctgaaaaccggcgctgatgcgctcaacgcgtaacacagtcagttcacggaagcgcagatcattgcgaacgcgctgcgggtagcggggggagttattcattgttatcgccttcgtgatagtaatcagatatatctaaataattttcgtaaatgataatgattgttaatcatgataaatgcaagcgatttgtagaactgatatatctgaagtatgtgaaggcattcagtgccatagcaatgctgccggatgcggcgtgaacgtcttatccggcctggatgtgaggtgcttccacgtttaaacatcatttttgtacttgcagtaatgctcacatcagatataaattagatatatctaatcaagcaaaaggaggctgatatgagccatcatcacgaagggtgttgtaaacatgaaggccagccacgccatgagggctgctgcaaaggtgagaagtcagaacacgagcactgcggacacggtcaccagcatgaacacggtcaatgctgcggtggtcgccacggtcgcggcggcggtcgtcggcaacgtttctttggtcacggtgaattgcgtctggtgattctggatattctctcgcgcgatgacagccacggttacgaattgattaaagcgattgagaacctaacccaggggaattacaccccaagcccgggcgtcatctacccaacgctggattttctgcaggagcagtcgctgattaccatccgcgaagaggaaggtggtaagaagcagattgcgctgaccgaacaaggcgcgcagtggctggaagaaaaccgcgaacaggtggagatgattgaagaacgcatcaaagcgcgttgcgttggcgcggcgctgcgccagaacccgcaaatgaagcgggcgctggataattttaaagcggtgctggatttacacgtcaaccagagcgatatcagtgatgcacaaataaaaaagatcattgcggtgatcgaccgcgccgcttttgatattacgcaactggattaatcgccgcatccgccagtggcgcggtgcaattgccggatgcgacgcttgacgcgccttatccggcctacacccgctacacaccccgcaggcctgataagatgcgccagcatcgcatcaggcattgtgctccaaccgccggatccggcataccgattaatgcagcaccgtcaccgcgtcttccagtcggctggcgcggtgtttcaccatcgccgacacctgcgcactctcttccaccagctcggcatttttctgggtgatcaggttaagctcatccactgcacgggtcaggctggaaagcccatcggcctgttccagcgttgaatggctaatctgggcgatcaactgggtgacgtttttcacctgtgccacaatatcttccatcgtccgtccggcggcgtgtacctgctgcgaaccggattgcaccttatcagcactggcatcaatcagcttgcgaatatcgttggcagcattagcgctgcggctggctaaatgacgcacttcccctgccaccactgcaaaacctttgccctgttcgccggcacgcgccgcttccaccgccgcattcagggccagaatattggtctgaaacgcaatatcgttaatcagcgaagtaatggtgccaatgcgctgggtactgtcggcgatatcgtccattgtcttgatcaccgtggtcatcgcctccccaccctgcactgccgcattactggcggtgatagaaagtttatcggcagccgacgccgtggcagagttctgtttcaccgacgccgccatttggttcatggtcgccaccgtttgctgaacgttatcaactgtctgctgggtatgttcgttcagttcatcggtgcctttcgccagcgtctcactgccatttctgacactggacacctggcttgagacatcgttaattagccaacggcacatcaggccaagctgccctaccgcgcgtaatgtcagccccagctcatcgctgcgattcaggtgctcaacactattacgctctccggtcgccaccttcagtgcctgacgggcgacattttctatcgggcgcacaatctgccattcaaaacaagcgcttgccaacaataccactaacacacagaggaaatacgtcaccaccggggcagcaacaaaccaaagcatggccgccagcaagataaacatcagggtcatcactccacgcgcccgccagcgaagcggtaatgaaggcagtttacccagccagcctttacgcaccaccaggcctttatgaatacgcttactggtacgtccggcgttcagcgctttgtacagcggctccaccgccgcaatctcttcatccgtcgcccgggtacgaatcgacatatagccactgatttttccctcgcgcaccatcggtaccgcattggcccgcacccaataatggtcaccatttttgcggcgatttttcacgatgccgctccagggctccccttttttcagggtgaaccacatatccgcaaacgccgcttttggcatatccgggtgacgcaccatgttgtgcggctgcccttgtaactcttgcaaggtaaagccgctcacctgcacaaaagtgtcattagcatgagtgatatagctttgcagatcggtagtggacatcagagtggtatcgtccgccagcggggtattttgctgggtgacatacggatgagaagacatgttcgcgtcctgtgcaggttatatggttgttaacttcttgtcagagtttatgtcggccccgctgcggttatctttaaccgattaatttgatttagatcgcaatttgcgattaaagcacaaatctaattctttgatttaaaatactttcactctgttactatacgaaaacgttaattatcttgcccaaaatcaggcaattattgccctgaaaacgtgcatttgcgcagcaatcatcaaatccatacccgacaaaaaccgtgcaaaataacaacaaatgttaacagatagcattaaatattgcacaaatgataaccgaatttgtgtttatcccgattttcgcgatcgcagccggagtggcgcaatccctgcaatacttaaatcggtatcatgtgatacgcgagcctccggagcatattttgaacaggttaccttcgagcgcatcggctttagcgtgcagcgcccacgccctgaatctcattgagaagcgaacgctggatcatgaggagatgaaagcacttaaccgagaggtgattgaatacttcaaagagcatgtcaatccggggtttttagagtatcgcaaatctgttaccgccggcggggattacggagccgtagagtggcaagcgggaggtttaaatacgcttgtcgacacccagggacaggagtttatcgactgcctgggaggttttggaattttcaacgtggggcaccgtaatccagttgtggtttccgccgtacagaatcaacttgcgaaacaaccgctgcacagccaggagctgctcgatccgttacgggcgatgttggcgaaaacccttgctgcgctaacgcccggtaaactgaaatacagcttcttctgtaatagcggcaccgagtccgttgaagcagcgctgaagctggcgaaagcttaccagtcaccgcgcggcaagtttacttttattgccaccagcggcgcgttccacggtaaatcacttggcgcgctgtcggccacggcgaaatcgaccttccgcaaaccgtttatgccactgctgccgggcttccgtcatgtgccgtttggcaatatcgaagccatgcgcacggctcttaacgagtgcaaaaaaaccggtgatgatgtggctgcggtgatcctcgaaccgattcagggtgaaggtggcgtaattctgccgccgccgggctatctcaccgccgtacgtaagctatgcgatgagttcggcgcactgatgatcctcgatgaagtacaaacgggcatggggcgcacgggcaagatgttcgcctgcgagcatgagaacgtacagccggatatcctctgccttgccaaagcgctcggcggcggcgtgatgccgattggcgcgaccatcgccactgaagaggtgttttcagttctgttcgacaacccattcctgcataccaccacctttggcggcaacccgctggcctgtgcggcggcgctggcgaccatcaatgtgttgctggagcagaacttaccggctcaggctgagcaaaaaggcgatatgttgctggacggtttccgtcaactggcgcgggaatatcccgatctggtacaggaagcgcgtggtaaagggatgttgatggcaattgagtttgttgataacgaaatcggctataactttgccagcgagatgttccgccagcgcgtactggtggccggaacgctcaataacgccaaaacgatccgcattgaaccgccactgacactgaccattgaacaatgtgaactggtgatcaaagcggcgcgtaaggcgctggcggccatgcgagtaagtgtcgaagaagcgtaatatcaaatcggatggcgatacgacgtcgccatccgatctttttatacgacgcgtacgcccgcaggcatcatccgctccggcgttaacaacacgctttcactgccgtcatcggtttccgcacacaacagcatgcattccgacgtttcaccacgcattttcgctttttgcagattgcataagaccaccaccgttttccccatcagctcttcttcgctgtagtacggcaccaggctggtcacggtttgcagtgttttttcccccacatcaacctgtacgatgtacagcttgtcggcgttttcatggcgtttcacttccacaatctttccgacgcgcatttccagacgtgcaaaatcagcgtaagccacggtttccattgtttcctcccttcgggtaaaattttactaaactatagcaaaagtttttctcaatcctgtaggctaaaaatggagaatgcaggcgtgatcacattcgtgagccgctgtgttaccgttacagcgtcaaagaaacgcgctttatttactgaaaacaggtgacccgataagcacttcctctacaatgggggcgcacatcagggaaagtaaaaaaggtaaacatggcaacactaaaagacatcgcaatcgaagctggcgtatccctggcgacagtatccagggtcttaaatgacgatccgacattgaatgtgaaagaagagacgaaacatcgcattctcgagatcgccgaaaagctggagtacaagaccagtagtgcccgtaaactccagacaggtgcagtcaaccaacaccatattctggctatctacagctaccaacaggagctggagatcaacgatccttactatctggcgatccgccacggcattgaaactcagtgcgaaaagctgggcattgagctcaccaactgttatgaacacagcggattaccagacattaaaaacgtcaccggtattttaattgtcggcaaacccacgcccgccctgcgcgccgccgcctgtgcgttgaccgacaatatctgttttatcgactttcacgaacccggcagcggttacgatgcggtggatatcgatctggcacgcatcagtaaagaaatcatcgacttctatatcaaccagggcgttaatcgtattggttttattggcggtgaagatgagcctggcaaggcggatattcgtgaggtcgcctttgcggaatatggccgactgaaacaagtggtacgcgaagaggatatctggcgcggcggtttttccagttcgtcgggttatgaactggcaaaacaaatgctggcgcgggaagactatccgaaggcactgtttgttgcttccgattccattgctatcggcgtactgcgggcaattcatgaacgaggcctgaacatcccacaggatatttcgcttatcagcgttaacgatatccccaccgcgcgatttacctttccgccgctctccaccgtgcgcatccattccgagatgatgggaagtcagggcgttaacctggtgtatgaaaaagcccgcgatggtcgcgcgctgccgctgttagtcttcgttcccagcaaattaaaactgcgcggcacgacccgttaaatccccttacacactgtccggcaatcgtttttgccggacagtgctgccgtttattttcgtgatccagttaaagtaaatgcatttacctgctaccttttagtaaaaattttactaaactccccagcaattacacaaactaccatcaccatgaatggttccgatttctctctaccgggaggccctatgaatcgctgggaaaacattcagctcacccacgaaaaccgacttgcgccgcgtgcgtactttttttcatatgattctgttgcgcaagcgcgtacctttgcccgcgaaaccagcagcctgtttctgcccttaagcggtcagtggaatttccacttttttgaccatccgctgcaagtaccagaagccttcacctctgagttaatggctgactgggggcatattaccgtccccgccatgtggcaaatggaaggtcacggcaaactgcaatataccgacgaaggttttccgttccccatcgatgtgccgtttgtccccagcgataacccaaccggtgcctatcaacgtattttcaccctcagcgacggctggcagggtaaacagacgctgattaaatttgacggcgtcgaaacctattttgaagtctatgttaacggtcagtatgtgggtttcagcaagggcagtcgcctgaccgcagagtttgacatcagcgcgatggttaaaaccggcgacaacctgttgtgtgtgcgcgtgatgcagtgggcggactctacctacgtggaagaccaggatatgtggtggtcagcggggatcttccgcgatgtttatctggtcggaaaacacctaacgcatattaacgatttcactgtgcgtaccgactttgacgaagcctattgcgatgccacgctttcctgcgaagtggtgctggaaaatctcgccgcctcccctgtcgtcacgacgctggaatataccctgtttgatggcgaacgcgtggtgcacagcagcgccattgatcatttggcaattgaaaaactgaccagcgccagctttgcttttactgtcgaacagccgcagcaatggtcagcagaatccccttatctttaccatctggtcatgacgctgaaagacgccaacggcaacgttctggaagtggtgccacaacgcgttggcttccgtgatatcaaagtgcgcgacggtctgttctggatcaataaccgttatgtgatgctgcacggcgtcaaccgtcacgacaacgatcatcgcaaaggccgcgccgttggaatggatcgcgtcgagaaagatctccagttgatgaagcagcacaatatcaactccgtgcgtaccgctcactacccgaacgatccgcgtttttacgaactgtgtgatatctacggcttgtttgtgatggcggaaaccgacgtcgaatcgcacggctttgctaatgtcggcgatatcagccgtattaccgacgatccgcagtgggaaaaagtctacgtcgagcgcattgttcgccatattcacgcgcagaaaaaccatccgtcgatcatcatctggtcgctgggcaatgaatccggctatggctgtaacatccgcgcgatgtaccacgcagcgaaggcgctggatgacacgcgactggtgcattacgaagaagatcgcgatgctgaagtggtcgatattatttccaccatgtacacccgcgtgccgctgatgaatgagtttggtgaatacccgcatccgaagccgcgcatcatctgtgaatatgctcatgcgatggggaacggaccaggcgggctgacggagtaccagaacgtcttctataagcacgattgcattcagggacattatgtctgggaatggtgcgaccacgggatccaggcgcaggatgacaacggcaacgtctggtataaattcggcggcgactacggcgactatcccaacaactataacttctgtcttgatggtttgatctattccgatcagacgccgggaccgggcctgaaagagtacaaacaggttatcgcgccggtaaaaatccacgcgctggatctgactcacggcgagctgaaagtcgaaaataaactgtggtttaccacgcttgatgactacaccctgcacgcagaggtgcgcgtcgaaggtgaaacgctcgcgacgcagcagattaaactgcgcgacgttgcgccgaacagcgaagcccccttgcagatcacgctgccgcagctggacgcccgcgaagcgttcctcaacattacggtgaccaaagattcccgcacccgctacagcgaagccgggcattctatcgccacttatcagttcccgctgaaggaaaacaccgcgcaaccagtgcctttcgcaccaaataatgcgcgtccgctgacgctggaagacgatcgtttgagctgcaccgttcgcggctacaacttcgcgatcaccttctcaaaaatgagtggcaaaccgacatcctggcaggtgaatggcgagtcgctgctgacccgcgagccaaagatcaacttcttcaagccaatgatcgacaaccacaagcaggagtacgaagggctgtggcaaccgaatcatttgcagatcatgcaggaacatctgcgcgactttgccgtagaacagagcgatggtgaagtgttgatcatcagccgcacagttattgccccgccggtgtttgacttcgggatgcgctgcacctacatctggcgcatcgctgccgatggccaggttaacgtggcgctttccggcgagcgttacggcgactatccgcacatcattccgtgcatcggtttcaccatggggattaacggcgaatacgatcaggtggcgtattacggtcgtggaccgggcgaaaactacgccgacagccagcaggctaacatcatcgatatctggcgcagcaccgtcgatgccatgttcgagaactatcccttcccgcagaacaacggcaaccgtcagcatgtccgctggacggcactgactaaccgccacggcaacggtctgctggtggttccgcagcgcccaattaacttcagcgcctggcgctatacccaggaaaacatccacgctgcccagcactgtaacgagctgcagcgcagtgatgacatcaccctgaacctcgaccaccagctgcttggcctcggctccaactcctggggcagcgaggtgctggactcctggcgcgtctggttccgtgacttcagctacggctttacgttgctgccggtttctggcggagaagctaccgcgcaaagcctggcgtcgtatgagttcggcgcagggttcttttccacgaatttgcacagcgagaataagcaatgaggatcatcgataacttagaacagttccgccagatttacgcctctggcaagaagtggcaacgctgcgttgaagcgattgaaaatatcgacaacattcagcctggcgtcgcccactccatcggtgactcattgacttaccgcgtggagacagactccgcgaccgatgcgctatttaccgggcatcgacgctattttgaagtgcattactacctgcaagggcagcaaaaaattgaatatgcgccgaaagagacattacaggtagtggaatattatcgtgatgaaactgaccgtgaatatttaaaaggctgcggagaaaccgttgaggtccacgaagggcaaatcgttatttgcgatatccatgaagcgtatcggtttatctgcaataacgcggtcaaaaaagtggttctcaaagtcaccatcgaagatggttatttccataacaaataacaactacggcggcaaaaggagtttgccgccaccgctaccctacacattttcggagatgtgttatgtctgataccaaacgtaatacaatcggcaaattcggcttgctctcgctgacttttgccgccgtttacagctttaacaacgttatcaataataatattgagcttggactggcctcggcaccgatgtttttcctcgcgacgattttttattttattcccttctgtctgatcatcgcagaatttgtttcgttaaataaaaactcagaagccggtgtctacgcgtgggtaaaaagttcgctgggcggacgttgggcatttattactgcctatacctactggttcgtaaacctgttctttttcacctcactgttgccgcgcgttattgcttatgcttcgtatgccttcctcggatacgaatatattatgacgccggttgccaccaccattatcagtatggtgctgttcgccttctacacctgggtttccaccaacggggcgaaaatgttggggccaattacctccgtcacttcaacgctgatgctgctgttaacgctctcctacattttactggcaggtacggcgctggttggcggcgtacagcctgctgaccccatcaccgttgacgcgatgatcccgaacttcaactgggcgttcctcggcgttaccacctggatctttatggccgcaggtggcgcggagtccgtcgctgtgtacgttaacgacgtcaaaggcggttcgaaatcgttcgttaaagtgatcatcctcgccgggatttttatcggcgtactgtattccgtctcctcggtgctgattaacgtcttcgtcagcagcaaagagttgaaatttaccggcggatcggtgcaggtattccacggcatggcggcgtattttggtctaccggaagcgttgatgaatcgctttgtcggtctggtgtcctttaccgcgatgttcggttccctgctgatgtggaccgcaacgccggtgaaaattttcttctccgaaatcccggaaggcatctttggtaagaaaaccgtcgaactgaacgaaaacggcgttccggcgcgcgcagcgtggatccagttcctgatcgtcatcccgctgatgattatcccgatgctcggttccaataccgtgcaggatctgatgaatactattattaatatgaccgccgcagcgtccatgcttccgccgttattcatcatgctggcttacctgaatttacgcgccaaattagatcacctgccacgcgatttccgtatgggctcccgccgcaccggtattatcgttgtttcaatgctgattgcgatatttgccgtagggtttgtcgcttcgacattcccgactggcgcgaatattctgaccatcattttttataacgtcggcggtattgttatcttcctcggctttgcgtggtggaaatacagtaaatatataaagggattaacggctgaagagcgccatattgaagcgacgccagccagcaatgttgattaagcagaataataaaaaatgagcaggcattttccctcttcctggatgaggagagggaaaatagtttctgcctttatatttttataattacaacgataaaaggctgtactttttctttagctcatggattaacacaatgaaattaatcactgcaccatgcagagcattacttgctctgccgttttgctacgccttttctgcggcaggagaagaagcacgtccggcagaacatgacgacacaaaaacacctgcaattacctcgacatcttctccttcatttcgtttttacggcgaattaggggttggtggatatatggatttagagggtgagaataaacataaatacagcgacggtacctatattgaaggtggcctggagatgaagtacggctcctggttcggcctgatttacggcgaaggctggaccgtgcaggccgaccacgacggcaatgcctgggtgccagaccatagctggggtggtttcgagggcggaattaaccgtttctatggcggttatcgtaccaatgatggcaccgaaatcatgctcagtctgcgtcaggattcctcgctggatgacctgcaatggtggggcgacttcacccccgatctgggctacgtcattcccaatacccgcgacattatgaccgcgctgaaggtgcagaacttaagcggcaactttcgttatagcgtcaccgcgactcctgccggacatcatgatgaaagcaaagcctggctacattttggcaaatacgatcgctatgacgacaaatacacctatccggcaatgatgaacggttacatccagtatgaccttgccgaaggcatcacctggatgaacggtctggaaatcaccgacggcacaggacagctctatctcacgggcctgctaactcctaactttgccgctcgcgcctggcaccataccggacgcgccgacgggctggacgtaccgggaagtgaaagtgggatgatggtgagcgccatgtatgaagcgttaaagggcgtttatctctccaccgcttacacctacgccaaacatcgccctgaccacgctgacgatgaaaccacctctttcatgcagtttggtatctggtacgaatacggcggcggacgtttcgccacggcttttgatagccgcttctacatgaaaaatgcctctcacaatcccagcgaccaaatcttcctgatgcaatatttctactggtaataaggactgtaatttcatgaaaataaaaactattttaacgccagtaacctgcgctctgctgataagtttttccgcccatgccgctaacgccgacaattataaaaacgtgattaaccgtactggcgcgccgcagtacatgaaggattacgattacgacgatcaccagcgttttaatccgtttttcgatctcggagcctggcatggtcatctgttgccagacggccctaacaccatgggcggctttccgggcgttgcgctgctgacggaagagtacatcaactttatggccagcaatttcgaccgcctgaccgtctggcaggacggcaagaaagtcgactttacgctggaggcatacagtattcccggtgcgctggtgcaaaaactgacagcaaaagatgtgcaagtcgaaatgactctgcgcttcgccacgccgcgcacgtcactactggaaaccaaaatcaccagcaataaaccgctggatctggtgtgggacggcgaactgctggaaaaactggaagcgaaagaagggaaaccgctttccgataaaaccattgctggcgaataccctgactatcagcgcaaaatcagcgccacccgtgatggcctgaaagtcacctttggcaaagtgcgcgccacctgggatctgctgacctccggcgaatcggaatatcaggtgcataaatccctgccggtgcagactgaaatcaacggtaatcgctttaccagtaaggcgcatatcaacggttcgaccacgctctacaccacctattcccatctgctaaccgctcaggaagttagcaaagagcaaatgcagatccgcgatattctggcgcgtccggcgttttatctcaccgcctcgcagcaacgctgggaagaatacctgaagaaagggttaaccaatccggatgcgacgccggaacagacgcgcgtcgcggtgaaagcgatcgaaacgctcaacggtaactggcgctcaccgggcggtgcggtgaaatttaacaccgttacaccgtcggtgaccgggcgctggttctccggcaatcagacctggccgtgggatacctggaagcaggcgtttgcgatggcgcatttcaatcccgacatcgccaaagagaatatccgcgcggtcttctcctggcagatccagcctggcgatagcgtgcgtccgcaggatgtgggctttgtccccgacctgatagcgtggaaccttagccccgagcgtggtggcgatggcggcaactggaacgaacgtaataccaaacccagccttgccgcctggtcggtgatggaagtgtacaacgtcacccaggataaagcctggttggcagagatgtacccgaaactggtggcctatcacgactggtggttacgtaaccgcgatcacaacggcaacggcgtgccggaatatggcgcgacccgcgacaaagcccacaacactgagagcggcgagatgctgtttacggtgaagaaaggcaacaaagaagagacgcagtctgggctgaacaactacgcccgcgtggtggagaaaggccagtacgacagtctggaaattccggcacaggtcgctgcgtcgtgggaatcggggcgtgatgatgccgccgtctttggttttatcgacaaagaacagttggataaatatgtcgctaatggcggcaaacgtagcgactggacggtgaaattcgccgaaaaccgcagtcaggacggaacgttgctgggctactcgctattgcaggagtcggtggatcaggccagctatatgtacagcgataaccattatctggcggagatggcaaccatcctcggtaagccagaagaggccaaacgctatcgccagttggcacagcagctcgcggactacatcaacacctgtatgttcgacccgactacccagttctactatgacgtacgtattgaagataaaccactggcgaacggctgcgcgggcaaaccgattgttgagcgcggtaaagggccggaaggctggtcgccgctgtttaacggtgcggcaacgcaggccaatgccgacgcggtggtgaaggtgatgctcgatcctaaagagttcaacacctttgtcccgctgggaacggcggcgttaaccaatccggcttttggcgctgatatctactggcgtgggcgcgtatgggtggatcagttctggtttggtctgaaagggatggagcgttacggttatcgcgatgatgccctgaaactggcggatacgttcttccgtcacgccaaaggattaaccgccgatggcccaattcaggagaattacaacccgctgactggcgcacagcaaggcgcaccaaatttctcctggagtgccgcgcatttgtatatgttgtataacgattttttccgtaagcaataatttgcaactgctggcggatgcggcgtaaacgccttatccgccctacatgtgcaatcctcctggccggataaaacgcgacaagcgtcgcatccggcatctgcaccgtgccactggcggatgcggcgtgaacgccttatccgccctacatgtgcaatcccccaggccggataaaacgcggcaagcgtcgcatccggcgttaccaccgggcgtattctttttgaatcccatcacaaaccccgcactccccttttcccttttctccggcggcggctaaattagaactcatccgaccacataacaattattttacatactggacaattttatgagctacccgtcgctgttcgccccgctggatttaggttttaccacgttaaaaaaccgcgtgttgatgggctcaatgcacaccgggctggaggaatacccggacggtgccgagcggctggcagcgttttatgccgaacgcgcccgtcacggcgtggcgctgattgtcagcggcggcattgcaccagatttaacaggcgttggcatggaaggtggcgcaatgctcaacgacgccagccagatcccacaccatcgcaccattaccgaagcggtacatcaggaaggcggcaaaatagccctgcaaattttgcataccgggcgctacagctaccaaccgcatctggtcgctccctccgcattgcaggcccccatcaaccgtttcgttcctcacgaactcacgcatgaagagatcctgcaactgatcgacgatttcgcccactgcgcgcaactggcacgggaggcaggatacgacggtgtagaggtaatggggtccgaagggtatttgatcaacgaatttctgacgctgcgcaccaatcagcgtagtgaccagtggggcggcgattaccgcaaccggatgcgatttgccgtagaagtagtgcgtacggtgcgcgaacgcgtcggcaacgacttcattattatctaccggttgtcgatgctcgacctggtcgaaggcggcggcacttttgccgaaacggtagaactggcgcaggccattgaagcggcgggcgcgaccattatcaacaccggcattggctggcatgaagcacgtattccgaccattgccacgcccgtgccgcgcggcgcatttacttgggtcacgcgcaaactgaaaggccacgtctcgctgccgctggtgaccaccaaccggattaacgatccgcaggttgccgacgacattctctcgcgcggcgatgccgatatggtgtcgatggcacgaccgtttcttgctgatgcggaactgctgtcaaaagcgcaatcggggcgagccgatgagatcaacacctgcattggctgcaatcaggcctgcctcgatcagatcttcgttggcaaagtcacctcgtgcctggtgaatcctcgcgcctgccacgaaaccaaaatgccaatccttcctgccgtgcagaaaaaaaatctggcggtggtcggtgcgggacctgctgggctggcgtttgccattaacgcggcggcgcgtgggcatcaggtaacattgtttgatgcccacagcgagatcggcgggcagtttaatatcgccaaacagatccccggcaaagaggagttttacgaaacgctgcgctattaccaccggatgatcgaagtgacgggcgtgacgctgaaactcaatcacaccgtgacggcggatcagttacaggcgttcgatgaaacgatcctcgccagtgggatcgtgccgcgcgttccgcctatcgacgggatcgatcatccgaaggtattgagttatctcgatgtactgcgcgacaaagcgccggtaggcaacaaggttgccatcatcggttgtggcgggattggttttgatacggcgatgtatttaagtcagccgggcgaatccaccagccagaatatcgccaggttctgtaatgagtgggggatcgacagcagcctacaacaggctggtggcttaagcccgcagggaatgcagatcccgcgtagcccacggcaaattgtgatgctccagcgcaaagccagcaaaccgggacaggggttaggcaaaaccaccggctggatccatcgcaccaccctgctctcgcggggtgtgaaaatgatcccaggcgtaagttatcagaagattgacgatgacgggctgcatgtggtgatcaacggcgaaacgcaggtattagcagtggacaatgtggtgatctgcgcagggcaagagccaaaccgcgcgctggcgcaaccgctgattgatagcgggaaaactgtgcatttaattggcggctgcgatgtggctatggagctggacgcacgacgggcaattgcccagggaacacggctggcgctggagatttaaatcgttatttgaagcgccggatgcaacgcatccggcacgtcgcgttaatcaataaacaaggcgggagaaatgccgaatcgcgttgccaattttttagcgtgttccagcgttaatttcctcttcccgctcaaaacgcgtgacaccatagatttactgccaatttccggcagatcggaaagggttaaaccatattgatccataagggtacgaatcacggctataccgccaggcatggcttgagccatggcattaaattccgcaaattcgggcgctgattcttcccacgcggttattttggcacacaccagatccagcaaggggttttcaggatcgttgagcagcagatgatctaccagttccagcgcctgggtgtattgttcctcgttctgaatacccgccagaaaaggtgccaccgcagttagcttttctcctgcttgcaagatgtcggcaatcgcaatcattttttccccttagtacgatgaacagcggtaaagaaatcgtattctttatgcgtcataacttcacgtatgtagcataaacgttgaacaacgctaaacaagagaatgtagaggatggtgacagggattttttgttttatggaagcgcgattccagaactgggcagacattgccggatgcgacgcttgccgcgtcttatccggcctgggagtaacgtgctgaacgtaggccggataaggcgttaacgccgcatccggcaggtaactcccaatcttaccgacgacgccccagcttcactgttttcagcaccacaaatttattattcgtggcgatggtggtgcagttgccgaaaatcttcttcagtttatggaagtaatccaggtgacggttggcaacgatatacagttcgccgttgattttcaggcagcggcgggcgtggtggaacatctcccaggcgacgttatcggtcagcgcatgttgctgatgaaacggcgggttgcagagcacagcattaaagcggaaaggctccactccggagagcgcgttgttgatcataaactcgcagcgatccaacgcctctggcatgttggtttcaacattcattcggctggaagcgaccgccatcggcgattcatcgacaaacaccactttcgcctgcgggtttttatcaagcagcgtcaggccaataacgccgttaccacagccgagatcgacaatctcaccttcgagattctctggcagatgttgcataaagaagcgtgcgccaatatccagcccggtgcgggagaagacattcgcatggttgtggatagtccagtcagtaccttccagcttccagctaacggtctgcggcgcatcggccagcggcggttcattgaaagtgcaattaatcaggcgcgcttttttccatgccagcgtagtggtggtcgggccgagcactttctcgaacagctccagcgtggaagtgtgaatgtcacgggctttggcaccggcaataatacgtgtatccgacgtgaccactttgcgcagcgcacgcagttgctgttccagcaatgccagtgttttcggcactttgatcagcaccacacccggctgttgcgggtagtcggcggtgctgtcgagaaacttcacgctcgactcatcaatcccgttgaggcgtaaattctcgcgcgtcgccagttcactgatgtatgagtcgccaatgctgtacggcttatgttccgccagcgcgcagcttaacgcaccaaaggcatcattcaggatcaacaccgggccgcggatttctgtgtcgtccaactgttgcagcaaatattcatccgccgcttcccacgcctgtagcgggttaacgtcatccgtcgccggaaaacgttgtagtgtcagtgaacggaaaccgttgtctaagtggctcatcggccctcctgaatgataaaatttcgacgttgcccctgaaaagggtgcgtgagtataccctttttctctttttcgtgggcggttatgaacaatcttacttatcttcagggttatcccgagcagctactttcccaggtgcgaacgctgattaacgaacagcgtctgggcgatgtgctggcaaaacgctatccgggaacacacgactacgccaccgataaagccctctggcaatatactcaggatctgaaaaatcagtttctgcgtaatgccccgccgatcaataaagtgatgtatgacaataagatccatgtgctaaaaaacgcgctcgggttacataccgctgtttctcgtgtgcagggcggcaagctgaaagcaaaagcagagatccgcgtcgctactgtgtttcgcaacgcgccggaaccgtttttacgtatgatcgtggtgcacgaactggcgcacctgaaggagaaagagcataacaaagcgttttaccagttgtgctgccatatggagccgcagtaccaccagcttgagttcgacacccggctgtggctaacgcagttgtctcttgggcaggacaaaatctgaaaatgatgtcaggcgttatcttttctttctttagcgcctaaaatcgacctcccccctttcgttaaggataacgaccatgcagccccgccttcttctccgtatttgtttttctcgccggactcttaagattggctgtttgttgttgcttatagcaggagcgaccatttttattgccgatcgcgttatggtcaacgccagcaagcagctgacctggagcgatgtcaacgcagttccggagcgtaacgtgggcttattgctgggggccaggccgggtaatcgctactttacccgacgtattgataccgcagcagcgttgtaccacgccggaaaagtgaaatggctactggtaagtggcgataacggacgtaaaaattacgatgaagcctcaggtatgcagcaggctttgatcgctaaaggcgtaccggcgaaagtgatcttctgcgactatgccggattctcaacgctggattcggtagtgcgtgccaaaaaggtttttggtgaaaaccatatcaccattatctcgcaagaatttcataaccaacgcgccatctggctggcaaaacagtacagcatcgacgctatcggttttaacgcgcctgacctcaatatgaagcacggtttttatactcaactgcgggagaaactcgctcgtgtcagcgccgtgattgacgccaaaatcctccatcgccagccgaaatatctcgggccatcggtcatgattgggccgtttagtgagcatggctgtccggcaaaagaataatgcgtatctgcgcacgtcgaagatgaaaaaggcgtgctacattgacgacagaatccctttatggagtatccacgcgttatgatacgtttcgctgtgattggtacgaactggatcactcgccagttcgtcgaggccgcccatgagagcggtaaatacaagttaaccgccgtatattcccgcagccttgagcaggctcagcacttcgccaatgatttttctgtcgagcatctgtttacctcgctggaagcgatggcggaaagcgatgccattgacgcggtgtatattgccagcccgaatgccctgcacttttcccagacacaacttttccttagccataaaattcatgtgatttgcgagaaaccactggcgtcgaatctggcggaagtggatgccgccattgcctgtgcgcgggaaaatcaggtggtgctgtttgaggcatttaaaaccgcctgcctgccgaactttcatttgctgcgccaggcgctgccgaaagtcggcaaattgcgtaaagtctttttcaactattgccagtattcctcgcgctatcaacgttacctggacggtgaaaatcccaacacctttaatccgtcattctctaacggttcaattatggatatcggcttttactgcctggcgtcggcggtggcgttatttggtgagccgaaaagcgtgcaggcaaccgccagtttgctggcaagcggtgtagatgcccacggcgtggtggtgatggattacggtgatttcagcgtcaccttgcagcactcaaaagtcagtgattctgtcctggcgagcgagattcagggcgaagcaggatcgctggtgattgaaaaactgtctgaatgccagaaagtgtgcttcgtgccgcgtggcagccaaatgcaggatctcacccagccgcagcatattaataccatgctctacgaagcagagctgttcgctaccctggtggatgagcatctggtggatcatccggggctggcggtcagtcgcatcaccgccaaactgctgaccgagatccgccgccagactggggtgatttttccggtagatagcgtaaaactataattgccaaagtaaaacagtgtaaaaggtatgtaacagaccattgactggctgaatggtctgtcatactttgttacctgcaaaggggagtaacttcattgccggtcgatcgtcattacgatgtgtgaaaaaccacatccggtcaccgggcaacccgaaaggaatacgcagacgtattccttttttgttgtaagtgagaccttgccggaaggcgaggtctatgcataaaaagcagcggctgacgtcttccgacgttggccgtttttttatgtgtaaggaacttctatgaatactgtcggcacgccgttgctatggggcggattcgctgttgttgtcgccattatgctggctatcgacctgttgttgcaggggcgtcgtggggcacatgccatgaccatgaaacaggctgcggcctggtcgctggtctgggtgacgctgtcgttactgtttaacgccgctttctggtggtatctggtgcaaaccgaaggtcgcgccgttgccgatccacaggcactggcctttctcacaggttatctgattgagaaatcgctggcggtcgataacgtctttgtctggctgatgttgttcagctatttctctgttccggcggcattacaacgccgcgtgctggtgtatggcgtgctcggggcgattgttctgcgtaccatcatgatcttcactggcagctggctaatttcgcagttcgactggatcctgtatatcttcggtgccttcctgctgtttaccggcgtgaagatggcgctcgcccatgaagatgaatcaggcattggcgacaagccgctggtgcgctggctacgcggtcatttgcgcatgaccgacaccatcgacaacgagcatttctttgtgcgtaagaatggattgctgtacgccacaccgctgatgctggtactgattctggtggaattgagcgacgtgattttcgccgtggatagcattccggctatcttcgccgtgaccactgacccgttcattgtgctgacctcaaacctgtttgcgatcctcggcctgcgtgcgatgtatttcctgctggcgggcgtagcagagcgtttctcgatgctcaaatatggcctggcggtgattctggtgtttatcggtatcaagatgctgattgtcgacttctaccatattccaatcgccgtctcgctgggcgtggtgtttggcattctggtgatgacgtttattatcaacgcctgggtgaattatcggcatgataagcagcggggtggataatttttaatctgcctaagccgtgtaccctgtcattaacatgagcaccgttttctccctctcccttccagggagagggtcggggtgagggtaatttttcgcaccgatgctggcctgtctccctcaccctaaccctctccccaaacggggcgaggggactgaccgagtccttttttgatgttgtcatcagtctggaagccgcacgttggctttatttttatgtcaaataaatgtaaccattaagttgcaaaatatgacctctctttaaaatccagcatttttcgcttcccgaagctgtaactttccttatactcgaccttgcaaacactttgttacatcctgaaagatgcgtcgacagaacgcaccagggatgtgcgacaacacaatgaaaggatcgaaaaatgactacgcaacgttcaccggggctattccggcgtctggctcatggcagcctggtaaaacaaatcctggtcggccttgttctggggattcttctggcatggatctcaaaacccacggcggaagctgttggtctgttaggtactttgttcgtcggcgcactgaaagccgttgcccccatcctggtgttgatgctggtaatggcatctattgctaaccaccagcacgggcagaaaaccaatatccgccctattttgttcctctatctactgggcaccttctctgctgctctggccgcagtagtcttcagctttgccttcccttctaccctgcatttatccagtagcgcgggtgatatttcgccgccgtcaggcattgtcgaagtgatgcgcgggctggtaatgagcatggtttccaaccccatcgacgcgctgctgaaaggtaactacatcgggattctggtgtgggcgatcggcctcggcttcgcactgcgtcacggtaacgagaccaccaaaaacctggttaacgatatgtcgaatgccgttacctttatggtgaaactggtcattcgcttcgcaccgattggtatttttgggctggtttcttctaccctggcaaccaccggtttctccacactgtggggctacgcgcaactgctggtcgtgctggttggctgtatgttactggtggcgctggtggttaacccattgctggtgtggtggaaaattcgtcgtaacccgttcccgctggtgctgctgtgcctgcgcgaaagcggcgtgtatgccttcttcacccgcagctctgcggcgaacattccggtgaatatggcactgtgtgaaaagctgaatctggatcgcgatacctattccgtttctattccgctgggtgccaccatcaatatggcgggcgcagcaatcaccattaccgtgttgacgctggctgcggttaatacgctgggtatcccggtcgatctgcccacggcgctgctgttgagcgtggtggcttctctgtgtgcctgtggcgcatccggcgtggcggggggttctctgctgctgatcccgctggcctgtaatatgttcggtatttcgaacgatatcgccatgcaggtggttgccgtcggctttatcatcggcgtattgcaggactcttgcgaaaccgcgctgaactcttcaactgacgtgctgttcactgcggcagcttgccaggcggaagacgatcgtctggcaaatagcgccctgcgtaattaattgtttaacccctttcgtctacggcgggaggggttttctctactttaaacggatcaattccccttttctgcatccgccagaaacgaatgatattcaggccattcataagcagaaaactaacctcaatcattgtgccgcctatcgaccccgcccagaagttgtgaatcacccagcaacacgttgaaaaccacatcacgcagcgcatggtgagccctttacagcggaacagcgcccaggtactgacaatcgtaccgataaccggcaatagttcgacaggatgatggaacttcgcgaggccaattccgccagtcagcacaataaaaatcgccattacccataagctgcgcgtgcgtaaggtaatcaatgtacgaatggcattaaggatggcactggcaccagcgggataggtgcccagaagaaaaaatgtacgccaataacggcgctatagaccgaaagctgctttttgaagcgacgttcgtcacgattgaaaaatgttgtgataccaatcagaaaggcgatgacacccacgccctgggccagccaatacgcggtcatgataaatccttatcaggtatggaaaagcaaacggcgcttcacattatgaaacgccgttttttattaacaactcatttcgactttatagcgttacgccgcttttgaagatcgccagttcgcggaagtcgttacgctcgttgcaggtttgtttaccgttggcaaactcaacgatggtgtcgataaattcttccagcaactgcggcatcgctttaccgtggatcagctgacccgcgtcaaagtcgatccagtgttttttcttcgccgccagttcactgttggtagcgattttcaccgtcggtacaaagccgccgtatggcgtgccacgaccagtactgaacagcaccatatggcagcccgcacccgccagggcgctggtcgctacggcatcgttacccggcgcacttaacaagttcagccccggcgttttcagacgctcgccgtaacgcagcacgtcaaccacgacgctggaacccgctttctgggtacagccaagggatttatcttccagcgtggtgataccgcccgctttgttccccggcgatgggttttcatagatcggctggtcatgggcaataaagtactgtttgaagtcgttgaccatggtgaccagtttttcaaacgttgcttcgtcgcggcaatggtccatcagcaactgctctgcgccaaacatctccggcacttcggtcagtacggtagtaccgccgttagcaatcacgtagtcagagaaacgccccagcatcgggttagcagtaataccagaaagaccgtcagaaccaccgcactccagaccaaacttcagttcgctgagtttgcctggctcgcgtttatcgttgcgcattcacgttatacagctgatgcaaatgctcgatcccggcttcgatctcatcatcctgctgttggcagatcatgaaatgaacgcgttcaggatcgatatcgcccaacgtttcacggaatgcggcaacctggttgttttcacagcccagaccaatcaccagcactgcgcccgcgttcgggtggcgcaccatgttttgcagcatggtgcgggtgttgatgtgatcgtcgcccagttgtgagcagccgtaggtgtggctgaagaggaacacgccgtcggtaccttcggcgttgttggtctctttcaggaaacggttctggatttgccgcgcgatgccgttgacacagcccacggttggcaggatccacagctcattacgcaccccgacatcgccgttagcgcgacgatagatctgcacttcacgatctgccgcttgcgcaggcagatcctgaaaatcaggttgatagcgatactgatccagatcgctcagattcgtgcgcgtattgtgggcgtggacgtgttcccccgccgcaatatccgccaatgcataaccaatcggcaggccatatttgatgacgttggccccttttgcgatatccgttaacgcaaatttatgtccacgagcaacatcctggcgcagcgtaacagtctggttatcgacactgacttctgtgccttcagccaaatctgctaaagcgaccgcgacgttatccagcgcatggatcttgatgtattgcatatcaaccccagaccttagttcagttcaatggcgaagtagtcacgcgcattgttaaagcaaatatttttcaccatctcgcccagcaggttgatgtccgccggtgcttcgcccgcttccacccagcgaccgatcatctggcacagaatgcggcggaagtattcgtgacgggtgtatgacaggaagctacggctgtcagtcagcataccgacaaagcggctcagcagaccgagctgcgccagttgggtcatctgacgttccataccgtctttctgatcgttaaaccaccagccggaaccgaactgcattttgcccggcataccttcgccctggaagttaccgatcatggtgcccagcacttcgttatcgcgcgggttcaggcagtagagaatggttttcggcagcaggttttcttcgttctgcttgctcagcagcttagacaactcttccgccatcggacggtcgttgatggagtcaaagcctacatccggccccagcagtttgaactgacgcaggttgttattacgcagcgcgccaatgtggtactgctgtacccagccgcgacgtgcatattcggcaccaaggaacaccagtaccgcagttttgaactgtgccacttcgtgctcgctcaggggttcgccagccagacggcgcgccagaatgctgtccagttccgcttcgttcgcttcagcaaacatcaccacgtccagcgcatggtcagacactttacagccgtgagcggcgaagtgatccagacgtttggtcaaggcagtttgcaggtcagcaaagcggcgaatgtcggtatcggaaacttcgcccagcttcgccatgtagtcgttaaaggtcgcctgttcgatgttgaaggctttgtccggacgccagctcggcagcactttgatggtgaaagagccgtctttggcgatctctgcgtgatgctccagagaatcgatcgggtcatcggtggtgccgaccattttcacgttcatctgctgcatgatgccgcgcgcggagaagttatcctgcgccagcagttcgttacattcgttccagatttcatcggcagttgacggagaaagcaatttgccagtgataccaaacggacgacgcagttcgaggtgcgtccagtggtataacgggttgccgatagtgtgcggaacagtcgccgcccaggcgtcaaatttttcacggtcagacgcatcaccggtacacagacgctcggccacaccgttggtacgcatagcgcgccatttgtagtgatcgcctttcagccagatgtcatacaggtttttaaaacgatagtcttccgcaatctgctgcggcggcaaatggcaatggtaatcgaaaatcggctggtcttttgcgtagtcgtgatacagacggcgggcaaattcggtatctaacaggaaatcttcagtcataaacggagtcattttcgtcttcctctcaacgagtgagctagcttgcttatggtgcgatgctgacaaagttatcacaccaatttccagagtccgaagatattttcgtgagttagatcaataaacgtagttaaaaaaattactctcaaagtggtaaatctctctgcaggccgcgccagtactggcctcgctgtcgtcaggtaatgtccctacaaatattcgcacatttgtgatggctctcaccttttaaagttgtatgacaagttatctttctgccgtcgcaaatcataagtcgacggaatgcaaattgccgattcattcatttgttagatgaatcgggttaaccggtacggaagccgaattagcacgaaactttcatggcaacgttcggggcgtgccggtttttttttcggttacccggtcgtaactaacatcttcagcctctggcgggatgatggccgcgcttcctgcggatataacaaaacgatgaggttttacatgcgtaaaattaaagggttacgttggtatatgatcgcactggtgacgcttggcaccgtgcttggttacctgacgcgtaacactgtggcggcagctgcgccaactctgatggaagagttaaacatctccacccaacagtattcctatatcatcgcagcctattctgctgcttatacggtcatgcaaccggtagcaggttatgtactggatgtgctgggtacgaaaatcggttatgcaatgtttgctgtgctgtgggccgtgttctgtggtgcaaccgcgctggcaggtagctggggtggcctggctgttgctcgtggtgcggtcggtgccgcggaagcagcgatgatcccggcgggtctgaaagccagctccgaatggttcccggcgaaagagcgttccatcgcagtaggctactttaacgtaggttcttcgattggtgcgatgattgcgccgccgctggtggtatgggcaatcgtgatgcacagctggcagatggcatttatcatctccggtgcattgagctttatctgggcgatggcatggctgattttctataaacatccgcgcgaccagaagcatctgaccgatgaagaacgcgactatattattaatggtcaggaagcccagcaccaggtgagcacggcgaagaaaatgtccgttggtcagatcctgcgtaaccgtcagttctggggtatcgcactgccgcgtttcctggcagaaccggcctggggtacttttaacgcgtggatcccgctgttcatgtttaaagtttacggctttaacctgaaagagatcgcgatgttcgcctggatgccgatgctgtttgctgacctcggttgtatcctcggtggttacctgccgccgctgttccagcgttggtttggtgtgaacctgatcgtttcccgtaagatggtcgtaacgctgggtgctgtgctgatgattggcccgggtatgatcggtctgttcaccaacccgtatgtcgcaattatgctgctgtgtatcggtggttttgcccaccaggcactgtctggcgcgctgattacgctctcttctgacgtgttcggtcgtaacgaagtggcgacggcgaacggtttaaccgggatgtccgcatggctggcaagtacgctgtttgcgctggttgtcggtgcactggctgacaccatcggcttcagcccgctgttcgcagttctggcagtatttgacctgctgggtgcgctggttatctggaccgtgttgcagaacaaaccggcgattgaggtggcgcaggaaacacataacgatcccgcaccgcaacattaacgtttaacttaagttgtaatgacgaagccgccttatcagacggcttcgtcgtttatatagaaaaaagcgtttgtccggtttgcagggttaattgatggttggcaaggaaggcgtaaagattactgacaatttgcccatgtagtacccggcctgtttatccatcacgctgaatttatcgactgccagagtcaagggtgtcggcacacacatcacggcatagcgaataccgggcagtaccaccggacgcacacgtttcaggttaatgctgttccagaccatattttcattattgcgcacatcaatttgcccaccggtttccgggttgtacattttgacccggtaatcaatgcgttctccctcgtcggtggtggtccctccctgacgatagatagagaagtaaccgtctctgcgccctgcagctggtcgcccttcatctttgagcatgatttcataactgatggcattaccgttaaaaccatcgtacaggcacatgtccaacatggtcagatcttgcgcgtagttgctgccgttaacgcttcctgttggatgcaagtctaactgcacccttggcgtggcgtgggcgaactccgggaagaacacgtcaatatggttggggtcgagcgtattcagggtaatatttgcgaaatagtcctgggccgggctgttcgaatgtaatttaactttccccttccagacgccaccaatcggcaaattcttcatctctgtctgctcaaggtagagcgtaagaaactttgtatcgtatatataataatgttgaccatcttctgtacatgaagatctattagaatccttaagattcgtctgaagccctttgccccccttgcatcctggcggcgcttcatcgctacttacaatggctgttttaaatcctttgagttttatcggccaacgcatcccactgcgttgttcagttaaatagatttgtactgtcgatatatttccattagctgtacaggtttgttggaggtcaggatacgaacattcataccacatatatccattatttcctgccgacgcttcatccttccagaagtaataatccgctctaccagatgccaaatcatacgtaatttcactggtcacgtcaggagctgcctgaacgccagtgagcgtgccaaacaagcccaatatcgccgcaatcaatcgatttctcatggtgcaacctccctttgcgccgtctgaacgtttccacgtaatttaggctgtttcaactgtgactgaacctgaatcgactccggtaattgtgaataagtcaccacactacaagtaacatctccgctgtaacgaatgctggcgcgtttctttacaacactcagtggacacttaaggaattgctgcccggaaagcagatagagctctttttcgctgccgttaatttcaagtgtaaatccgccatcttcagctaccagtaacatggcgctgttcagccccacaatcgggaattttttcaccgctgccggcagtaataaacgaccgatatagttgtagttaaagctggcagacacttcgcgatagcgcagcttgccaggcaacaacattaattcacgattccctgcaccgttaatgatgtttgttgtcccctgctgattgccctggctactgtcgttaacctcaacaaaaccagactgaaatccaggataagggaacaacacactgtcactttgaccaagctgcaaagttcggctgcctgccacccgcgcttcgagttgcagatcctgactctcttcatcctgttcagagaagcctttcacatccaccagtaccgcacccagcaaatcgtctgtaccactggctcccaaattaacgccatagcgactgacagccagcgtagagctataagtgcccgtaaaggccgaaagatgatcatgattcttacggtcataactatcagatacggtagcgtagacatttccgtattgcccatcccaacgcccgttaaccgcgctgtttatggtatcggtgttcaggcctccgacggttacgccaagttctttatggctgaatgaatcgttataaaaggtatgcgataactgccatgacgtttgatcgccatcctgttcgctataacgataatccgtagacacatttgttgaatggctgttgttattgctatccatcgttggcgtgtcagataacgaaaacgataagtacaagccgttgtcgtcgttatcgccaccgttgtcattacgatggaaaacaccgactgacgtactcaaaatccagtcacgcatcacaaaagcgcgggaagcgctaagttgtacagtttcagagatactttgcgctgttgtctggcgaagatagttattttcaaagctctgctgtttatcccaacgcaaactatcatcagtgttattttgtgtgcgggtataacccagcatcatattccagccgacaaaattctgtgaaaccgtcgcggaaatactttcataacagcttaaggcgttatagctctctctgctgtcggttgtacaagcatcgccgtcagagttggtccgataaaagcccaacgtcggccatcccggattactccagttggcctgttgcatatcacctttgccgccgtcatcgttacggaacacgctggcgctgattgcaagattccccaccccgcctaaatctgccgtccagttattacctaactcgaaagcactcacatcatcggcattcgccagccctgcgtagagctcatattgcggatgtaatggcaggcgtactcctagctgataagctgaactttcatcatcagaaacctgtgatgtagttttacctgcctgtaagaaccattgcgcatttccgtcagtcagaccgccggttttggtaaacggcacaagctcggtgcgggtgagttggttattttcgtagacttttaatgccacgctgtagctgcctggcggaaaggaactggtatcaataaattgcgaaccactattgagataaaacgatcccaaaagttgctcattacgataagcgtcaacacgagaattgcgcgaaagcagaaccattactggggttccttgctggctttgcgcctggtttaaatagctcagtgtcgacccgatacgcatcccatcaattgcaccgagtggcagaaagttaaaggtaaagttcccgccttgtgcattaaatagtgtgcggttgtccatgcgacccgcctgcacataataacgacgtaaaaaatcataacgataatagagatcgctgacgtcagcattactgtcactgacatcatctgcatcataaccgttgaaattccagtgtgcaccaatataactattttctgttattcccagcgcaccgtttccctgaatagacaacgattggtaatcatcctgtgccagaacattgatgtcttgctgatgtataaaagcattaacagtatttttgtctggatttaaatataatgacttcgcatcgaaagctgaattccattgcggattaataaacaacgttgccgaactttcttcatcattatagattatttccagcgtatcggtattcagaaaaccacaccctgagtcagtacgtacataaccgcaagccaattcaccgtggcgagctagcggctgcgataatttttctttcactatatgcgcgattttctgatcgtctacatccagttccagcttgttatatagacttgctggatcaagaaatgttacggtatcaagattaaccattgcataatatttaccgagacttttccctgaaaaataaacctcgatatactcctgctgtccctgagcaataacctcaaaccctgcgggaattttggttaatgtcgcctctgccgggctgagactgccaggcatcaaaagagccagtaattttttatccatggcaatcctgaaatccataacaaatactaaaacagttaaaataagggagggctacccctccctttgttacgtgttaattctgttatctggattagatatcctgagacagataaatgcttactacaccacggtagatgcctgtctccagaacacctttggtggtttgagcaaacatcaggtttttagccagagaaccgttagttaacgcatcggaagcaaagattttggttgcggtaaaagtggttgccgcatcagctttaatttcttcaccgccccaggttactgtcagcggaacaatcttgctagcatccaggctttgaaccagttgcgccggggaaactaactgcatttttacatctttggtaacgtcgttagaccagattttggtcatcaactggtaagattgcagaccctgccccggcagatattgcatttctactgctttcggcaacgcggtgttatcggtctgtgtcatatccagagcggcatcaacgttggccgttacagtaatatccttttgtactgccaatgcggagcctgcaacagaaaacatcgctgcgaccagaagagattttgcaaatacctttttcattactattccttcgtttattacaatgataattaatggaccgccagttcaaactcgccattatctttggtgatccagttattatatttgacaacgattttgtcgtagccagatatgctttcaagatttctttcctgaccagggaagatgtttttatttacggtctgtatcttacaattttctttgctattatttttacaataagcgatcgttaaaatctttaagcgttgattccctgcattaactaatttttgggcagcatttacttctaacttagcaataggttgctgaggtggaacactaacaacaatcccccaaattaagttaactgttaactgcatagagagatcttttttatctgtggcaacgtcatcaatactgggaaccgcttcaaatttaacgcgataatttttctctttttgctctggttccatcgcaacaaaacgtacggttttgctactaccggctggtaaagcgaatttaggtggcataacaaccagatgatttgcatcaccggatttaatctcaacttcattttcctgaggcgtcgatggattatcgatacggaatactgtcgccttgatgtactgaacttcattacttttagatattacgcgaacgttgccttcaccctgactattaatggaaacagccataggataaacagtcatatttgactgtgccaaaaaaggagcgaacacgaataaaagcggcgtaagccgtgataagagattaattttcgccaccatataaatttgatcttacaatattgtttccaaaaagttggtgtattagagatgtagatttattgtaagtcaatataaaaaagcatttttagttaatattaaatttaaaggctgggaattaacttactgaaatttagtagctttcacaatgacgatacttattttttaggaatttataaatattcacaatattaattcaatacattaattcaatcaccaaatttatatatgaccaatggcatacccatgaataaagtggtatgataacttcgtccgcattccactccgggagacgcatatggaaatcactgaaccacgccgtttgtatcaacaacttgccgctgacctgaaagagcgcatcgaacagggcgtctatctggtaggtgataaactgcctgcagaacgctttattgccgatgaaaagaacgtcagccgtacggtagttcgtgaagccatcatcatgctggaagttgaaggctatgtcgaagtgcgtaaaggttcaggtattcatgtggtttccaaccagccgcgccatcagcaggcagctgacaataatatggaattcgccaattacggtccgtttgagttgcttcaggctcgccagctcatcgaaagtaatattgccgaattcgcggcaactcaggtaacgaaacaggacatcatgaaactgatggccattcaggaacaggcgcgcggcgaacaatgcttccgtgattccgagtgggatttacagttccacattcaggtagccctggcgacgcagaactccgccctggcggccatcgttgaaaaaatgtggacacaacgtagccataacccgtactggaaaaaactgcacgaacacattgattcccgtaccgtcgataactggtgtgatgaccacgatcaaatcctcaaggcgctgattcgcaaagatcctcatgctgctaagctggcaatgtggcagcacctggaaaacaccaagatcatgttattcaacgaaaccagcgacgacttcgagttcaatgccgaccgctatctattcgccgaaaacccggtggtgcatctcgatacggccaccagtggcagtaaatgaaatacctgtccgacaggcgctgcgacgcgcctgtttgtctcgtcggtaagcgaaaagtataaagtgtcagcctgtgtaaatcctctcgccaccctcccctgcattcagcaaaatcagactccacggacatgtaattttgataacgaacaacgttgacctttgttacaattagattcaatttgaatttatgtttttgaatgctttcttatctcacgatttaacagggaatagttcaggctgtgttgatgtatcaaacccgcagaacataccaaaacagcaataacattgcggtagtgtatcttttaaaaccagcgtggcgttaaccgattcaccaggaataatgaatggaacttttgacccaattgctgcaagccctgtgggcgcaggattttgaaaccctggccaatccatcgatgattggcatgttgtattttgtcttgtttgtaattttgttccttgaaaacggcttgcttccagcggcctttttaccgggcgacagtttactggtattggtcggcgtgttgattgcgaaaggcgcgatgggttacccgcaaacgattctgctgctgaccgttgccgccagcctcggctgctgggtcagctatattcaggggcgatggctgggcaatacccgcaccgtacaaaactggctatctcatttacccgcgcattatcatcaacgcgcacaccatctttttcataaacacggtttatcggcgctgttaattggtcgctttattgcgtttgtcagaacactgctgccgacgattgccgggttatcagggctgaataacgcgcgctttcagtttttcaactggatgagcggtctgctgtgggtattgatcctgacaactctgggttacatgctcggcaaaacgccggtatttttaaagtacgaggaccagctgatgtcatgcctgatgctgctcccggtggtgctgctggtgtttggcctggcaggttctctggtcgtgttatggaaaaagaaatatggaaatcgggggtaagggatgcaaatacctcgcatgtcgcttcgccagctagcctggtccggcactgttttacttctggtcggcacgctgttgctggcctggtccgcggttcgccagcaagagtctacgctggcgattcatgccgttcatcaaggcacaacgatgccagacggtttttcgatctggcatcaccttgacgctcatggcattcctttcaaaagtatcacccccaaaaacgacactctgttaattacatttgactccagcgaccagagcgccgccgcaaaagcggtcctcgacagaacattgccccatggctacatcattgcgcagcaggacaataacagtcaggctatgcagtggctgacccggttacgggataactctcatcgcttcggataacttcctgttatccgaaacatatcactcactttggtgatttcaccgtaactgtctatgattaatgaggcggtggttaacactaccgcttcgttgtctggacaatcgttcctttgtaataggtccgaatcacaatggaaggttcaagaatgaaataccgcatcgctttagctgtttctctctttgctcttagtgccggtagttatgccactaccctgtgtcaggaaaaggagcaaaatatccttaaggagatcagctatgccgaaaaacaccaaaaccagaatcgtattgacggtctgaataaagccctgagtgaagtccgggccaactgttcagatagccagctgcgtgccgatcatcacaagaaaatcgcaaagcagaaagatgaggtggcggaacgccagcaagatttagccgaggcgaagcaaaaaggcgatgccgataagattgccaaacgcgaacggaaactggcagaagcgcaggaagagctgaaaaagctggaagcgcgcgactactaactcacaatagtcactacttactcacctggagaaaactatgtcgaaagaacacactacggaacatctgcgtgctgagttgaaatccctttccgatacgctggaagaggtgcttagctcatctggcgagaagtcgaaagaagagttgagtaagattcgtagcaaagcggagcaggcactgaaacagagccgttatcgcctgggtgaaaccggtgatgccatcgccaaacaaacccgtgtcgcggcggcgcgtgctgatgagtatgtgcgtgaaaatccgtggaccggcgtgggcattggcgctgcaatcggtgtagtgctcggcgttctgctgtcgcgtcgttaattatggcggacactcatcacgcgcaagggcccggtaaaagcgttctgggcatcgggcagcgaattgtttccatcatggttgaaatggtggaaacacgtctgcggctggcggtggtggagctggaagaggaaaaagctaatctctttcaacttttactgatgctgggcctgacgatgcttttcgctgcatttggtcttatgagcctgatggtgctaattatttgggcggttgatccgcaatatcgcctgaatgcgatgattgccaccaccgtggtgttgctgctactggcactgattggcggtatctggacgttacgtaaatcgcgtaaatccaccttgctgcgccatacacgccatgagctggcaaacgatcggcaactgctcgaggaggagtcccgtgagcagtaaagtcgaacgtgaacgacgtaaggcgcaactgcttagccagatccagcaacaacggctggatctttccgccagtcgtcgtgaatggctggaggcaacaggcgcttacgatcgtcgctggaatatgctgctaagtctgcgctcctgggtgctggttggcagtagcgtgatggcgatctggacgattcgccatcctaatatgctggtccgctgggccagacgcggttttggcgtatggagcgcctggcgtctggttaaaacgaccctcaagcagcaacagcttcgcggttaacttccctctggccggagcaattccggccttatccctcaaattttttgaagatttttgacagttttccttgctaacaatcatcattcaccacgtttatgattctctccatcgacagcaacgacgctaataccgcgcccttgcacaaaaaacaatcagcagcctgagtggcgcagtggagagtatgatgaaaaaattagaagatgttggtgtactggtagcgcgcattttaatgccgattctgtttattaccgcaggctggggaaaaatcaccgcttactctggtacccaacaatatatggaagcaatgggtgtcccgggttttatgctgccgctggtgattctgcttgagttcggtggtggtctggcaatcctgttcggtttcctgactcgcaccacagccctgtttactgcgggctttacgctgctgacggcatttttatttcacagcaactttgctgaaggcgtcaactcgctgatgttcatgaaaaacctgacaatttctggcggattcctgctgctggcaattaccggtccgggcgcgtatagcatcgaccgcctgctgaataaaaagtggtaagcacgcgctatacttaacgataaaaaacgaggaggaagctcctcgtttttgctattggaggagagaaaaatgggtcaactgattgacggcgtctggcatgacacctggtacgatactaaatctaccggcggtaaatttcaacgttcagcttccgcatttcgtaactggctcactgccgatggcgcacctggccccactggcacaggcggttttatcgcagagaaagatcgttatcatctctatatttcactcgcctgcccgtgggcgcaccgcacgctgatcatgcgcaaactcaaaggactggaaccgtttatttccgtttccgtagtgaacccgctgatgctggaaaacggctggacctttgatgacagttttccgggagcaaccggagatacgctctatcaacatgaatttctgtatcagctttatctccacgccgatccacactacagcggacgagttactgttcccgtgctgtgggacaaaaagaaccacaccatcgtcagcaacgaatcagcagaaatcatccgcatgttcaataccgcgtttgatgcgctgggcgcaaaagcgggtgattactacccaccagccctgcaaacgaaaattgaggaacttaacggctggatttatgacaccgttaacaacggcgtgtataaagctggttttgccaccagccagcaagcctacgacgaggcggtggcgaaagtgtttgaatcgctggcgcgactggagcagattttaggccagcatcgttacctgaccggcaaccagctaaccgaagccgatattcgcctgtggactacgctggtgcgttttgatccagtgtatgtgacccacttcaagtgtgataagcaccgcatcagcgattacctgaatctgtatggcttcctgcgcgatatctaccagatgccggggatcgccgaaactgtcaatttcgatcacatccgtaatcattacttccgcagccataagaccatcaaccctacggggattatttcaattggtccgtggcaggatctcgatgaaccgcatggacgagatgttcgcttcggttaaaaaaaggcaccttacgaggtgcctctgataattagctaagtgcatgttgttcatgtcggatgcggcgtgaacgccttatcaaacctacaaaacatttatattcaatatgttgcaatgaccgcgcaggccagataagcgtagcgcatctggcgattttgcgcttgtcatcagtcttagcgcgccttcacagcactttattaattccttgaacgaatatttactgccatttcattcacgtctattcttaatttgctgctttaaaaacaagtgattgagcaaaattgaggcaaaaatggactggtatctgaaagtactaaaaaattatgtcggtttccggggtcgtgcgcggcgcaaagagtactggatgtttattctggtcaacatcatctttacgttcgtgctggggctgctggataaaatgttaggctggcaacgcgctggtggcgaaggcatcctgacgacaatctacggtattctggtgtttttaccgtggtgggcagttcagttccgccgcctgcacgacaccgaccgctcggcgtggtgggcactgttgttcttaatcccgtttatcggctggcttattatcatcgtctttaactgccaggcgggtacgccaggcgaaaaccgctttggaccagatccgaaactggaaccttaaaacaaatctgctcgccggatgtctgactcatccggcttttatcatcatgttgatgaatgaataatttactaatgtttatttaaaatatttcaatgtcgttatataaattacctataaaaaacaaccatgtatttatcttaaatatcaaaacctttataacatccgaaaaagaaagatacgaatagcatttacacaatacccggaatagactttcgtcacttttaattaaagggatgtttttatgcagtggtatttagccgtattaaaaaattatgttggtttctctggtcgcgcacgtcgtaaagagtactggatgtttactttgattaacgccatcgtcggcgctattatcaatgtcattcaattgattttaggtttagagtttccattcctttctctcatttacctggcagcaacaatcattccggtcattgctctgtgtgttcgtcgtctgcacgatactgaccgttcaggtgcgtgggcgcttctctatctggtaccgatcattggctggttagttctgtttgtatttgcctgtttagaaggcaattctggcagcaatcgttacggaaacgatcctaagtttggttcaaattaatcttagaattggggcgacatttcgcccctttttattaataataacaaatattattttccgctaaaaagtttgggaatttcccgcagacaccaggatttcgcttcccccatactgtcacgacgccaggccataataatatcgatctcgctggtcgattccgggctgacgacacgcaaccgcccttccgcaatatctttttcgaccatcggatacggcatcgtcgccacgccaagccccgccagtaatgcctgacgtttatcttcaatcgtgctcaccgttaagcgcggctgtttgtccagcagctgtacggtcaacaccgggcgctcacgagcggtatccgctaccgcaattccacgatatttcacgcgcgtcacttcagataacggttccggctcctgatgaatcgggtgatcaggcgcggcaacgtagacgttcattaacgtatagagcttgcgcgagttgatctccgacgaggaacgaaaatgcatatccggcgcgataacaatatccgcccgcccctgctccagtcgttcccacgcccccgccagcacttcggtgatgattgccagttgggtattggcttttgccgccagtttgtcgattaacgggaaaaaggcaggtgtcggtaccagcgcttcggtcacaatggtgagatgcgtttcccaaccgcgcgcgagggcttccgcatcggtagtcagtttatctgcggcttccagcaaaacgcgccctcgctccagcaacatcctcccgacattggtgaatttggtgcgatggcccgagcggtcaaacagcaccacatccagctcttcttccagtttttgcatggtgtagctaagtgcggaaggcacgcgtcccagctcatccgccgccgccgcaaaactgccccggcgatcgatcgcatccataacccgtagtgcttccagcgttaatgccctttctttggccatttcgttctcattcaggaaatttgaacataccgggcagaatatctggctaacaatgtagcgtccagccccttaccataaaaggaagtaaagagaggtcaagaattatgattactacccgaactgccaggcagtgtggacaagcagactacggatggttgcaggcccggtatactttttcctttggacactacttcgacccgaaattgttaggctatgcctccctgcgtgtgcttaaccaggaagtgctggccccaggtgccgcctttcagccgcgaacctatcccaaagtcgatattttaaatgtgattctggatggagaagcagagtatcgcgacagcgaaggcaatcatgttcaggccagcgccggtgaggcgttgctgctctctacccagccgggtgtcagctacagcgaacacaatctcagcaaagacaaaccgttaacacgaatgcagctttggctggacgcctgcccgcagcgagagaatccgctgattcaaaaactggcgcttaatatgggcaagcagcaattaatcgcctcgccagagggcacagtgggtagcctgcaactgcgccagcaagtgtggctgcaccatatcgtgctcgacaaaggcgaaagtgcgaatttcccgttgcatgggccacgcgcgtatttgcaatcgattcacgggaaatttcatgcgcttacgcatcatgaagagaaagcggcgctaacctgcggtgatggggcgtttattcgtgacgaggctaacattacgctggttgccgattccccactgcgcgctttgctgatagatttgcctgtctagttgtttttacagggagatgatgatgagtaaaaaattggccaaaaagcgccagccggtgaagcccgtggtggcgaaagaacctgctcgcaccgccaaaaattttggctatgaagagatgttgagcgagctggaagctatcgtcgcggatgctgaaacgcgtttagtcgaggatgaagctaccgcgtaaagacaagttgccggatgcggcgaaaacgccttatccggcacaatacccaaaacctggcgtttatctggccttgctcgccataatctcgataatctgccgatccgtttgctgcatcgaatggcttgctaacgcacacaggttggcaatcgactgctcaacatcatgcgccacgatcccttcattgccggtcacggcggtatcatccagcgccattaacaccgctttccacgcagccgaagcactggtcgaaaccttcatcgcgcagctgttcgacgcaccatcgcaaatcatgccgctgacatcgccgatcatactgctgatcgccatcgagatggtttcataacgcccatccaccagccatgccatcccggcggcggcccccattgctgcggtcgttgcggcacaaagtgcagacaaacgcggtaactggttatggatgtaaattgcgctcaaatgagaaagcatcagcgcacgcgccagccgttcatcatccgctccgaagtgttctgctaccaccaccacaggcattgttgcggtgatcccctggttacccgagccggagttactcatagccggaagcgtagcgccgcccatacgcgcatcggatgccgcgctggtacgaatcacaatggatgaagagagatctttcgccagcaaaccgcgctcgcactgtttttccagcgtcgcgccaatatgcagcccccacttaccgctcaaaccttcctgcgataacgcacaatttagcttcgcggaatcgagaataaagcggatcgccgcaaacgggacttcattgacgaacttcaggatctcagccagcgtcgttctggaaagcaccgtcagcggagactcttgctcgccctctgccacacacgcctgctgggtaaacaccacaccattgtgcgtctcaatatgcacaatgttggtatgcccgccgacgatggtgacacacgcccacttctcacccgtgccagactttggcgcgtgagaagaggatttcattgcaaggttcctggatcttaacggagactttccccgccgccagcagtgctttggcatcggcaattgcctgcgcagttgcgtctttcagcacttccagcccggcgttggcatttccacctaacgcccccagcgccgccgcaatcggcagccccaccattcccgtgccgggaacggtgacgcccagaccgttcttcatcagatttggcgaaacccaggcttctacacgttcaaccggaccttccagttctgccgcagcaaccgccgccgccagcgccagtgaaatcggttcagtacatcccagcgccggttttacttcctcctgaactgcaaggatgtaacgctgccataacggatttaaagtcgaatcaaacatattaaaaaccttaaaatttcaggttaatcaagaaaatgccaggaacggagaaacacaaagcaacaaaccagtgacgataatcaggtacagagacatccctttgtatttgtgcaatgccggtactttgtaaaccagccacgccgggatcaggcaccctaccatgccgaaaatcgggctacagatagaggtgaagctcaacaccggtgcgttcagtacgatggcgctccaggccagcaaaatggcgaaaatcatgatgccgcgctgaacgagattttcgttaatcttctcggcaggcatcttgcgacgcaggatgttcattacgatcccttgcgttgcttcgcgaaagcctaaatagacgccaaagaatgcagtcatgacagcaaagatattgagaatgacgctgaccactttcacccacgctgcgccgtcaccgctaataaactgtgcggcaatcgccagcgcggaaatattctgctcataggcttttaccgcttcgtcatgtcccatcgccagcgtgaacgacacggcgtagaaaaagacggtgacaaacaaaatgccaaacgcgatattcattgcccgcaatgctttatgccgcgccacttcaattgatttttcccgcgagcgataagagatcaccatcgggcttaacgtctggataaacagaatcgacgtcagggtaaacggcagcgtaataatggcgtttttcaccagcagccccagcggcggtagcgaaccgacgttatacagatgccacattcccaccatcgacacgcccagcgccgcgaccaccagcagcttggtcagcaccatgccggtcgaaattttgaataacaatttctcgccgcgtgaagagatcgccaccagaatgcaaatcagtaccagaccataaaagggactgtctgacagcaacccttccgtcacgccgaaggtatgcagataggaagcactatcgttggtgatggcggtggaatagacgaacatccaaatcaccagcattacgaaatagagcgcacctaacaggatgccccagtttttacctaaataaccgctaatgacactcgggtaatctttacattctggtgattctgccagcgtattaataaacaaccgctgaaacagatacattgccgggtaaccaatcaccgatgagagcaaaaatacccacaatcccatcaaaccgacctgcaccgggagaaaaacaatccccgcgccaatcgccatcccgatactcataatcacccagccggtgtcagtactgtcgaatttgatcgcttctcgccactcgctctcactcattccagcacgacccgccggggtcgaagcgtctgcaatgacgcctttattcgatgcaatttccataatttctcgctcaatattttgtagggcttattatttttttccgagccgcatcaaggcgatatgcggtctacgtttttgcaggcgagttattagaataaagaaatgatacgcgcgaggtcagagaaaatcttcacaatcaagactttgaaataacggagatggataagaattttctactaaattaatcgcaagagaatattcattctctatttgcggcagatcacaaaaaaaggtgcacatttgtgcacccaaggatgaaagctgacagcaatgtcagccgcagaccactttaatggccagtcctccgcgtgatgtttcgcggtatttatcgttcatatctttgccggtttcatacatcgtctcgatcactttatcgagtgaaacacgcggtgccgaggtgcggcgcatcgccatccgcgcggcgtttactgctttcacggcattaatggcattacgttcaatgcacgggatttgtacctgtccggcaaccggatcgcaggtcagcccaaggttatgctccatcgcgatttccgccgcattgcatacctgcgccggactgccgcccagtagttcagttaaccctgccgccgccattgaacaggccacgccaatctccccctgacagccgacctccgcgccagagatggaggcgttcattttatacagcgcgccaatagcccccgctgccagaaaatagcgggcaattgaccgctcgtttaccggacgacggaacttatcgtaataagccagcactgccggaataatgccgcacgcaccgttagtcggtgccgttaccacgcgcccgccagctgcgttttcttcactaaccgccagcgcgtacatgttgatccagtcgatgacattcatcggatcgttagagatgttatcgctagaaaccagctgacgacgcagcgctacggcacgacgcggcacattgagcggaccaggcagcacgccttcagtgttcatcccgcgttcaataccgtcatgcatcacttgccagatacgggcaaaccctgcgtcaatttccgctttactgcgcagcgctagctcgttgtgcatcatcaggccagatatagacaggccgttgtaatcacacattttcagcagttcacctgctgagtggaaatcgtaaggtacggacgtttcgacatcgtgcgacaggccgaagtgttcttcttcgacaataaacccgccgccgacagagtaataggttttacttaatagcgcttcctgtcccttccaggcagtgatccgcattccgttctcatggcgaggcaacatttcgggatggaagataatgttctttgctacaggaaaatcaacaatatgcgcaccagatgccactggcagccgcccgctgcgcgttactaactctataaatgcagggatctcatcaatgacaacatcctgcggactgtttcctgccagtcccatgataatggcgacatccgtggcatggcctttgcccgtcagtgacaacgacccatacagatcgaccacaatatggctcgtcgcggttaataagccgctactttccagccgatcaataaaactttttccggcattcattggccccacggtatgcgaactggagggaccaatcccaattttgaaaatatcgaatgcactaatcatatccacaccctcggattgccgttcagtgaagtggagcggaacgaccttgcgaccgtcccgctcacgaggctttacgcactacgtactgcgatagcttcaatttccagcttcacatctttcggcaaacgcgcaacctgcacacagctccgggtcgggtaggtcgcctgatgctcatcgaagaactgcttatagacttcattgatggtggcaaaatcattcagatcggtgatgaacacggtcatcttgatgatatcgcccacgctcagcccggcagcaaccacgatcgctttgacgttttcgaggcttaaacgcgcctgatcttgcacatcagccgggatctcaccggtctgcgggcaaaccggaatttgcccggaggtgaagaccatgctgcctaaatcaacgccctgaacataagggccgattgcgcctggggcacgttgcgtttcgataatctttttcatacatcctccggcgtcagagcgcctgggtaaaagtacgtgaaataacatcctgttgctgttcacgggtcagtgcgttgaagcgcacggcgtagccagagacacggattgtcaggttaggatatttttccgggtgctcgatggcatccagcagcatttcccgattcattacgttgacgttgaggtgttgaccgccttcgacatccgcttcgtggtggaaatacccatccagcaggccgacaaggttggttttacgtactggatcttctttgcccagcgccgcaggaacgattgagaaggtgtacgagatcccatctttggcgtaggtgaacggcagtttcgccaccgacgtcaatgaggccacggcacctttgcggtcacgaccatgcatcgggttagcgcccggcgcgaacggtgttccggcgcgacgaccgtccggcgtattaccggttttctggccgtacaccacgttagaagtgatagtcagaatcgactgggtagggacggcgttgcgataggttggcagcgctttaattttcttcataaagcgttcaaccaggtcgcaggcaatgctgtctacgcgctcgtcgttgttgccgtactgcggatattcaccgtcgatttcaaagtccaccgccaggccgttttcgtcacggattggtttcacgcgggcatatttgatggcagacagggagtccgtcgccaccgacaggcccgcgatgccgcatgccatagtgcgatagacatcacgatcgtgcagcgccatcagcgaagcttcgtagctgtacttgtcgtgcatgtagtgaatgatattcagcgcgctgatgtactgcaccgccagccagtccatgaagtgatcgaggctgtccatcactttgtcgtaatccagcacgtcgtccatcagcggtgctgttttcggcccgacctgaatcttcagcttctcgtccaccccgccgttaattgcgtagagcagcgttttcgccaggttagcgcgtgcaccaaagaactgcatttgcttaccaatcaccattgggctgacgcagcaggcaatcgcgtaatcgtcgctgttgaagtcagtacgcatcagatcgtcattttcatactgcaaggaagaggtgacgatcgacacctgcgcggcatattttttgaaggcaatcggtaattcttccgaccaaagaatggtcaggttaggttccggtgccggccccatagtgtgcagggtgtgcaaatagcggaaggagtttttggtcaccagcgtacgaccgtccagccccatcccgccgatcacttccgtcgcccagattgggtcgccggagaacagcgaatcaaattccggtgtacgcaggaagcgtaccatacggatcttcatgatgaagtgatcgatcagttcctgtgcctgctgctcattgagtacgccagctttaaagtcgcgctcaatgtagatatcgaggaacgatgccgtgcggcccagcgacatcgcgccgccattttgcgatttcactgccgccagataagcgaagtagagccactgcaccgcttcctgcgcattctgcgccgggcgagagatatcaaagccatatttcgccgccatttcctgaatctgcaacagcgcatgacgatgctctgccagctcctcacgcagacggatggtggcttccagatcctcgcctttttccagacgagactggagatcggcaaattgcagttcgcgttcacgtaccagataactgatgccatacagcgctacgcggcgatagtcaccgataatgcgcccacggccatagccatctggtaaaccggtcagcacgccagatttacggcagcgcagcatatccggtgagtaaacatcaaatacgccctggttatgggttttacgcagatcggtaaacagatattcaaattcactgtccatttctcggccataggcgtggaatgaacttttaatcatattaatgccaccgaacgggtgtagcgcacgtttcaacggcgcatccgtttgcaggccaacaattttttccagcggctggttaatatatcccgcatcatgagcggtaattgtggtggcaatattggtatcgaaatcaaccggcgcgtgggttgcgttttcgatacggataccttccattactttttcccacaattccgtggtggcaggcgtcgcttcggcgaggaaagattcatcgccttcatacggtgtatagttatgttgaataaaatcgcggacattaatttcgtttttccagtccgtacctttaaagccaagccatgcgtcggcgtacagcttatcgctggtatcaatatctaccttcatgaaaaataatctctctacaatacttcaactaaattatgcaaattctgcgggcgcgttaactttgcctaaatgaatggcatccaaagcaatcattttttcttcgttagtcggaataacggcacaaatgacacgcgcattttcactggaaacaattcgctctccaaaagagttagatcgattattcatttctgtatcaatcactacgcctaatacagccaaatgttccatgaccagacgacgaattaaacttgaattctctcctattccgccggtgaatataattccatccaggcgacgtaatgaagctgcgtgtccggcaatatgacgggcaattcggtgaacaaaggttttaattgccagttgcgcgcgttcgtgaccttcatgccaggctttttccagaacacgtaaatccgaagaaagaccggaaatacctaataatcccgactctttattcactacgcgttccaggtcacccagactctggttggtttggctggcgacccaggacatcgcaccaaagtcgacatcgccactgcgggtacccatcatcaagccttccagcggcgtcattcccattgaagtatcaacactctgaccgttgcgaaccgcgcagattgacgcgccattgccaagatgcgccacaaccaggccggagtcatcttccgccagattcagcagcgaatgtgcgcgctgggaaacatagcggtgcgacgtgccgtggaaaccataacggcgtacacctaactcttcataatatttccacggcaggccgtataaataagcttccggagccatcgtctggtggaaactggtatcaaataccgccacctgagttacgcccggaaataattgctgcgccgattcaataccacttaaattggcgtaattatgcaggggtgccagtggagaaacgcgacggatattatcaatgacttcatcggtaataatggcggactcggtaaaaatactgccgccgtgagcgatgcggtggccaattaaggccacactgtcatttaaattccgtttttccagttcaaatgcaattgccttcaatgcaccttcgtagctgtggtgagccagcggtgctggctctcccccatttacggataagaatgcattttccgagttaataccgtcggcaatacctgacattaatacttcacagtcgctggcatcgagtacggaaaacttaatcgaagacgaaccacagttaataaccaaaacaaccggaaattcattcatctcttttctcatcctgagttacggattaaaacagtttgtatacgatgttcaggatggtcagcagaccaatcacggtaacaaacacgttatccagacgaccacggtatttcgccagagacggcgctttacggatggcatacatcggcaacaggcacagcagggatgcgataatcggtgcgcccatggcttcaataaggtcgaggatgttcgggttggcgtaggcaacaacccaggtggagcccatgatgaagatcatgctgatagtgttcagtttacccagcgacactttagttttgtcgcctttataaccgaacttcagaatcagaccattcaagccttccagcgtccccagatagtgaccgaagaaagatttgaagatagccacgagtgcgatgatggaagccgcatattccagtgtaatcgcgaacgttgttttggtaccggtcatggacgcaaagtggttagccagataagaaagcactggaatattctgcgctttggcttccgccatgttggccggagacagcgtaaacaggcagctaaaggcaaagaacatcaccactgcaaccatcagcatgctggcacgagaaatgatttgggaacatttacgttcggtgaagtcgcgaccgaagtctttctcatactcttcacgtttagaaaccacgaaggaagagacgattggcgagaagttaaaggagaaaaccatgatggaaatccccagccagacagtgatcaggataccgtcatgaccggttaacgacagcgaaccgaggtcaacctggtcgataactgcagagttccagtaagggatcagcgacagagaaatcagcaccaggctggcgataaacggccataccaggtagctcatcactttaaccatcagatccttaccaaaccagatgacgaaagccatcagcagcaacaggaacagcgccacaaagccgcgattcagcggtgcaaatccgagctggttttcccagaacgtcataaaggtattggtaatagtaacgccataaatccacagcagtgggcaaatcgcgaagaagtacaggaacgtgataaccacgccgccagttttaccaaaatgctcttccaccgtttccgtaatgttgccggaagggttagagccagaaagacacagacgcgccagcgcccggtggcaataaaatgcgatggggtatgccaataccaacatcagaagaatcgggatcagtccgccaaaacctgcgcggatagggaagaacagcaccccggcgccgattgccgtaccaaacaagcctaacgtccatgtggtatctgatttacgccaggacgattgttttgtctggctggatacaatgctatctgaagtactcatatcctatcctcaacgaattaattaagcgtcaacgaaaccggtgatttgagagacgcgagaaagatcgatattgccgccggaaataatactgacggtttttctgttttgaatatattggtctaatttaccgcttaataatgcagcacatgccagagcgcctgcgccttcggtgacgactttattgcgctgaattaaggcaatcatactgtttctgatttcgtcttcgctgaccagcacgatgtcatcgactaattcacgaacgatttcgtaagttaaattacccgggcgggagacatcacaaccatccgccagggtgccggtagttcggtgcgtggttatttctccggagtggaaagaagccgccatgccgtgaacgttttcagactgtacgccaataacacgaatggtcgggttaatagatttaattgccaccgcaataccagcaattaaaccgccaccaccaattggcacaatcacgttatcgacatcatagagatcttccataatttccagaccaatcgttccctggccagcaatcactttcggatcatcgtaaggtgggataaaaatacggccttccatttcgacaatttcgctcactttagcgatagtgtcgttgaaattatcaccatgcagaacgacttctgcggagtagtcgcacgttgccgctactttggattttggcgcaccttttggcatcaccactttaccgtcgatacccagcatcgcgcaggagagcgagaccccttgcgcatggttgcccgcagaacaggccactacacctttacgtttttccgcatcagtcagtgaacttaatttattaaatgcgccacgaattttaaatgaacccgtacgctgcatattttcaaacttcaggaatatttcacctttgcaacgttcactaaaatagttggagcgaggcatgcctgttttataaattcgcccagccagtcgttgtttcgcttcaataatgtcatcaatagcaaccggcagatcgtatgtaatatgcattataaaacctcttcgcctgaattaaatatgtaggtaaccgtaaccgacacctgcaagacagacaggtggattatttatgtttaaataaaaacaaataactaaccaacttctattaattgccttcgtctacacccattataagatgaatactctttggctaattccaccaaaaccgatgctgcttttttaatacgataatttttcgaccataccgcggcatattgtgccacaggtaatgtttcttcaaccggaatagtaataaattgattagaaccaaaaggtgacgtcatatcacaaggaatgacagttaagaaatcagcattgagaacaagattataaattgtcacgactgagtcggttttaacgatgttttcaatactgatgccatttctttgtaacgtagtaagaagctcgctgtagtaccccatattagtttgtggcaacacccactgttcgttcttcaacgactccagcgtggtggtgccggtgcatgttcgggacttactggctaccagcacaaactcggactcgaacagcggctcaacatgtaaatcctgaagcttcatttctgcacttaacgtaccaatcgcaaaatccagtcgaccgtcgcggattgccggtaagaacgaagacagttgcgcttcatacatagaaacctgcgctttcgggaacacctctttgaacttgttgatcatccctgacataaaagtaaaaccaatcaatgaaggaaaaccaaatgagacttccaccaccgcctcagaagacataccgcttatctcattaaccatatttttcatttcacgggtaatggattcggaacgggagagtaacaattgaccggcaggtgttaatgttacaccggtatttttccgcaccactaattccacaccaaaataatcttcaatatcgttaatgattttactgacggccggttgagttaaccctaattcttttgcagccgagccgatagagccacttctaatgacttcctgaaagactaccaggtgctgcgttttcggaagaagaatagtgctcataacgacctacgttaattacctcattgacggcatgaagtgtatcaaaatgaaatgaacaggatatgtgcgaccactcacaaattaactttcaatactttccatggtatcgttacgcaaattaaatacctttaaatatcaacaagttaaagtataaaaatcagcataaaccctgatttttgtcaaaaaaaatgacggggataaccatattttatggcgataacatcattcgttatgtggttaatataaaaaaggggctgagaccatatttcaagcaattaccggataattaccaggcaaaatttgagttaaatttaatgagcaagttctcaaattttattataaataaaccattttcagcgataaatactgcggcacgtcacattttttcacgctatttgttggagaacaaacatttattttatcaatattttaaaatttcgaatacaggtattgatcatctcgaacaattgattaacgtcaactttttctcttctgacaggacgtcattttgtgaatgcaatcgttttccataaattcttctcccctcataggcgacgaatagcattttgtgttgaggatcacaaaacgaataattgctggtcgccgcgataaggtcagacaaagacaacaagggaaattttcacagagcttttgatcgtcgtaggccacagaatgttgcttcgtttactgtaacgccgggtaaatgagcgttttttgatagtgcgaaagaaccctgcgaggaaaataagcatctattattgtttgtcatgacgacaaggcaggcatcaatgaaaggcttcccaattgcacatatttttcacccttcaatcccgccaatgcacgcagtggttaacaatcacaatagaaatattgattattggacggtaaaaagaaagtttgcagaaattgtctccaccaatgacgttaataaaatttacagtataagtaatgaactgcggagagtattatctgcaattactgcattgaatttctatcaaggcgatgttccttctgtcatgatccgaatccaaccggaaaatatgagtccattcatcatagatatttctacaggagaacatgacgattatatcatacaaacattagatgtaggcacttttgcaccttttggtgaacaatgtacttgctcagccgtcaataaaaaagagctggaatgtattaaggagacgatttctaagtattgtgcaaaattcacccgaaaagaagccatcttaacacctcctgcgcactttaataaaaccagcattacttcagattgttggcaaattctctttttttcacccgatcattttaataatgatttttattgattatttataaaggataaaataatgttccctgtttcatcaattggtaatgatattagtagtgatttagtccgtcgaaaaatgaatgatcttcctgaaagccccatagttaataacctcgaagcactagcaccaggtatagaaaaactaaaacagacctctattcaaatggtcactttacttaacgcgttacaaccaggtggaaaatgcattatcactggtgattttcaaaaagaattagcgtacttacaaaatgtaattctttataatgattcgtctcttcgtatggatttttttggttataacgccctaattattcaacgatcagacaatacctgtgaacttacaattaatgaaccgttaaaaaaccaggaaatatccacaggcaatatcaatgttaatttcccattgaaagacatttacaatgaaatcaggaggttgaacgtagtttttagttgtgggactggaggtatagttgatctatcctctctggacttacggaatatctatttagaactttatgattttacagataaacatatggccaatgcaattttaaatccttttaaattggatgacacagattttactaatgccaacatgtttcaggtaaatttcgttagttcaaaacaaaacaccacaatctcctgggattatttactaaaaataacgcctgttctaacaagcattagcgatatgtattctgaagaaaaaattaagcttgtcgaaagttgtttaaatgagcttggagatattaccgaagaacaattaaaaatcatgagatttgcaattatagaatctataccaagagcaactctaacagatcaattagaaaatgaattaacaaaagaaatatataaaaactcatcgaaaattaacaattacttgaacagaattaaattaccagagatgaaaggattctcatcagaaaaaatagattattacatcgatataatcattaaagattatgaaagcgtcaaagaaaatgcttatcttatcgatccaaaaattaattacaatacagatttaaacatagaggattctagctcagaggaattcctttcagataatacactcgagaaagacgaaaattctcctgacaattgctttgaggttgtaaaatataacacatatgaagcatataactcagagaatctatattttaccagagaggaatatacgtatgattacgaccttttaaatgcaatatagacttaataacttcttacaaaatctataattaataccgtagatattcattcatcttaccctgtgcaccaaaagcaaaaactcactgacgcgggtttgaaactgatggcaaccgcaaaaatgcctgatgcgctacgcttatcaggccttgtattatccctccagtgcagagaaaatcggccagttttctctgcctgcagtccgcatgccgtatcgggccttgggttctaacctgttgcgtagatttatgcagcggactgcctttctcccaaagtgataaaccggacagtatcatggaccggttttcccggtaatccgtatttgcaaggttggtttcactatggaacatgaacttcattatatcggtatcgacaccgctaaagagaaactggatgtcgatgtgttgcgtcctgatggtcgtcatcgcaccaaaaaattcgctaacaccactaaagggcacgatgagctggtgagctggctgaaaggtcacaagattgaccatgcgcatatctgcatcgaagcgaccggcacctatatggaacctgtcgctgagtgcctttacgatgctggctacatagtgtcagtcattaatcctgcgctgggtaaagctttcgctcagagtgaaggactgcgtaacaagactgataccgtggatgcgcgcatgctggcagagttctgtcgtcagaagcgccctgcagcctgggaagcgcctcacccgcttgaacgcgcgttgcgtgccctggtagtccgccaccaggcgctgacagatatgcacacgcaggaactgaatcgcactgaaacggcgcgggaagtccagagaccgagcattgatgctcaccttctgtggcttgaagcagagctgaagcgtcttgagaagcagataaaagacctgacagacgatgatccggatatgaaacaccgcaggaaactgctggaaagcatcccgggtatcggagagaaaacatctgcggtattgctggcttatatcggtctgaaggaccgcttcgcccatgccagacagttcgccgcttttgcgggtctgacaccacggcgttatgaatcaggtagcagtgtgagaggggcgagccggatgagtaaggccggacatgtgtcgcttcgcagggcgttgtatatgcccgcaatggtagccaccagtaagactgagtggggacgggcgttccgcgaccgtctggcggctaatggcaagaaaggaaaggtgattctcggcgcgatgatgcgcaagctggcacaggtggcgtatggagtgctgaagtcaggcgtgccgttcgatgcgtcacggcataatccggtagcggcgtaaaaatcgcggaagggatgaaaaaaacagcgcctgacggcgctgtgtctggcatgcctgcaatccgggaaaccggaccaggaaaaaacttgcaggccataacagtatctacgccatctctgcaatatattgaatttgcgtgcttttgtaggcaggataaggcgttcacgccgcatccggcatgaataaagcgcactcaacaatctgaaacccgccggaacggtttattacgtacatcaggtgaaactgaccgataagccgctttcttttgggtatagcgtcgtggacagtcattcatctttctgcccctccaaaagcaaaaacccgccgaagcggttttttacgtaaaccaggtgaaactgaccgataagccgctttcttttgggtatagcgtcgtggacagtcattcatctttctgcccctccaaaagcaaaaacccgccgaagcggttttttacgtaaaccaggtgaaactgaccgataagccgctttcttttgggtatagcgtcgtggacagtcattcatctttccgctcctccaaaagcaaaaacccgccgaagcgggtttttacgtaaaccaggtgaaactgaccgataagccgctttcttttgggtatagcgtcgtggacagtcattcatctttccgctcctccaaaagcaaaaacccgccgaagcgggtttttacgtaaatcaggtgaaactgaccgataagccgggttctgtcgtggacagtcattcatctaggccagcaatcgctcactggctcaagcagcctacccgggttcagtacgggccgtaccttatgaacccctatttggccttgctccgggtggagtttaccgtgccacggactgttaccagccgcgcggtgcgctcttaccgcaccctttcacccttacctgatcccgcttgcgcgggccatcggcggtttgctctctgttgcactggtcgtgggtttcccccccaggcgttacctggcaccctgccctatggagcccggactttcctcccctccgcccgtctcccccgaagaggacgacgacgaagcggcgactgtctggtcagcttcggcgcgcagtatagagggtttgcgcgcccttgtcaccccgcgttgcgcattccaatcgccagtgtcgcggcgatattacgtgaagcacggcagatattgtcataagccccgcggaatgcttcgtccaacgtacctatgctggtcaatacgctgaagaccgcatcgatgccatgctgatgtacaacgccaacatcatcggtcaggctacccgcaatgccaatcaccggtttatggtacttcttcgccacgtttgcaacgccaatcggtaccttgccgtgaatactctggctgtcaatacgcccttcaccggtgatcaccagcgtacaatcgtgaatatgttcctccagattcagcgccgtagtgacgatttcaataccacttttcagttccgcaccaagaaacgccatcagcgccgcacccataccgcccgcagctcctgcgccggggacatctttcacatcaacatgcagcgcttttttaatgacatcggcatagtgagagaggttattgtccagctcaacaatcatcgcttcactggctcccttttgtgggccaaagatgcgcgatgcgccgttatcgcccaccagcggattggtgacatcacaagcgacgcgaatgacgcaatcttttaagcgcggatcgaggccggaaatatcaatatcattcagagtattaagactaccgccgccaaaaccaatttcattgccgttggcgtcgcataatttcgcccccagcgcctgtaccatgcctgcgccgccatcatttgtagcgctaccgccaatgccgataataatgtttgtcgcgccgctctccagcgcctgcaggattaactcgcctgtgccgcgtgaagtggtcacgagtggatcgcgtttttccgcaggtaccagctccagcccactggccgccgccatttcaataaacgcggttttgccatcgccggagatcccccaactggcattcactttctcgcccagcggccctgtaacccaggcgtgacgttcagaaccctgggtggctgcaatcatcgcttccaccgttccttcgccaccgtcggcaaccggaatagaaacgtactgtgcatcaggaaaaatttcccgaaatcctttttctatcgcctgcgcaacctcgctggcagataaactttctttataagagtctggggcgattacgattttcatacctatgcctgttaccacatgacgccggagggcgtttctcttattcggcctggattccaggcccggattgcaatacgccatccgggcacgacgtcattaacgagtaacttcgactttcgccagtttttcgtagtagcacgccagggcgctatgatccgccgttcctaaaccatctgctcgcagtgcctgcatcatctccataaccgcagctgtgagcggcagttgcgcgccgacgccgtgggaagtatccagcgcatttgccagatccttaatatgcagatcaatacggaagcccggcttgaagttgcggtccatcaccatcggcgctttggcatccagcacggtactgcccgccagtccaccgcgaattgcctgatacaccaggtccgggttaacgcccgctttggttgccagcgttagcgcttctgacatcgcggcaatattcagcgccacaatgacctgatttgccagtttggtgacgttacctgcaccgatttccccggtatgcaccacggaacccgccatcgctttcatcaaatcatagtatttgtcgaaaatagccttgtcgccgcccaccatcactgacagcgtaccgtcgatggctttcggttcaccgccgctcaccggagcatccagcatatcaatgcctttcgctttcagcgcttcgctgatttcacggcttgccagcggtgcgatagaactcatatcgatcaataccgtacctggcttcgcgccttcaatgatgccattctcacccagcgccacctctttcacatgaggggagtttggcagcatggttatgatgacgtcgcactgttcagcgatcgctttagccgtagacgctgtttctgcacctgcagcaatcacgtcagcaatagcttctgggttacggtcagcaaccaccagcgagtaacctgctttcagaaggtttttactcattggtttacccataatccccaggccaataaaaccaactttcatagtcatatcaatcatctctcttgttgcggtggtggttattttttaaaggtatcagccagtttctgagtggcagagcggaagacgccaagatcgctgccgacagccacaaacgtcgcgccccattccagataacgacgcgcatcggcttcgaccggcgcgagaataccgctgggtttgccgtgcgcactggcacggttaaaaatgtgctgaattgctttttgtacatccgggtgcgaggcattgccgagatggcctaatgccgcagccagatcgctggggccgacgaagataccgtctacaccttcggtagcggcaatggcatcgacgttatctacgccctgctgactttctatctggaccagaatggtgatgttcttgttcgactgagcgaaataatccgccacggtgccaaacatattggcgcggtgagaaacggagacgccgcgaatgccttccggtgggtaacgggttgatgccaccgcctgctctgcttcctcttttgtttctacaaaaggaatcaggaagttatagaaaccgatatccagaagacgcttaataattaccggctcgttggtcggcactcgcactactggcgcgctggcgctgcctttcagggccattaactgcggaataaacgtggagatatcgtttggcgcatgttcgccatccagcaccagccagtcaaacccagccaaaccaagaacttcagtgctaatcgggttagagagtgctgaccagcaaccaatttgtacctgtttcgcagccagtgcggctttgaatttattcgggaaaacatcgttattcatcgcttatacctttgcttatttctgcaattccatacgtttaatgtcgccaactacgaagaggtagcagaccatcgccatcagcgctgaacatcccacgaaaaccagtgctgcattgaaggagtgcagttcacttaccaggtagccaatcaccagtggagtgacaatggaggcaacattgccaaagacgttaaagacgccgccacagaggccaacaatctctttcggcgcggtgtcagaaatcaccggccagcccagagcaccaaatcctttgccaaaaaaagccagcgccatcagcatgaccaccagcgtggtgttgttggtgtagttacataagatgatggtggaagccagcaacattcccagcacaatcggtagcttacgtgccagggtcagggataaaccgcgtttgatcagataatccgagaagacacctcccagcacgccgcccgcaaaaccacacagtgccggaatcgaggcgaccagacccactttcagaatcgacatgcctttttcctgcaccagataaatcgggaaccaggtgaggaagaaccaggtgatggtgttgataaaatattgtccgaaaaatacgcccaacatcatgcggttagagagcaattgcttgatgtaatgcagtttgggaccgcttgctgccgcgctgcccggctttttgtggtccatatcgaccaccgcgccattttcagagataaacttcagctcttccgcagacatacgtgggtgatctgtcgggttatgaatcaatttgatccacagcgccgtcagcacaaaaccaatcacccccataacggtaaagacgtgctcccagccccaggcgaaagtcagccagccaagcagaggcgaaaagagcgccagcgagaaatattgcgccgagttaaagatggcggaggcagtaccacgttctttcgtcgggaaccaggcggcgacaatacgggcgttcgccgggaatgatggcgcttccgagaagccgagcataaagcgcataaagaacatggagatccctgcccaggccagcgggaacatatcaacaaagccttgcaggaaagtgaatagcgaccagaaaaagaggctataggtataaacttttttcgagccaaacttatcaagcagccagccgccggggatttgcatcagcaagtaggcccagccaaaagcagaaaagatgtaacccatcgaaaccgcacttaactgcaactcttttgccacttcggtaccagcaatagacagcgttgcacgatcggcgtagttaacggcggtaacaataaaaataatcagtaatattaaatagcgggtatgcacgcctttcttttttcgtcaacggtgtccagaatcattttatttacctcgggtacttatgctgatttttattattatggggaaggtgttatttatgagtttcatttatgccgtaacggcaatgaactcgggaattagtataagcagcgcgagaataataatcattgtgcaaatgctaatttaattaatactatttaaatattattttgagcatatgcacataaggttgcgcgctaaagcacagatttgcgctttaccttgccgggcggcactgcaatccctgaaatgattgacattgatcacatttctgcgtttaaactcctgacattcttatttcacccaatgaagtcatttattttaaatgagaccaggtcctcattttaataacccctggctggagaatattgcacaatggccaacatcgaaatcagacaagaaacgccaactgcgttttatataaaagttcacgacacagataatgtggcaattattgttaatgataatggcctgaaagcaggaacgcgttttccggatgggctggaattaattgaacatattccccaggggcataaagtcgcattgctggacattccggctaatggtgaaattattcgttatggcgaagtgattggttacgccgtgcgtgcaatcccacgcggaagctggatcgacgaatcaatggttgtactaccggaagcgccgccgttacacacgctgccactggcaaccaaagtcccggcccccttaccgccgctggaaggatacacctttgagggctatcgcaatgccgatggcagcgtgggcaccaaaaacctgctcggcatcaccaccagcgtccactgtgtggcaggcgtggtggactatgtagtaaaaatcattgaacgcgatctgctaccgaaatacccgaacgtcgatggcgtggtggggctgaatcatttgtacggctgtggcgtggcgattaacgcaccggcggcagttgtgcctattcgtaccatccacaatatttcgctgaaccctaactttggcggcgaagtaatggtgattggtctgggttgtgaaaagttgcagcctgagcgcctgctggtcggcacggatgatgtgcaagctattccagtagaaagcgccagcattgtcagtttgcaggatgaaaagcatgtcggttttcagtccatggtcgaggatattttgcaggtcgccgaacgccatctacaaaaactgaatcaacgtcagcgagaaacctgtccggcttcagaactggttgtcggcatgcagtgcggtggcagcgatgccttttctggcgtaacggcaaacccggcggttggctatgcgtctgatctactggtgcgctgcggcgcaacggtgatgttctcagaagtcacggaagtgcgtgacgcgatccatctgctgacaccacgcgcagtgaacgaagaggtcggcaaacggctgctggaggagatggagtggtacgataactatctcaatatgggaaaaaccgaccgcagcgccaacccttcgccgggcaacaagaaaggcggtctggcaaacgtggtagagaaggcactcggctccattgctaaatcgggtaaaagcgcaattgttgaagtgctgtcgcccggtcaacgcccgactaaacgcggattaatttacgccgcgacgccagccagcgattttgtctgtggcacgcaacaggtggcttcgggtatcaccgtgcaagtgtttacgaccggtcgtggtacgccgtacggcctgatggcggtacccgtcattaaaatggcgacccgcaccgagctggcgaaccgctggtttgatttaatggatattaacgcgggcactatcgccaccggcgaagaaaccattgaagaggtgggctggaagttgttccactttattctcgacgtcgccagcgggaagaagaaaaccttctcggatcaatgggggctgcataaccagctggcagtgtttaacccggcaccggtgacctgatttcttttggaacgtccctcgcaaaacatggccttagtgccatgtttttattgtttaaagcccccacgtccattaataatgcatttgcattaccttagttcaagcttataatttgagcagaaaacaggctgtaaaaggacagtgaatcatgcccgctaatgctcgctctcacgctgtactgaccactgaatcaaaggtcacgatacgcggacaaacaactatccccgcgccagtgcgtgaggccttaaaactgaagccaggccaggacagcattcattacgaaattctgcctggtgggcaagtctttatgtgccgactgggagatgaacaggaggatcatactatgaatgcatttttgcgttttctggatgcagatatccagaacaacccgcaaaaaactcgtccattcaacattcaacaaggaaagaaacttgtcgctggcatggacgtcaacattgatgatgagattggcgacgacgaataatggattttccacaaagggttaatggttgggcgctatatgctcatccctgttttcaggaaacctacgacgctttagttgccgaagtcgagacattaaagggaaaagatcctgaaaattatcagagaaaagccgccacaaagttattggcggtagtccataaagtgattgaggagcatatcacggtcaatccatcatcaccggcattccgtcatggcaagtcgttaggctctgggaaaaataaagactggtcacgggtaaaatttggtgctggtcgttatcgtctcttctttcgttatagtgaaaaagagaaagtcatcattctgggatggatgaacgatgaaaacactctgcgcacctacggtaaaaaaacagatgcctataccgtattcagcaaaatgttaaaaagaggacatcctcctgccgactgggaaagcctcacccaagagacagaagaaaaccattgatggtgttcacaatgcccgccgaacgtattcgtgttgaccagcgggcaccctttctcactccccgaccagaatcacttcaaccccagcctttcgcagtccttccagactatccgcaggaatgccttcatcaacaatgatcatgtcgatacgttgagtatcaatgatcttatgtaaactggaacgattgaatttactggaatcggtgaccacgatgatccgttccgcaacttcgcacatccgacggtttaaacgggcttcatcttcattatgtgtgctgacgccgcgctccagatcgatcgcatctacaccaagaaacagcatatcgaagtggtaattttgcagcgattgctcagcctgatcgccgtaaaaagattgcgactgacggcgcaaatgcccgccggtcatcagcagctcaacgccttcggcttccagcaacgcattagccacgttcataccgttggtcatcgcaattacgtcagtgtgcttgcgcatcagacgagcaatctcaaaagtggtggtcccggaatcgaggatcacccgatgacctggctgaatcaactcaacggcagctttcgcaacgctgcgtttcatcgcggtgttcagtgcgcttttatcttccactgatggctcgactgacggcgtcgtgctatcgcagatcaacgcgccaccataggcacgcacagcgatcccctgcttttccagaaacgccagatcgttgcggatcgtcacagtagatacgccatacaatgccgacagatcgttaacctgcacactcccttgctgtcgcagacgctgaatgatctgttctcgtcgctcgctggtgccagtcactcgcttctcacctgaagcgtcggtattactcatagtaagtcctttcgtaaaactttcgtttcatttcgttttgcctattaacgcctttctattaagcaaatgcaagcccaccttgcccattgacgcaagctactctcgtttcagtgactttcattatgtttcttttgtgaatcagatcagaaaactattatctttcgttttatttttatctcaccatgacgcagtatcaactgaaacaaaacgaaagattaatatcgcagtaatctgaactggagaggaaagtgaaacatctgacagaaatggtgagacagcacaaagcgggcaaaacaaatggaatttatgccgtttgttccgcacatccgctggtgctggaggctgcaatccgctacgccagtgcaaaccaaacgccgttactgattgaagcaacctccaatcaggtagaccagttcggcggttataccggaatgacgcccgccgattttcgcggctttgtttgtcagctcgccgactcgttgaatttcccgcaggatgcgttgattctgggtggtgaccatctggggccaaaccgctggcaaaacctgccggccgctcaggcaatggccaatgccgatgatttgattaaaagctacgttgcggcaggattcaaaaaaatccaccttgattgcagcatgtcctgtcaggacgatccgattcccttaactgatgacatcgtggctgaacgcgccgcccgtctggcgaaagtggcggaagaaacctgtcgcgaacactttggcgaagccgatctggagtatgtcattggtaccgaagtgccggtacctggcggcgcgcatgaaaccttaagcgagctggcggtcaccacgccggatgccgcccgcgccacgctggaagcccatcgtcacgcctttgaaaagcaaggtttgaatgccatctggccacgcatcattgccctggtggttcaacccggcgtcgaattcgatcacaccaacgttattgattatcagcccgccaaagcgagcgccttaagccagatggtcgaaaactacgaaacgctgattttcgaagcgcactctaccgattatcaaacgccgcaatcgctgcgccagctggtgattgaccactttgccattctgaaagttggcccggcgctgaccttcgccctgcgtgaagcccttttttctctggcggcgattgaagaagaactggtaccagcgaaagcctgttctggtctgcgtcaggtgcaggaagacgtgatgctcgaccgcccggaatactggcaaagccactaccacggtgacggcaacgcgcgtcgtctggcgcgtggttatagctactcggatcgcgtgcgctattactggccggacagccagattgatgacgctttcgctcatctggtacgtaatctggcggattcaccaattccgctaccgctcatcagccagtatctgccgctgcaatacgtgaaagttcgctccggcgagctgcaaccgacgccacgggaactcattatcaaccatattcaggacatcctggcgcagtaccacacagcctgtgaaggccaataagcaaaacaaagaggaacacgctatgccaaatattgttttaagccggattgatgaacgcttgattcacggtcaggtcggcgttcaatgggtcggatttgcgggggcaaatctggtgctggtagccaacgatgaggttgccgaagatccggtacaacaaaacctgatggaaatggtactggcagaagggatcgccgtacgtttctggacgctgcaaaaagttatcgacaacattcatcgcgccgccgatcgacagaaaatcctgctggtttgtaaaacacccgccgatttcctgacgctggtgaaaggtggcgttccggtgaatcgcattaacgttggcaatatgcactacgccaatggcaagcaacaaatcgccaaaacggtttctgtggatgcgggcgatatcgcagcatttaacgacctgaaagccgctggggtggaatgcttcgttcagggcgtcccgacagagcctgctgtggacctctttaaattactttgagggattcatcatggaaatcagtctgttgcaggcattcgcgttgggcattatcgcctttatcgctggcctggatatgtttaacggcttaacccatatgcaccgcccggtggtcctcggcccgttagtcgggctggtacttggcgatctgcataccggtattttaaccggcggtacgctggaactggtgtggatggggctggccccgctggcgggcgcacagccgcctaacgtgattatcggtactatcgtcggcacggcgtttgccattactactggcgtgaaacccgatgtcgcagtcggtgtcgccgtacctttcgctgtcgcagtacagatggggattaccttcctgttctcggtgatgtccggcgtgatgtctcgctgcgaccggatggcggagaacgccgatactcgcggcattgaacgcgtgaactatctggcactgctggcactcggcactttctattttctctgcgctttcctgcctatctacttcggcgcggaacatgcaaaaaccatcattgatgtcctgccgcaacgattaatcgacggcctcggcgtcgcgggcggcatcatgccagcaatcggttttgccgtgctgctgaaaatcatgatgaaaaatgtctacatcccctacttcatcctgggctttgttgccgcagcctggctcaagttaccggtgctggctattgctgccgccgcgctggcgatggcgctgatcgatctgctgcgtaaatctcctgaaccgactcaacctgcggcacagaaagaggaatttgaagatggcatctaatcaaaccaccctgccgaacgtcagtgaaaacgaagaaacattgctgactggcgtcaatgaaaacgtgtatgaagatcagagcattggcgcggagctgacgaaaaaagatatcaaccgcgtcgcctggcgttccatgctgttacaagcgtcttttaactacgaacgtatgcaggcttctggctggttgtacggtctgctgcctgctctgaaaaagatccacactaataaacgcgacctggcgcgcgccatgaaggggcatatgggtttcttcaatacccatccgtttctggtgacatttgttatcggcattatccttgcgatggagcgttctaagcaggacgttaacagtattcagagcaccaaaattgccgtcggtgcgccgctcggcgggattggcgatgcaatgttctggctaacgctactgccgatttgtggcgggattggagccagtctggcattgcaaggctccattcttggcgcagtcgtctttattgtgctgttcaacgtggtacacctggggctgcgttttggtctggcgcattatgcttaccgcatgggcgtggcggcgattccactgattaaagcgaataccaaaaaagtcggccatgctgcgtctatcgttgggatgacggtaatcggtgcgctggtggcaacctatgttcgtttaagcaccacgctggaaatcacagcgggcgacgcagtggttaagttacaggctgatgttatcgacaaactgatgcctgctttcttaccgttggtctacaccctgaccatgttttggttggtacgccgcggctggagtccgctgcgtctgattgcagttaccgtggttctcggcatcgttggtaaattctgccatttcctttaaatacaatgaggtattagatgttaagtattattttgacagggcatggcgggtttgccagcggcatggaaaaagcaatgaagcaaattctcggtgagcaatcgcagtttatcgccatcgattttccggaaacctcaagcaccgcgctgcttacatcgcagcttgaagaggccatcgcccaactggattgtgaagacggcattgtttttctgacggatttgctgggcggcacgccgtttcgcgtagcttcaacgctggcgatgcaaaaaccgggctgtgaagtgatcaccggcaccaatttgcaactgctactggagatggtgctggagcgcgaagggttaagcggtgaagaattccgtgtacaggcactggagtgtggacatcgtgggctgaccagtctggtggacgagttaggccgctgccatgaagaatgtccggtcgaggaagggatatgacacacgttctgcgcgccagaaggctgctgactgaagagggatggctcgatgaccatcagttgcgtattgctgacggtgtcatcgcagcaatcgaaccgattccagtgggcgtgactgaacgcgatgcggaactgctctgccccgcttacatcgacacccatgtacacggtggtgcgggcgttgatgtaatggatgacgcgccggatgtgctcgacaagctggcaatgcacaaggcacgcgaaggtgtcggcagttggttaccgactaccgtaaccgcgccgcttaataccattcatgcggcgctgaaacgtattgcgcaacgttgccaacgcggcggacctggtgcgcaagtgctggggagttatctcgaaggaccgtacttcacgccgcagaataaaggcgcgcatccgccggagttgtttcgcgagcttgaaattgccgagctggatcaattgattgccgtttctcagcacaccttacgcgtggtagcgctggcaccggaaaaagagggggcattgcaggccatccgccatcttaaacagcaaaatgtacgagtgatgctggggcatagcgcggcgacctggcaacaaactcgcgccgcgtttgatgctggtgccgacggcctggtgcattgctataacgggatgacaggtttacatcaccgcgaaccgggaatggttggcgcgggattaacggacaagcgcgcctggctggaactgatagccgatggtcatcatgtgcatccggcggcgatgtcgctgtgttgttgctgtgcaaaagagagaatcgtgctgatcaccgacgcgatgcaggcagccgggatgccggatggtcgctatacgttatgtggcgaagaagtgcagatgcacggtggcgttgtccgtaccgcgtccggtgggctggcgggcagtacgctgtctgttgatgcggcagtgcgcaacatggtcgagttgacgggcgtaacgcctgcggaagccattcatatggcatcgctgcatccggcgcgaatgctgggtgttgatggtgttctgggatcgcttaaaccgggcaaacgcgccagcgtcgttgcgctggatagcgggctacatgtgcaacaaatctggattcagggtcaattagcttcgttttgatggtttgctccattattgggccttcacttcccccgtaaggcctttctttttctttctttttgatctgtgcagcggtgtcggatgcgacgctaacgcgtcttatgcgacctacggtacgccgcatccggcaatcggtgaacatagcgacgtcattacgcaattcttaatcttcccttgtcttttctttcaacgatcacagatttcgttttatttcctttttctccattgaactttcagtttcttttctatagattttaatcaacgaaagacatcaccaagtgaaatgaaacgaaaggcaagtgaaagcgacaacgcccgacgtcaagttcatcagactaaggattgagttatgccagaaaattacacccctgctgccgccgcaaccggtacatggactgaagaagagatccgccatcagcctcgcgcatggatccgttcactcaccaacatcgacgcgctacgttctgcgctcaataacttccttgaaccgttactgcgcaaagagaatctgcggatcatcctgaccggagccggaacctcggcatttatcggtgacatcatcgcgccgtggctcgccagccataccggtaaaaacttcagcgccgtaccgaccaccgatctggtcaccaatccgatggactacctgaacccagctcatccgctgctgttgatctccttcggtcgatccggcaacagcccggaaagcgtcgctgccgtggaactggcaaatcaatttgtaccagaatgctatcacctgccgatcacctgcaacgaagcgggcgctctttaccaaaacgcgatcaacagcgataacgcgtttgccctgctgatgcccgcagaaacgcacgatcgcggctttgcgatgaccagcagcattaccaccatgatggccagctgcctcgcggttttcgcacctgagacgatcaacagccaaaccttccgcgacgtggcggatcgttgccaggcgatcctgacctcactgggcgatttcagcgaaggtgtgtttggttacgcaccgtggaaacggatcgtttatctcggcagcggtggcttacagggcgcagcacgcgagtcggcgctgaaagtgctggaactgacggcgggtaaactggcggccttttatgattctccaaccggattccgtcatggaccaaaatcgctggtcgataacgaaacgctggtggtggtatttgtctccagccacccttacacccgtcagtatgatcttgatctgctggctgaactccgccgtgacaaccaggcaatgcgcgtaatcgccatcgccgcggaaagcaccgacatcgtcgctgccggtccacatattatcctgccgccgtcacgtcactttatcgacgttgagcaggcattttgcttcctgatgtacgcccagacgtttgcactgatgcagtcgctgcacatgggcaatacgccggataccccatcagccagtggcaccgttaaccgcgtggtgcaaggcgtaatcattcatccgtggcaggcataagaggatcgcattatgagcattatctccactaaatatctgttacaggacgcccaggccaatggctacgcggtgcctgcttttaacattcataacgccgagacgatccaggcgatcctcgaagtgtgcagtgaaatgcgatcgccggtgatcctcgccggaacgccggggacctttaaacatatcgcgctggaagagatctacgccctgtgcagcgcctattccacaacctacaacatgccactggcgctgcatctcgaccaccacgaatcgctggatgatattcgccgtaaagtccacgcaggtgtgcgcagtgcaatgatcgacggcagccacttcccgtttgccgagaacgtgaagctggtgaaatcggttgttgacttctgccactcacaggattgcagcgtggaagcagaactgggccgcctgggcggtgttgaagatgacatgagcgttgacgccgaaagtgcattcctgaccgatccacaagaagctaaacgctttgtcgaactgactggcgtcgacagcctggcggtagcgattggtacggcgcacggcttatacagcaaaacgccgaagattgatttccagcggctggcggaaattcgtgaagtggtggatgttcctctggtgctacatggtgccagcgatgttccggatgaatttgtccgtcgcactattgaacttggcgtcacaaaagtgaacgttgccacagaattaaaaatagccttcgctggcgcggttaaagcctggtttgcggaaaatccgcagggtaatgatcctcgttattatatgcgcgtcggaatggatgcgatgaaagaagttgtcagaaataaaattaatgtctgtggttcagcgaatcgaatttcagcataatcattagttttttatgatttatcccaatgtacttcccgattaatatcggggagtgccttaatggaaaaggagatgactaaaccttaataaatacatcagtacaatatcgcaacaataatatattaaaaaaaattatattattcaactttatggtgaggattacacaatgagcagtccaaatattctcttaacccgtattgataaccgtctggttcacggtcaggttggcgtgacctggacatccaccatcggtgcgaatctgctggtagtcgtggatgatgttgtcgctaacgatgatattcaacagaaattaatgggtattaccgcagaaacctacggctttggcattcgtttctttactatcgaaaaaaccattaacgtcatcggcaaagctgcaccgcatcagaagatcttcctgatttgccgtacgccacaaacggtacgtaaattggtagaaggtggcattgacctgaaagatatcaacgtcggcaatatgcatttctcggaaggaaaaaagcaaatcagcagtaaagtttatgtcgatgaccaggatctcgcggacttacgttttattaaacaacgtggcgtgaatgttttcattcaggacgtccctggcgatcaaaaagaacaaatccctgactaaatctaaaatcgccttaatattggtttgaggtaataaaaatgcatgaaataaccctacttcagggattatccctggcggcgttagttttcgttctggggattgatttttggctggaagccttatttttattccgcccgataatcgtttgtaccctaactggcgctattctcggtgatattcagactggcttaattaccggtggtctgacagagttggctttcgccggattaacccctgcaggtggtgttcagccgcccaacccgattatggcgggtctgatgaccaccgtcattgcatggtctacgggcgttgatgccaaaacagcaattggtcttggcctgccgtttagtttgttaatgcagtacgtcattctgttcttctattccgctttctcattatttatgaccaaagccgataaatgcgcgaaagaggcggatacggcagcgttttcccggcttaactggacaacgatgctcatcgtcgcttcagcgtatgcggtgattgctttcctctgtacttacctggcacaaggggcgatgcaggcgctggtgaaagcgatgcccgcctggttgacccacggctttgaagtggctggcggtattctgcctgccgttggttttggcttgctgctgcgcgtaatgttcaaagcgcaatatatcccttacctgatcgccggtttcctgtttgtttgctacatccaggtcagcaacctgttgccggttgccgtactgggcgcaggctttgcggtgtatgagtttttcaatgcgaaatcccggcagcaagcgcaaccgcagcccgttgccagtaaaaatgaagaagaggactacagcaatgggatctgaaatcagtaaaaaagatatcacccgtctgggctttcgttcgtcgctgctgcaagcgagctttaactacgaaaggatgcaggcgggcggttttacctgggcgatgttgccgatcctgaaaaagatttataaggacgacaaaccgggcttaagcgcggcgatgaaagataacctcgaatttattaatacccacccgaatctggtcggattcctgatggggttattaatttcgatggaagaaaaaggagaaaaccgcgacaccattaaaggcctcaaagtggcactgtttggcccaatcgccgggattggcgatgcgattttctggtttactttgttgccgattatggcgggaatttgctcatcatttgccagccagggaaacctgctggggccgattctatttttcgccgtttacctgcttatctttttcctgcgcgtcggctggacccacgtcggttattcagtcggcgtgaaggcgatcgataaagtgcgagagaactcgcagatgattgctcgctcggcaaccatcctcggaatcacggtaatcggcgggctgatcgcttcgtatgtgcatattaacgtggtgacatcgtttgccatcgacagtacccacagcgtcgcgctgcaacaggatttcttcgataaagtcttcccgaacattttaccgatggcctacaccctgctgatgtattacttcctgcgggtgaaaaaagcgcatccggtgctgttaatcggcgtgacttttgtgctctctattgtttgttccgcattcggcattttgtaaatggaacgaggcactgcttctggcggtgcctctttacttaaggaatttcatcctgtgcaaacccttcagcaagttgaaaactatacggcgttaagtgaacgagccagcgaatatttattggctgtgatccgtagcaaaccggatgccgtgatttgcctggcgaccggagccacgccattactgacgtatcattatctggtagaaaaatccaccagcagcaggttgatatcagccagctcaccttcgtgaagctcgacgaatgggtggatctgccattaacgatgcctggcacctgcgaaactttcctacaacagcatatcgtgcagccgctggggctgcgtgaagaccagctcatcagctttcgctccgaagagataaatgagacagagtgcgaacgggtaacgaacctgattgcgcgcaaaggcggtctggatttatgcgttctaggattggggaaaaacggtcatcttgggctgaacgaaccgggagaaagcctacaaccggcctgccatatcagtcaacttgatgccagaacacagcaacatgagatgttaaaaaccacgggtcgccccgtgactcgtgggatcaccttaggcctgaaggatattctcaatgcccgcgaggttttgttattggtgactggcgaaggaaagcaggatgcgacagaacgttttctcacggctaaagtctccaccgctatcccggcttcgtttttatggctgcacagtaactttatttgtttaattaatacctaaccagatgaaaatttgctcaaaatttttaaattaacttattcaacagtcacgcattatattaaataacatttgactgggttgaacataacgccaatagcaaaaggagttatgttcaacaatttaattttagatatacatataacttgttctattaataaatcacctcgtattctgactcggcccctggcgcagcaaagtcaggcatttatactctttttaacacatagaaaattcatatcaatataataaaacatagaatatttgcatataaatataatcttaaagtttagtctatttaatgttcaatgaaatatttctacctgtataatctttaaagatgttgaacatatattcacattaaatatgattatgtacttgttacaaggataaggttataaatgaataaagttacaaaaacagctattgtgggcttacttgcgcttttcgcaggtaatgccgctgcaaccgatggtgaaatagtttttgatggcgagattttaaaatctgcttgtgaaatcaatgactctgataagaaaattgaagttgctcttggtcactataatgccgaacagtttcgttctgttggcgatcgtagcccaaaaattccattcactattcctttagttaactgcccagtgactgggtgggagcacgataacggcaacgttgaagcgtctttccgtttatggctggaaacgcgggataatggcaccgtccctaacttccctaatctggcaaaagtgggctcttttgctggcacagcggcaacaggtgtgggtatccgtattgacgatgcggaaagcggaaaccttatgccactgaatgctatggggaatgataacacggtttatcagatcccagcggactccaatggtattgtcaatgttgacctcatcgcttactacgtatcaaccgttgaagcatcagaaatcaccccaggggaagcagacgctgtcgttaacgtaacgctggattaccgttaatacgttacggcgttatctgacctttcagataacgcccttttccttcctctttctcgttgtatcaggttgaaaaataactatgtcaaaacgaacattcgcggtgataataaccttgttgtgtagcttctgtatcggccaggcgcttgcagggggtatcgttttacagcgaacgcgagtgatctatgatgccagccgcaaagaggctgcgttacctgtcgcaaacaaaggcgcagaaacgccttatttactgcaatcatgggtagataatatagatggtacaagccgtgccccatttattataaccccaccgctatttcgtcttgaagctggcgatgactcatcactgcgaattattaaaacagctgataacctgcctgaaaataaagagtcgctgttctacattaatgttcgtgccattccagcaaagaaaaaatcagatgatgttaatgctaacgagttgacgctggtatttaaaacacggatcaaaatgttttatcgccccgcacacctgaagggacgggtaaacgatgcgtggacatcactggaatttaaacgtagtgaccattcactcaatatatataacccaactgaatattacgtcgtatttgccggactggcagtcgataaaaccgatctcacaagcaaaattgaatatatcgcgcccggagaacataaacagttaccacttcctgcatctggcggaaagaacgtgaaatgggctgcaatcaatgattatggcggcagttccgggacagaaactcgtccactgcaataacaaatataaaaaacacaggtcatcagggaatgccacaacgacaccaccagggacataaacgcacaccgaaacagttggcgctcatcatcaaacgctgtttgccgatggtgctcactggcagcggcatgctttgcactaccgctaacgccgaagagtattatttcgaccccattatgctggaaactacaaaaagtggtatgcaaacaactgatctgtcacgtttttcaaaaaatacgcacaactaccaggaacttatcaggttgatatctggctgaataaaaagaaggtttcacagaaaaaaattacatttaccgccaatgcagagcaacttctgcagccacagtttacggtagaacaactacgtgagctgggtattaaggtggatgaaatcccggcgctggctgaaaaagatgacgatagcgtgatcaactcgcttgaacaaatcattcccggtacagctgctgaatttgatttcaatcatcagcgacttaatttgagcattccccaaattgcactgtaccgtgatgcaagaggttacgtctccccttctcgttgggacgatggtataccaacgctgtttaccaactactcgtttacaggttctgataaccgttaccgccagggcaatcgtagccaacgacagtacctgaatatgcaaaatggtgctaattttggcccctggcgattacgcaactattccacatggacacgcaacgatcaggcgtcaagctggaacactatcagtagttatttacaacgtgatatcaaggcgttgaagtctcagttgcttctgggagaaagcgccaccagcggcagtattttttccagctacacctttactggcgtgcaactcgcttccgacgataatatgttgccaaacagccagcgcggatttgccccaacggtacgcggtatcgcaaacagtagtgcaatcgtgactatcaggcaaaatggttatgtgatctatcaaagcaacgtgccagcgggtgcctttgaaattaacgatctctacccctcttccaacagcggcgatttagaagtcacgattgaagaaagtgacggtacgcaacgtcgctttatccagccttattcttcattacccatgatgcagcgacctgggcatctaaaatatagcgcgaccgctggacgctatcgcgctgatgcaaacagtgatagcaaggaacccgaatttgctgaagccacggcaatatatggtttgaataatacttttacgctgtatggcggcctgctcggttctgaagattattatgcgctggggatcggtatcggcggcacacttggcgcactgggcgcgttgtcgatggatatcaacagagctgacacccaattcgataaccagcactcttttcatggctatcaatggcgtacgcagtacatcaaagatatcccggaaaccaacaccaatatcgctgtcagctactatcgctataccaacgatggctattttagttttaatgaagccaatacccgtaattggaactataacagtcgccaaaaaagtgaaattcaattcaacatcagccagacaatatttgatggggtaagtctgtatgcctccggttcgcagcaagactattggggcaataacgataaaaacaggaatatctcagttggggtttccggtcagcaatggggaattggttacagcctgaattatcaatacagtcgctacacggatcaaaataatgaccgcgcactctctttgaatctcagtattccgttagaacgctggttaccgcgtagccgggtttcctatcagatgaccagccagaaagatcgcccaacccaacatgaaatgcgtcttgatggctcactgctggatgatggtcgcctgagctatagcctggaacaaagtctggatgacgataacaaccataacagtagcctgaacgccagttaccgttcaccttatggcaccttcagtgccggatacagctacggtaatgacagcagccaatacaattacggcgttaccggcggcgtggttatccatcctcatggcgtgacgctctcgcaatatctgggcaacgcttttgcgcttatcgatgctaatggggcttctggcgtgaggatacaaaactatccggggattgctactgatccctttggctatgcagtggttccttatctcacgacttaccaggaaaaccgtctctcggtagatactacgcaactgcccgataacgtcgatcttgagcaaacaacacagtttgtggtgcccaacagaggtgcaatggtagcggcgcgtttcaacgccaatatcggttatcgcgtacttgttacagtcagcgatcgcaacggtaaaccgttgccctttggcgctcttgccagcaacgatgagacggggcaacaaagtatcgtcgatgagggcggcatactatatctctctgggatatcgagtaaatcacaaagctggactgtacgctggggaaatcaggcagatcaacaatgtcagtttgcttttagtacaccggattcagaaccaacaacctctgtattacaaggcacggcgcagtgccattaaggataaaaaaatgaaaagagcgcctcttataacaggacttttgttgatatccacatcctgcgcttatgcctcctcaggagggtgtggagccgacagcactagcggtgcgacaaattacagcagtgtggttgatgatgttacggtgaaccagacagataacgtgacaggacgggagtttacctctgccacgctaagtagcactaactggcaatacgcctgtacctgctctgcgggtaaggcagttaaacttgtctatatggtcagccctgtacttaccaccactggacatcaagcaggatattacaaactcaatgatagtctggatattaaaaccacattacaggcgaatgacattccaggactcgtgactgaccagaccgtttctgttaacacccgattcacacagataaaaagcaacaccgtatattctgctgcaacccaaacgggtgtttgccagggtgacacgtctcgttatggacccgttaatattggtgcaaataccacctttaccctgtatgtcaccaagccatttctcggctcgatgaccattccgaaaacggatattgccgtcattaaaggcgcatgggtcgatggaatgggaagcccgtctacaggtgacttccatgatttagtcaagttatcgattcagggaaatctcaccgccccacagtcgtgcaaaattaatcagggcgatgttattaaggttaattttggattcatcaatggtcagaagtttaccacccgcaatgccatgccagacggttttactccagtagactttgatatcacttatgactgtggtgatacttcaaagattaaaaactcgttgcaaatgcgcatcgacggtacaactggggtagtagaccagtacaacctggtcgccagacgaagaagttcagacaatgcgcccgatgtcggtattcgtattgaaaatctcggcggcggagttgcaaatattccttttcagaacggtatccttcccgttgatccttccgggcatggcaccatcaacatgcgcgcctggccagttaatctggtcggtggtgagctggaaacaggaaaatttcagggcaccgccaccattaccgtcatcgtgcggtaaaagaagacgttgcgttttgattaacgcaacgcttcggcactcttacccctgctgctccagcgcatacttatacagcgcatttttcttcacgccgtgaatttctgccgccagcgccgccgcttttttcaacggcagttctgcctgtagcagcgccagcgtgcgcagggcatcggcgggtaagtcttcttcctgtgctttatgaccttcgataatcagcaccatttcgcctttgcgacggttttcatcttcttttacccacgccagcagctcgccaacgggcgcgccgtgaatggtttcccaggttttggtcagctcacgcgccagaaccacgtagcgggattcgcctaataccgcaacgatatcttccaggctatctaacagacggtgggtggattcataaaaaatcagcgtgcgcggctccgcttcaatggcttttagcgcatcacggcggccttttgatttggcaggtaaaaagccttcgtaacagaaacggtcagagggtaaacccgcggcgcttaacgcagtgatagcagcacacggcccgggtagcggcaccacgcaaatccccgcttcacggcaggtacgcaccagatggtagccaggatcgttaattagcggcgttccggcatcggaaaccagcgcaatgttctgcccttcttgcagcttcgccagcagcgtttcggctttttgttgttcgttatggtcgtgcagcgcaaacaaccgggcattaatcccaaaatgttgcagcaataaaccggtgtgacgagtatcctcggcggcaatcagatcaacggcctgtaatacctctaacgcacgctgggtgatatccgccagattgccgattggcgtcggtacaatgtaaagctggccctgagaattatccgccgattggtgttgtttcattgtgtcgtccgtattgccgatttaatattgagcattgcgtaaaaaatatcactggatacattatggtaccctcaacattttctcgtttgaaagccgcgcgttgtctgcctgttgttctggcagccctgattttcgccggttgtggcacccatactcccgatcagtccactgcttatatgcagggcacggcgcaggctgattctgccttttatcttcagcagatgcagcaaagctctgatgataccaggatcaactggcaattactcgccattcgtgcactggtgaaagaaggtaaaaccgggcaggcggttgagttgtttaaccaactaccgcaagaactgaacgattctcagcgtcgcgagaaaacactgctggcggtagagattaaactggcgcagaaagattttgctggcgcgcaaaacttgctggcgaaaatcacacctgccgatttagaacaaaaccagcaagcgcgttactggcaggcaaaaatcgatgccagccaggggcgtccttccattgatttactgcgcgcgttaattgctcaggaaccgctgctcggcgcgaaagaaaaacagcagaatattgatgccacctggcaggcgctctcctccatgactcaggaacaggcgaatacgctggtgatcaacgccgacgaaaatattctgcaaggctggctggatctgcagcgcgtctggtttgataaccgtaacgatcccgacatgatgaaagccgggatcgccgactggcaaaaacgttatccgaacaatccgggcgcgaaaatgctgccaacgcagttggttaacgtaaaagcgtttaaaccagcctcgaccaacaaaatcgccctgctgttgccgctgaatggccaggcagcggtatttggtcgcactattcagcaaggctttgaagcggcgaaaaatatcggcactcagccagtggcggctcaggtagctgccgcacctgccgcagacgtagctgaacaacctcagccgcaaaccgtggatggcgttgccagcccggcacaagcctcggttagcgatctgaccggtgaacagcctgcggcacagccagcgcctgtaagcaccccggcagcaaccaccacagcggtaagcgcgccagcgaatccatccgcagaactgaaaatctacgatacctcatcacaaccacttagccagatcttaagccaggttcagcaggatggcgcgagtattgtggttggtccgttgctgaaaaataacgttgaagagttgcttaagagcaacaccccgctgaacgtgctggcactgaaccagccggagaatatcgaaaaccgcgtcaatatttgttacttcgcgctttcaccggaagacgaagcgcgcgatgcagcgcgtcatattcgtgaccagggtaaacaagcgccgctggtgctgatcccacgcagttcattgggcgatcgcgtagccaatgcgtttgcgcaggagtggcagaaactgggcggcggcaccgttctgcaacaaaaatttggttccaccagcgaattacgcgcgggtgttaacggcggttctggtatcgctttaacgggtaccccgattactcccagagcgacaaccgactccggcatgacgaccaacaatccaacgctgcaaaccacgccaaccgatgaccagttcaccaataatggcggtcgtgtcgatgcggtgtacattgtggcaacgccgggtgaaatcgcttttatcaaaccgatgatcgccatgcgtaacggtagccagagcggtgcaacgctgtacgccagctcccgcagtgcgcaagggaccgctggcccggatttccgactggagatggaaggcttgcagtacagcgaaatcccgatgctggcaggcggtaatctaccgttaatgcagcaggcactcagcgcggtgaataacgattattcactggctcgcatgtatgcgatgggcgtcgatgcctggtcgctggcaaatcatttctcacaaatgcgccaggttcagggttttgaaatcaacggtaataccggaagcctgacggcaaacccggattgcgtgattaacaggaagttatcatggctacagtaccaacaaggtcaggtagtccccgccagttaaccaccaaacagaccggcgatgcgtgggaagtacaagcgcgtcgctggctggaaggcaaaggactgcgatttgtcgccgctaacgtgaacgagcgtggcggcgagatcgatctgataatgcgtgaaggccggaccaccgtttttgtcgaggtacgctatcgccgctctgcgctttatggcggcgcggcagccagtgtgacccgcagcaaacaacacaaattattacagactgcccgcttgtggctcgcgcgtcataatgggagttttgatactgtggattgccggttcgatgtggtagccttcaccgggaatgaggttgagtggattaaggatgcctttaatgaccactcataattaaggtttaaggattagcgtgcaagaaagaattaaagcttgcttcactgaaagcattcaaactcaaattgcggcggcagaggcgcttccggatgccatctcccgtgcagccatgacgctggttcagtctctgctcaatggcaacaaaatcctctgttgtggtaatggaacttccgctgccaatgcacagcattttgctgccagcatgatcaaccgtttcgaaacggagcggcccagcttacctgccattgcactaaatactgataatgttgtcttaacggcgattgccaacgatcgcttacatgatgaagtgtatgcaaaacaggtgcgggcgctgggtcatgcgggagatgtattgttagccatttccacccgtggcaacagccgcgatattgtaaaagcggtagaagctgccgttacgcgtgatatgactattgtggcattgaccggctatgacggcggcgaacttgcaggtttgttagggccacaagatgtggagatccgcattccttcgcatcgtagtgctcgcattcaggaaatgcatatgctgacggtaaattgcctgtgcgatctgatcgataacacgcttttccctcaccaggatgtttaaggagaatacatgaaggcattatcgccaatcgcagtccttatttccgcgctgctgttgcaaggttgtgttgccgctgccgtagtgggtaccgctgctgtgggtaccaaagccgcaactgacccacgcagtgtcggcacccaggtggacgatggtaccctggaagtgcgcgtgaacagcgcattgtcgaaagacgaacagattaagaaagaagcccgtattaatgtcacggcgtatcagggcaaagtgctgctggttgggcagtcaccaaacgctgaactttcggctcgcgccaaacagattgctatgggcgtagacggtgccaacgaagtgtataacgagattcgtcagggccagccgattggtctgggcgaagcatctaacgatacgtggatcaccaccaaagtgcgttcgcagctcttaaccagcgacctggtgaaatcgtccaacgtgaaagtgaccaccgaaaacggtgaagtgttcctgatggggctggtgactgaacgtgaagcgaaagcggcggcagatattgccagccgggtgagcggcgtaaagcgggtaaccacagcgtttacgtttattaaatagcagccccttgtaatgcctgatgcgacgcttgccgcgtcttatcaggcatacaacgatgcaaaccgtagatcggataaggcgtttacgccgcatccgacatgttttccctcaaatcagaacaacagcgccagcccgccgacaatcacaccagacactgccaccatcgcccctgtcagccataaggctttcgccgggaacgctttgcgcagcataatcagtgacggcaaactcactgccgggagcgtcatcaacaatgccagcgccggagcggttcccatacctgccagcatcatcgtttgtacaatcggaatttctgctgccgtgggaatgacaaacaagcatcctgccaccgccatcgccaccacccacatcaggctgttatcgacagcaccatcggcatgggggaataaccagacgcgagcggcacccaacaccagtactgcaaggatgtaaaccgggatcgtactccagaaaagcgtccatagcgccctgccccagcggctaaaaaaaccgccctgtgcttccggtatgtcaatttcgaccggtgcctgcgtttgcggtgtttcacgcacccatttttgcaccagcgtcgcaatcagcaacaccatcaccagcccggccaccagacgaatcgccgcaaaaccccagccgaggacaaaccccataaacaccagcgtcgccgggtttaacaccggattgcccatccagaatgccagcgcaccgcccatcgacacctgttggcgacgcattcccgccgcgaccggagccgcacagcaggtacacatcatgcccggcagcgaaaacagcgttcccagcagcgtgctgcgaaagcgcgattgcccaagcgtacgcaacaaccagtcacgcgggatcagcacctgaatcaacgaaccgaggatcacccccagcaccgccgctttccataccgcgaggaaatagatcatcgcgtaatccaacgccgcctgccatgggttagcatccgcctgcgcaaggatagatttaccgatactgtgggtttcggcagcagtaaacgctttgccgtagtaaggttcccatttcacataccagagaccggcaatgacaacgagaaagaaaagcgcgggtttccaccactgaatgggcgttgccgcctgagatgaagactgaccagtcatagcattccccaggaataagttatgataattgagcgcgtgaatattacgctcactatcaattcttgggaataattattcagctcttttgcgtaattctgaagagcttaaaatcgtcacaccttcatgcccgggccgcatcgcctctgccagcatgacccgcgccacgtctctcgcatcaatggatttccagttaccgggtaataaacggaacagcggcgcaaaaagcgtttcgttcatccgctgtttgctacgatcgcccagtaacatcgacgggcgagcaatggtcaatttcggccagttctgggcgattaatgcttcttccatctcccctttgacgcggttatagaaaaacggcgagtgggcattggcacccatagcactgaccaccagcatatgctgcgcgcccagtcgccgcccggttaatgcggtatccactaccagcgtgtaatcggcatgaataaacgcctctttgctccccgcttctcgccgcgtggtgccgagacaacaaaacacaatgtcgatgggatcggtgacctgcgccagcgcgtcagtcagttgcggatcatggggattaaacaccccgggcatatcgcccaacggacgtcgcgtcggcgcggctatggcgttaactttcggttcgttaatcaacatccgcagcaggtgaccgcccaccagccccgttgcgcctgtaatcagtacctgactcatcttcgctcctttacagaattgtctgccttgcgctccacggctcatgcaccaggcttaatagaccatgaggtaattatccccgattgtgggaaattcgcctcatccaatgcaacaacgcggaggaagcatgagtaagaaaattgccgttttaatcactgatgaatttgaagattcagaatttacttcacccgcagacgagttccgtaaagccggacacgaagtgattaccattgaaaaacaagcgggtaaaacggtgaaaggcaaaaaaggagaagccagcgtgaccatcgataaatccatcgatgaagtgacgccagcggagtttgatgccctgctgctaccgggcggccattcaccggattatctgcgtggggacaaccgttttgtcacctttacccgtgattttgtgaatagtggcaaaccggtgtttgccatctgtcacggcccgcagttgctgatcagcgccgatgtgattcgggggcgcaaactgaccgcagttaaaccgatcattattgatgttaaaaatgcgggcgcggaattttacgatcaggaagtcgtggttgataaagatcagctggttaccagccggacaccggacgatctgccagcgtttaaccgcgaggcgttacgcctgctcggtgcctgagtcgcgtagccaaatcatttttttaccaaagcccagcgtgttgtcggtgaatttgatttcatcgagccggatttcccacaccggggccgacagcattctggcaaccggaaagcgacgattgtacgccttgcgcgcgaggtcgctttcctcaccttccagcctgcggatctcacctttaaactgcacaccgcgaattaacgctaccgttttcggctgaccgtttaccgttccggcaactgccgcctgcggcccgctcatctgcgcgtggcgcgttttttcttccgtcaaaatgtagaaggcgactttctgcgcatcaaaaagataaaaggcattagcgcaccagagttccccttcctgctgcacacaccaggtgacaacatgttgttttgccagccaacggctgatggcgatgagtgtttccattgctgttctcttttatactgtgggcctgaccttaacatgcgatgcagacgatgacaccctggtttctttacttgatccgtaccgccgacaataagctttataccgggatcaccacggatgtcgaacgccgctatcagcagcaccaaagcggcaaaggggcgaaagcactgcgcgggaaaggagaactgacgctggcgttttctgctccagtgggcgatcgttcgctggcgttacgggcggaatatcgcgttaagcaactgaccaaacggcaaaaagagcgtctggtagcggaaggcgcagggtttgcagagctgttaagcagtctgcaaaccccggagattaaaagcgattgaaatgctcgtgatactcaaccaggccggtaacgccattcagcgcgtcatccgctaaacgatgtacctggaaggcgctttcagtgcccggccagcggcaacgcagatcgtgatgcgccgccagttcaaagccgaaacgactgtacagcgccggatcgcccagcgtcaccactgcggcatagccgaactcattaagcgaatcgagtccttcatagaccagttggcgtgccagcccctgtccacggtatttttcatcaaccgccaacggtgccatgccgacccattgcaggtcttcgccctgcacatcaaccggactaaatgccacatagccaatgacctgaccttcgtcatctgtcgccaccagccccagcgtcagaaagccatcttcacgcagatcgtgaaccagcttcgcttccgcatcactttcgaatgagcgacgcagcagggcatcaatacccggcgcatcaatgggaatttctactcgaattagcatggttcacctaccgatgtctgtttggtttcaggcgcggttttcattcccgcctcaacaacatccgccagttgcagcagcatcatgcgtaaggctttcggcatttgctccagttcaatggcgtccatcaggtttttcacatacagccccagctccgtatcgccttcaatcaccagccgacgctggaagaagagcgtatccggatcttgtttacgcgccgcaatcatcagcagatcgctggcgtcggcactaaaactcacatcagcttgcgcgttctggctgaccaccagtttgccattcaccaccgaggtaaaccattgcaggtcaatatcacgcacatgaatacttaaccagcggccttcaagaaactccagctcaccatcatccagcgcctgacggaattgccagcttaagacctgctcaagaacctggcgttttagcgcaaatggcgtcagttttaccggtacactcaacagagatggccccaaatgcacaatacgggaacgcagtttatccaacacgagttttactccctgtttcaacaatcatcctattttgccatatcagaaaaataacatagcggtataaatcaacaattccatatgaaattgctgctaccaccaatacaactttaactgccttaaatcaaaaattgtcgcagcaaggttaactaaaatcccagttcgttaacatttttgcgttttgatagcgcaaccttcaggaaaaattatggagctgctctgccctgccggaaatctcccggcgcttaaggcggccatcgaaaacggcgcagatgctgtttatatcgggctaaaagatgataccaatgcccgtcacttcgccggccttaactttaccgagaaaaaattgcaggaagcggtgagttttgtccatcaacatcgccgcaaacttcacatcgcgattaacacttttgcgcatccggacggttacgcccgttggcagcgcgccgtggatatggcggcgcagctgggtgccgacgcgctgatcctcgccgacctcgccatgctggaatacgccgccgagcgttatccgcatattgagcgccacgtatcggtgcaggcttcggcgaccaatgaagaggcgattaacttttatcatcgccattttgacgttgcccgcgtggtgctgccgcgcgtgttgtcgattcatcaggtgaaacaactggcacgggtcacacctgtaccactggaagtctttgctttcggcagcctgtgcattatgtcggaaggtcgttgctatctgtcgtcgtatctgacgggtgagtcgcccaacaccgtaggcgcgtgttctccggcccgtttcgtgcgctggcaacaaacgccgcaggggctggaatcccgcctgaacgaagtgctgatcgaccgttatcaggacggcgaaaacgcaggttatccgacgctatgtaaagggcgttatctggtggacggcgagcgctatcacgcgctggaagaaccaaccagtctcaataccctggaactgctgccggagttaatggcggcgaatattgcttcggtgaaaattgaaggccgccagcgtagcccggcgtatgtcagccaggtggcgaaagtctggcgtcaggctatcgaccgttgtaaggccgatccgcaaaactttgtaccgcaaagcgcgtggatggagacgctcgggtcgatgtccgaaggcacgcaaaccactcttggcgcgtatcaccgtaaatggcagtgagaagagcaatgaaatattccttagggccagtgctgtggtactggccaaaagagacgctggaagatttttatcagcaggccgccaccagcagcgccgacgtgatttatcttggtgaagcggtatgcagcaagcgccgggcaaccaaagttggcgactggctggagatggcaaaatcgctcgccggaagtggcaagcagattgtgctctccacgctggcgctggtgcaggcatcctctgaactgggcgaactgaaacgctatgttgagaacggtgagtttctgattgaagccagcgatctcggcgtggtgaatatgtgcgctgaacgcaaactgccgttcgtcgccgggcacgcgctgaactgctacaacgcggtgacgctgaaaatattgctcaaacagggcatgatgcgctggtgtatgccggtggagctttcccgcgactggctggtgaatctgcttaatcagtgcgatgagctgggcattcgcaaccagtttgaagtggaagtcctgagctacggtcatctaccgctggcctactccgcccgctgctttaccgcgcgttcggaagaccgcccgaaagatgagtgtgaaacctgctgcattaagtatccgaacgggcgcaacgtgctgtcgcaggaaaaccaacaagtgtttgtactcaatggcattcagaccatgagcggctacgtttacaacctcggtaacgagctggcatccatgcaggggctggttgatgtggtccgcctgtcaccgcagggtactgacactttcgcgatgctcgacgccttccgcgctaatgaaaatggcgctgcgccactattgttgacggcaaacagcgactgtaacggctactggcggcggctggcaggactggagctgcaagcctaagtaaatatgctcgtcatacttcaagttgcatgtgctgcatctgcattcgttcaccccagtcacttacttatgtaagctcctggggattcactctcttgtcgccttcctgcaactcgaattatttagagcacagctcactttgttaacaactttaactactctttaatgcagtattaaagattaatcggtaacaaagtgagctgttatgactgataaaaccattgcgttttcgctactcgatctggcccccattcccgaaggttcttcagcgcgagaagcattctcccactctctcgatctcgcccgtctggctgaaaagcgcggctatcatcgctactggctggcagaacaccacaatatgactggcattgccagtgctgccacgtcggtattgattggctatctggcggcgaataccaccacgctgcatctggggtctggcggcgtgatgttgcctaaccactcaccgttggtcattgccgaacagttcggcacgctcaatacactctatccggggcgaatcgatttggggctgggtcgtgcgccaggtagtgaccaacggacaatgatggcgctgcgtcgccatatgagcggcgatattgataatttcccccgcgatgtcgcggagctggtggactggtttgacgcccgcgatcccaatccgcatgtgcgcccggtaccaggctatggcgagaaaatccccgtgtggttgttaggctccagcctttacagcgcgcaactggcggcgcagcttggtctgccgttcgcgtttgcctcacacttcgcgccggatatgttgttccaggcgctgcatctttatcgcagcaacttcaaaccgtcggcacgactggaaaaaccatacgcgatggtgtgcatcaatattatcgccgccgatagcaaccgcgacgctgagtttctgtttacctcaatgcagcaagcctttgtgaagttgcgccgtggcgaaaccgggcaactgccgccaccgattcaaaatatggatcagttctggtcgccgtccgaacagtatggtgtgcagcaggcgctgagtatgtcgttggtaggtgataaagcgaaagtgcgtcatggcttgcagtcgatcctgcgcgaaaccgacgccgatgagattatggtcaacgggcagattttcgaccaccaggcgcggctgcattcgtttgagctggcgatggatgttaaggaagagttgttgggatagtgtgtcttaacgcgggaagccttatccgagctggcaacgctgtcctacgtagacctgataagcgaagcgcatcaggcattgtgtaggcagcagaaatgtcggataaggcaccgctgattactgatacaccggcagtaaattaaagctcgataaaatatggaccagtgcgttgccaacgccaaacaccagaatcagcgtaatcatcggcttgccgccccagacgcggaatttcgggctgccaaagcgtttacgcgatgcgcgggctaacagcgccggaacaattgccgcccagatggtagctgctaaaccagcataaccaatggcgtacaggaatccgttcgggaacagtagaccacccacaacaggcggggcaaaggtcagcaatgccgttttcaagcgccccagggctgagtcatcgaaaccaaacagatctgccagatagtcaaacaaacccagcgttacgccaaggaacgaactcgctaccgcaaagtttgagaacacgaccagcagaaggtccaggctacggctgttcagcacgccgcttaatgcctgtaccagcacatcaatattaccgcccttctctgcaataccgataaactccggacgcgggatgttacccatcgtcgccagcaaccagatggtatacagcgccagtgccatcagcgtaccgtacaccaggcatttcacgatggttttcggatctttgccgtaatacttcatcaggcttggcacgttaccgtgataaccaaacgacgccaggcagaacggcaatgtcatcagcagatacggcgcataagatgcattgctttctgcaacgttgaacaatgtcgcaggctgcacatgccccaacaggctgccaaaggtgaggaagaaggtaatgactttcgcccccagcacaatcgccgtcatgcggctgacggccttagtactcaaccacaccacaaacgctaccagcagtgcaaaaccaaaacccgccgcccgtgccgggacgtttagcgacatctctgcgaaggtgtgatgcagaattgaaccactggcagaaatataggcataggtcaggatatagagcacaaaggcaatggaaataccgttgaccacgttccagcctttgcccagcaaatctttggtgatggtgtcaaaactcgaaccgattcggtaattcaggttagcttccagaatcatcaagccggaatgcagcatacagaaccaggtaaagatcagcgccgccattgaccagaaaaaccacgccccggacatgaccactggcagagaaaacatccctgcgccaataatggtgccgccgataatcaccacgccgccaagcagcgacggtgacgtttgggtggtggttagtgttgccatgagggcttctctccagtgaaaaatagtgcgactgcgttgttatgcattgcactgtaccagtacgcgagtacaaaagacagaaaaaaagccccgatggtaaaaatcggggctgtatatattattttacagattgtgttcgctgttcagcgatgattacgcatcaccaccgaaacgacgacgaccggtagagtcatcacgacgcggagcgcggccttcacgacgttcgccgctaaaacgacgaccatcaccacggccaccttcacggcgttcaccgctgaagttacgaccgccttcacgacgttcgccaccgaaaccacgaccaccgccacgacgctcaccgccagtatgcggctgtgcatcgcccagtaactgcatgttcatcggcttgttgagaatgcgagtgcgcgtaaagtgttgcagcacttcacccggcatacctttcggcagttcgatggtggagtgagaagcaaacagcttgatgttaccaatgtaacggctgctgatgtcgccttcgttagcaatcgcaccaacgatatgacgaacttcaacaccatcatcgcggcccacttcaatgcggtacagctgcatatcgccaacatcacgacgttcacgacgcggacgatcttcacggtcaccacgcgggccacggtcgttacgatcgcgcggaccacggtcatcacggtcacggaattcacgtttcggacgcatcggcgcatctggcggtacgatcagagtacgttcaccctgtgccattttcagcagtgccgcagccagagtttcgagatccagctcttcaccttctgcagtcggctgaattttgctcagcagtgcgcggtattgatccagatcgctgctttccagctgctgctgtactttagcggcgaatttttccagacggcgtttgcccagcagttctgcgttcggcagttctacttccggaatagtcagcttcatagtacgttcaatgttgcgcagcagacgacgctcgcggttctcaacgaacagcagcgcgcggccagcacgacccgcacgaccggtacgaccgatacggtgaacgtaagactcagaatccatcgggatatcgtaattaactaccaggctgatacgctcaacgtccaggccacgggctgcaacgtcggtcgcaatcaggatgtccagacgaccatctttcaggcgttccagtgtctgttcacgaagcgcctggttcatgtcaccgttcagcgcggcgctgttgtagccgttacgctcaagagcttcagccacttccagagtcgcgtttttggtacgaacgaagataatcgccgcatcaaaatcttccgcttccaggaaacgtaccagtgcttcgtttttgcgcataccccagacagtccagtagctctggctgatgtcaggacgggtagtcacgctggactgaatgcgcacttcctgcggctctttcataaagcggcgggtaatgcgacgaatcgcttccggcatggttgcagagaacagagcggtctgatgaccttccgggatctgcgccataatggtttcaacgtcttcgatgaagcccatgcgcagcatttcgtcagcttcatccagaaccagaccgctcagtttagagaggtccagagtgccacgtttcaggtggtccagcagacggcccggagtaccgacaacgatctgcggcccctgacgcagggcgcgtaattgcacgtcataacgctggccgccgtacagagcaaccacatttacgccgcgcatgtgtttagagaaatccgtcattgcttcagcaacctgtaccgccagttcgcgggtcggtgccagcaccagaatctgtggtgctttcagctcaggatcaagattctgcaacagaggtaaagagaatgctgcagtttttccgctccccgtctgggccatacccagaacgtcgcggccattcagcagatgtggaatacactctgcctgaattggagatggtttttcgtaacccagatcgttaagggcttcaaggataggagccttcaggcccagatctgcaaaagtggtttcgaattcagccatgtagtacgtgtgcctcaaaattaatggcggccagtctacataactcatcatgaaattgatcagcaattttcattgaaaagtgtgaaccggctcaaagtaggtgtattaacgaacaacaacgccctcacccgttaaggtgatggcaatcaaaaaagattacgggctgatgtgtacgtcagctattgctggtccgattctgccaggtcatcttggtcctggcccaggagcgataattccaacaatgcgtatcggtgctcaacaaagttatgaacgttgttggcaaccgccagtttgaacagtgccgtggcgctgtccaaatcccccagacttaggtagtacttacctaaatagaagttggtttcactgagatgctcagcgagcgaggtgttatccgttgcgtccgccttgagcctttccattaacgtttgttcgctaatgttgcccaggtagaactcgacaatgttccatccccactgttccttatccgatttttcgaagtgctgtttcaacacttctttagcctgcttctcatcgagcttctgctcggcgagaaaaagccacagactacggaaaggatcattgggatcgtcttgataaaacgccagcagatcatcttgcgctaacttgtcacgaccgccgtaatataatgcgatcccgcgattcaagtgcgcgtagttgtaagttggatcaagctcaagtacagaatcaaacgcttcataggcagcatcaaaattgcctgcctgcgttaaatatatgcctaagtaattgaatacttcaggcatatccggtcggattgccagcgcttgcgaaaaatcgttacgcgctaatgccctcagaccgagactatcatacaacactccgcgctcatataaaagctgtgcgcgttcgtcatcggttaaagcccgactggcaaggatttgttccatacgtgccagaatcacttcctgctgtaaagtcggttgcaatggtaccgcgaggacttcacttttacgccaggaagtattactgcatcctgcaagcgtaagtgctgtcgcaacgaaacaccagcgcaaaaaaggcttcatttcccactcccgaagaccacggttgaatgaacgtcctgttcccggttgctaacaaggcgtcctgcccggttaaaagccccccgccgcagcggagggcaaatggcaaccttactcgccctgttcagcagccggagcttccggtgctgcagcaggttgagactgctcagtcgcttctttaatgctcagacggatacggccctggcgatcaacttccagaactttcaccggtacttcctgacccatctgcaggtaatcggtcactttctcaacgcgtttgtcagcgatttgagagatgtggaccagaccttctttaccgccgccgatggcaacaaatgcgccaaagtcaacgatacgggtcactttaccagtgtagacgcggcccacttcgatttctgcagtgatctcttcgatacgacgaatagcatgtttcgctttctcgccgtcggtcgctgcgatcttcacagtaccgtcatcttcgatttcgatggtagtgccagtttcttcggtcagggcacggataacagagccgcctttaccgataacgtctttgatcttatccgggttgatcttgatggtatggatacgcggtgcgaactcagagatatcgccacgcggcgcgttgatcgcctgttccattacgcccaggatatgcagacgcgcacctttagcctggttcagcgcaacctgcatgatctctttggtgataccttcaattttgatatccatctgcagtgcagagataccgtcgcgggaacctgcaactttgaagtccatatcgcccaggtgatcttcgtcgcccaaaatgtcagacagtacaacgtagttgtcgccttctttcaccagacccattgcgatacccgcaacggcagctttgattggcacacctgcgtccatcagcgccagagacgcgccgcacacggaagccatagaagaagaaccgttggattcggtgatttcagacactacacgtacggtgtacgggaatttgtccatatccggcatgactgccagcacgccgcgcttcgccagacgaccgtgaccaatttcacgacgcttcggagaaccgaccatgccggtttcgcctacggagtacggagggaagttgtagtggaacaggaaggtatcggtacgttcgcccatcagttcatcaagaacctgcgcgtcacgagcggtacccagcgttgcagtaaccagtgcctgcgtttcaccgcgggtgaacagcgcagaaccgtgagtacgcggcagcacgccagtacgcacatccagaccacggatcatatctttttcacgaccgtcgatacgcggttcgcctgccagtacgcggctacgaacaacgtttttctcgatagcgtgcagaatttcacccagttcgttttcgtccagggtttcgtcttcagcaagcagcgtcgcgatggtttcagatttgatgacatcaacctgcgcataacgctcttgtttgtcggtgatgcggtaagcatcgctcaggcgagcttcagccagtgcagcaacgcgcgcgttcagcgcttcgtttaccggctccggctgccagtcccaacgtggtttaccggcttctttcaccagttcattgatgttctgaataacaacctgctgttgttcatgaccgaacactactgcgcccagcatctggtcttcgctcagcagttcagcttcagattcaaccatcagaacagcggcttcagtaccggcaacaaccagatccagtttgctctctttcagctcgtcctgagtcgggttcagtacgtactggtcattgatgtaacctacgcgagcagcaccaatcggaccattgaacggaataccagacagagacagtgctgcggaagcaccaatcatcgcgacgatatccgggttaacttgcgggttaacagaaaccacggtggcgataacctgaacttcgttgacgaagccttccgggaacagcgggcgaatcgggcggtcaatcagacgcgcgatcagggtttcgccttcgcttgggcggccttcacgacggaagaagctacccgggatacgaccagcagcgtaggtacgctcctgatagttaacggtcagtgggaagaagtcctgacctggtttggcttttttctggccaacaacggtaacaaataccgcggtgtcatccatgctaaccataacagcggcagtagcctgacgagccatcatgccggtttccagagtcacggtgtgttggccgtactggaatttacgaacgatcggattaagcaatgtaatatcctttctctttcttagacagtaccttacggcactggtgttaatacccgatcttctgcgcatcctcgcgactaatgacaaccctaacccagctctatgtgggtaaagcctctcattagccgcgcgaacctctgcaacggaagatcattcatagcaacaatacattagtttccagtgaattgctgccgtcagcttgaaaaaaggggccactcaggcccccttttctgaaactcgcaagaattagcgacgcagacccaggcgctcgatgagctgggtgtaacgtgctacgtctttacgtttcaggtagtcgagcagtttacgacgctgagaaaccatgcgcagcagaccacgacggctgtggtgatcttttttgtgctctgcaaagtggccctgcaggtggttgatctgtgcagtcagcagtgctacctgaacttcggtagaaccggtgtcgtttgcgtcacgaccaaactcagaaacgattttagctgttgcttcagtacttagagacattttaaaactccaaagtatatagaatgaaaggacgccgatctctaattcagcgatcccagtgtacgttacgcaaagtgttaaacaatttacgcgacgttaagcggcagtattctactcgtagcgacctgttatcgcaagacggttaacattacgccgggtattcaaccaccaggcgacgaggcgcaacgcggccttcatcgtcaatttcgcccataccgataaatttgccgttctcaccttctgtaacgcgaaccagtccttccagcggcgcaccggatgtacgaactgggttaccatttttgaagtaaacagaagacgttaacggaagattcaccaccgggtagtccgaagctggactgtccattggcatcagtaatggatcaagtaactccgcagccggaatatcctgctgttcggcttgttcgaccagttcacgcagatgttccagggtcaccatccgttcaaccggatatttacttaccgccagacgacgcaggtaaataacatgcgcgccacaaccgagtttttcacccaggtcatcaatgatggtgcggatataagtgccttttgagcagtgaatttccagctccagctcattgccttcgtggcgaataaacagcaattcataaacggtaatcgggcgcgcttcacgcggtacttcaatgccctgacgcgcatattcgtacagttttttaccctgatatttcagtgctgaatacatcgaagggatctgttcgatatcgccacggaaagtatccagcgccgccgccagttgctctgcgctaaaggttaccggacgttcttcaacgatttgtccgtcggcatcagaagtatcggtacgctgtccaagacgcgcaatgacccgatagcgtttgtcggagtccagcagatactgggaaaacttcgtcgcttccccgaggcaaattggcaacatgccagttgccagcgggtccagcgcaccggtatgcccggcacggttggcgttataaatccgtttcactttttgcagcgcatcattgctggacataccctgcgatttatccagcaacaaaacgccgttaatgtcgcgaccgcgacgacgaggacgactcattagtcctccttgctgtcgtccgggttaacacgacgttcttcgtcatgtttgaccacgctggtcaccaggtttgacatgcgcatcccttcaaccagagagttgtcgtagaagaaggtcagttccggcacgatacgcaggcgcatcgctttccccagcaggctgcggatgaaaccagaagcttcttgcaacgctttgatgcccgctttaaccgcgtcttcatctttgtcattgaggaacgtcacatatactttggcatacgccaggtcgcgagacatttcgacaccggaaacggtggtcatcatgcccaggcgaggatctttaatttcacgctgcaggatgagagcgatctctttttgcatttcctgcgctacgcgctgcgggcgaccaaattctttcgccataataaattctcctgacaaaaaaggggctgttagcccctttttaaaattaatttcaggtggaagggctgttcacgttggcctgataagacgcgccagcgtcacatcaggcaatccatgccggatgcggcataaacgccttatcccgcatggaaccctaaaaaccttaagcgatggtacgttggatctcgatgatttcgaatacttcgatcacatcgccagtgcggacgtcgttgtagttcttaacgccgataccacattccataccgttacggacttcgttaacgtcatctttgaagcggcgcagggactccagctcgccttcgtagataaccacgttgtcacgcagaacgcggatcgggttgtgacgtttaaccacaccttcggtaaccatacagcctgcgatggcaccaaatttcggcgatttgaacacgtcacgaacttccgccagaccgataatctgctgtttcagttccggagacagcataccgctcatcgccgctttcacttcgtcaatcaggttatagatgacggagtagtaacgcagatccaggctttccgcttcaatcactttacgtgcagaggcatcagcacgtacgttgaagccaaccaggatggcgttggacgccgcagccagggtggcgtcggtttcggtgataccacctacgccagaaccgatgatcttcactttaacttcgtcagtagacagtttcagcaaggagtcggagatcgcttccacagaaccctgtacgtctgccttcaggacgatgttcacttcgtgaacttcgccttcggtcatgttggcgaacatgttctcgagtttagatttctgctgacgcgccagtttaacttcgcggaatttaccctgacgatacagtgcaacttcacgcgctttcttctcgtcacgtacaacggtaacttcatcacccgcagccggtacgccggacaggccgaggatttccaccggaatggacggacccgcttccagcacttcctgacccagttcgttacgcatcgcacgaacacgaccgtattcgaagccacacagaacgatatcgcccttgtgcagagtaccttcacgtaccagaacggtagcaaccggaccacgacctttatcgaggaaggattcgataaccgcaccgctcgccatacctttacgtaccgctttcagctccagaacttccgcctgcagcaggatagcgtccagcagttcatcgatgccggtacccgctttcgcagatacgtgtacgaactggctttcaccgccccactcttccggcaggatgccatactgggagagttcgttcttaacacgatccggatcggcttctggtttatcaatcttgttcactgcaaccaccaccggtacctgcgccgctttcgcgtgctggattgcttcgatggtctgcggcatcacgccgtcgtcggcagcaacaaccaggactacgatgtccgttgcctgcgcaccacgtgcacgcattgaagtaaacgcggcgtgccccggggtgtccaggaaggtgatcatgccgttttcagtttcaacgtggtatgcaccaatgtgctgggtaatgccgcccgcttcgccagaggcaactttcgttgaacgaatgtagtccagcagagaggttttaccgtggtcaacgtgacccatgatggtcacaaccggcgcgcgcggttcagccgcagcacccgtgtcacggtcgctcattaccgcctcttccagctcgttttcacgacgcaggataactttgtggcccatctcttcagcaaccagctgtgcggtttcctgatcgataacctggttgatggttgccattgcgcccagtttcatcatcgctttgatgacctgagagcctttaaccgccatcttgttcgccagttcgccaacggtgatagtttcgccgatcacaacgtcacggttaacggcctgagcaggcttctggaagccttgctgcagggaagaacctttacgttttccgcctttaccgccacgtactgctgcgcgtgcttcttcacgatcagcttttgattcagcgtgtttgttacctttcttcggacgcgctgctttcgcgttacgaccacggccacggccgccttcgacttcacgatcgctttcgtcttcggcctggcgagcatgttgagaagtagtgacgtgataatcgctggaatcttcagtcggttccgcgttatcagtccatttgttttcttccgccatacgacgtgcttcttcagcaacgcgacgtgcttcttcttcgagtttacgacgcgcttcttcttcagctttacgcttgagctctgcagcttcctgctcacggcgggctttttcagcctgggcgtttttagtcatatcgtcttgttgattgctcactttgtctttttccgcagcttcacgtttcgcttgttcagcagcttcacgcttagcttgttctgcggcctcacgttcagctttttgttgcgcctcgcgtttagccgattcttctgcctcacgacgggcttgctcttccgcttcacgctgcgcttgctcttccgctgcaaggcgttcagcctcttgcggatcgcgtttcacaaaggtgcgtttcttgcggacttcgatttgtaccgatttgctttttccaccggtaccaggaatgttaagggtgctgcgtgttttacgctgcagcgtcaatttgtccgggcctgaatttttctgattcaggtggtcaatcaaagtctgtttctcttgtgcagacacagagtcgtcagcagacttccggatacctgcatcagcaaattgctgtaccaggcgttccacggaggtctgtcgctctgcggccagcgttttaatcgttacatctgtcatgctgttccttcctgctacagtttattacgcttcgtcaccgaaccagcaaatattacgggcagccataatcagtgctccggctttttcgtcggtcaacccttcgatatcagccagatcatcaatgccctgttcggcgagatcttccagcgtacaaacgccacgggcggccagtttgaatgccaaatcacgatctaccccttcaaggttcagcagatcgtcagccggtttgttatcaccgaggctttcttcctgggcctgtgcaatggtggccagtgcatttttagcacgctcgcgcagtgcttcaacggtcggctcatcaaggccttcgatttccaacagctctttcatcggcacataggccagttcttccagcgtcgagaagccttcttctaccagaacagtcgcgaagtcttcgtcgatgtcgagatatttggtgaaggtgtcgatcgctgcgtgcgcttccgcctgatgcttagcctgcaggtcgtcaacggtcatcacgttgagttcccaaccgctcagctgcgaagccagacgcacgttctgaccgttacggccaatcgcctgcgccaggttaccggcttcaacggcgatatccatggtgtgtttatcttcatccaccacgatagaagcaacgtctgccggtgccattgcgttaatcacaaactgcgccgggttatcatcccacaggacgatatcgatacgctcgccgcccagttcagtagaaaccgcctgaacacgcgcgccacgcatacctacacaggcacctaccggatcgatacgtttatcgttggttttcaccgcgattttcgcacgagaacccggatcgcgagccgctgctttaatttcaatcacttcttcgccgatttctggcacttcaatacggaacagttcgatcagcatttccggcttggaacgagtgacgaacagttgcgcgccacgcgcttccgggcgaacggaatagagcacgccacgaacgcggtcgccagggcggaagttttcacgcggcagcatatcttcgcgcaggatcacggcttcagcattgttgcccagatccagagagatgttgtcgcggtttacttttttcaccacgccggtgatgatttcaccttcgtgttcacggaactgatcaaccaccatcgcacgttcggcttcacgcactttctgcacgataacctgttttgccgtctgggtagtgatacggtcaaaggtaacagactcaatctgatcttcaacgtaatcgcccaggttcaggctttcatcttcataacgtgcggcttcaagggtgatttccttggtcggctgggtgacttcatcaacaactaaccagcgacggaaggtgtcaaaatcaccgcttttgcgatcgatctgtacacggacgtcgatctcttgctcatattttttctttgttgctgtcgccagcgcgctttccaatgcttcgaaaatcttctcgcgaggtagcgccttttcattggatacggcttcaactacagccaaaatttctttgttcatcgcgggcttttcacctcatccagactattaaaagtggggaaccaggttcgccttctggatattactcagcgcgaacacttcatctttaccttcgacggtaaccgtgatcatttcaccgtctaccgctttgataacgccctgccatttacgacggttttgtaccgccatacggagaaccagagtcacctcttctccgacaaaacgggcgtagtgttcagccgtgaacagtgggcgatcgagacccggtgaggagacttccaggttataagcaacggtgatgggatcttcaacatccagcacagcacttacctggtggctcacatcagcacaatcatcaacattgatgccatcttcactatcaatatagatgcgcagtgtggatgtgcgaccgcgaataaattcgatgccaaccagttcaaaacccagggcctcaactggcgcagtaatcatctctgttaatttttgctctaatgtggacaagcccacccccaagacataaaaaaagggcctaaagcccagttattctgtagtcagataacaaaaaaccccgataaatcggggctttatataactgaaccctataaccgcaactgcggtctggagcactttccagaaggattttttcaaatcccactacgaaggccgaagtcttcacagtatatttgaaaaaggactctaagggaaagtggttgcgggggccggatttgaaccgacgaccttcgggttatgagcccgacgagctaccaggctgctccaccccgcgcctgaaacgtggcaaattctactcgttttgggtaaaaaatgcaaatactgctgggatttggtgtaccgagacgggacgtaaaatctgcaggcattatagtgatccacgccacattttgtcaacgtttattgctaatcatgtgaatgaatatccagttcactttcatttgttgaatacttttgccttctcctgctctcccttaagcgcattattttacaaaaaacacactaaactcttcctgtctccgataaaagatgattaaatgaaaactcatttattttgcataaaaattcagtgagagcggaaatccaggctcatcatcagttaattaagcagggtgttattttatgacgacgattctcaagcatctcccggtaggtcaacgtattggtatcgctttttccggcggtctggacaccagtgccgcactgctgtggatgcgacaaaagggagcggttccttatgcatatactgcaaacctgggccagccagacgaagaggattatgatgcgatccctcgtcgtgccatggaatacggcgcggagaacgcacgtctgatcgactgccgcaaacaactggtggccgaaggtattgccgctattcagtgtggcgcatttcataacaccaccggcggcctgacctatttcaacacgacgccgctgggccgcgccgtgactggtaccatgctggttgctgcgatgaaagaagatggcgtgaatatctggggtgacggtagcacctataaaggaaacgatatcgaacgtttctatcgttatggtctgctgaccaatgctgaactgcagatttacaaaccgtggcttgatactgactttattgatgaactgggcggccgtcatgagatgtctgaatttatgattgcctgcggtttcgactacaaaatgtctgtcgaaaaagcctactccacagactccaacatgcttggtgcaacgcacgaagcgaaggatctggaatacctcaactccagcgtcaaaatcgtcaacccaattatgggcgtgaaattctgggatgagagcgtgaagatcccggcagaagaagtcacagtacgctttgagcaaggtcatccggtagcgctgaacggtaaaacctttagcgacgacgtagaaatgatgctggaagctaaccgcatcggcggtcgtcacggcctgggcatgagcgaccagattgaaaaccgtatcatcgaagcgaaaagccgtggtatttacgaggctccggggatggcactgctacatatcgcttatgaacgtctgttgaccggtattcacaacgaagacaccattgagcagtatcatgcacatggtcgtcagttgggccgtctgctgtaccaggggcgttggtttgactcccaggcgctgatgctgcgtgactctctgcaacgctgggttgccagccagatcactggtgaagttaccctggagctgcgccgtgggaacgattattcaatcctgaataccgtctcagagaacctgacctacaagccagagcgtctgacgatggaaaaaggcgactcggtgttctcgccagatgatcgtattggtcaattgaccatgcgtaatctggatatcactgatacccgagagaaactttttggttatgccaaaactggcctgctctcctcctctgccacttcaggcgtgccgcaggtggagaatatggaaaacaaaggccagtaattcgacatcaaccctgcccttcaggggtggggttaccttgcttatcctctgtaaactcctttctgagcatcacataatcgaaaacatcatggtttgcatccacaacccgtgagtctcctttatagtgtgcaatcacttcctcaagcgtttgcggctgttccggctttgttacccccatccacgcattaataaggtaattattgtaagctgtcgaaaagatgttgttttccgttgtgcgatccacgccatccccaagaacggggctataccagataaacatcgggacatgatatgcctgctggctggcctccctgcctccatgaaaatagacgttcttcttcgtagggtcgcgttccaggccgtggtcggcaaaatacatgaccgaggcgcggcgatcttttaataattcaaaaacctgacctagcaaactgtctgtgtaatgaatggagttgtcatagcaggcatcctgatcgtcctgcggttgaaacacggcgctggattgcggataggcgctacaagccggttcatggcttccatttaaatgaagaacaatcagtttcttttgctgcgtcttttgctgtaacgcttgcgataaatgcggcaacaacaattcatcaaatcctctgacatagactgtttccatggcgcgcatggcgatactggtaactgctgtaccattctgccgaaaagcggattgcgagcttagccagaaagtctgaaatcctgcttgattagccatattaataatgttgtcggggtaattatgaatgtcatgactcaaaacagaatcagcagttaaagaaaggggaaccgacagcgcagtgtaaggtgcgccgcttattgcttgattaaacagtttgatctgttttctttgtgcttcaacttgcggtgtcgtagagcgtgtatatccatacaaagacatattgtcgacacgtacagactcccccacaatcaacacgtaggtatcaatacctgtatccctgactgataattgaaaatacggcaccgtgtttgcaattgagagtaatctttgatgctctttcgctgctaaagcaaaatagttgagattaaaaaacggcgtataggtagcaaatcgcgacgctagtatatatggactgaacgcttttttattttttgcatctttataagcaaattgacaagcggaaaataaactgcccgaaatgacaatcagcaataatattcctgtcactttttttgtcggcaaggaaacatcatattttattattactgccaaaaaaagaagggataaaaaagcaaaagcacatagataagggatatacatccccagcattttgacaacttcatccggatcactctgcagcacactaatcgcaaatccatcattgaaagttgtaccaaaggtacaccatgaatagaggctaatactcatgtctgccgcagtcagtaacacaaatggtgcggcaacaagcaggcgaagcggaagggatgatatacgtttaacaaccaggatggtcaggacgaagaacagcaatcgctgaaccatatgcgctccggaagaggcgactaagttcgtaataccaaaaacaataacacaaagatacaacaaccaatgagatttaaaacttctagcaaatttgttgaatactgtcatccagaaatccaagttcacaaccaatataaacaattatcaacaatgttcaattttatatcagacatgtttttcaactctgatccatatcagaccgaaacactgttagttttttctttttaaatgatgcggccattgttctcagtaattaaataacattatcaatgcgtctctaaacattacgcagaacgtagccatcagtagttatactgacaggagcaggatggtttatcgagaagtaaacatatccgtattcgtaccggaactggagttgacacaataaagtgccaattatgtcagcagtagggaaaagtttataactaaggcgtaccggcaccatcgtttcaaagtaccagctacgagtaaagcaactggacgagatacagatacctgacaaccattcctcagaccaggaccaaaacgaaaaaagacgcttttcagcgtctcttttctggaatttggtaccgaggacgggacttgaacccgtaagccctattgggcactaccacctcaaggtagcgtgtctaccaattccaccacctcggcacggatactactttttagttcgggatatcgctggtcggcttagccggagcagctggctgagtttgttcggttttcgccggcgcactcaggttttcccattcgctacctttattggttttattgctattgatgttacccagcaccagactgatgatgaagaataacgttgccagcagcgccgtcatgcgggtcatgaagttaccagaaccacttgaaccaaacagcgtagcggaagcgcctgctccgaaggaggctcccatatcagcgcctttaccttgctgcagcatgatcagaccaacaaggccaattgccacaataaggaaaactactaaaagagcttcgtacataatcaacctgttccttgcggagttgccgcgtaccaatgcttcaaccaataaagcgggagtttttaatctttcccactgaagcgggtgtgaatactaaccaaagcgaatgaccttcgcaagggcaattttatcgcattgtatcaactgcggaaaaaaacagcaaaaccgatgtgttcgctgagaaaaaaggcgacaatcgccgcctttttagccagttatctaacgctttaaacggcttttactgcatcggcgatgcggtgtgcaaattcagtcacctgcgcttcgtcttcgccttccaccatcacgcgaattaacggttcggtgccggatttacgcagcaacacgcgtccacggttgcccagcgcaacttcaacctctgcggtcacggctttaactgactcatgctcaagtggatcgccgctacctgcggtgtaacgtacgttaaccagaatctgcgggaacattttcatgccgctgcaaaggtcgtgcaggctcatatggttacgtgccatcgccgccagcacctgcaagccagcaacgatgccgtcaccggtagtagttttatccagcaggatcacatgaccggaattctctgcaccgatacgccagcctttctcctgcattttttccagtacgtagcggtcacccactttcgcgcgcgcaaatggaattcctaactgtttcagcgccagttcaagccccatgttgctcatcaatgtacccacagcgccaccacgcagctggccctgacgaagaccttcacgcgcgatgatatacatgatctgatcgccatcgactttattgccttcatggtcaaccataatcacgcgatcgccatcgccgtcgaaggcaataccgagatccgctttttcagccagcacacgagcctggagcgcgcgaacgtcggtagcccccacttcggcattgatgtttacaccgtttggctcacaaccgatagcgataacgttcgcccccagttcgcgcagcacgttcggcgcgatgtgataagtcgcaccgtttgcacaatccaccacaatcttcagttcactgaggctaagttcgttcgggaatgtggctttgcaaaactcgatatagcgacccgcggcatcaacgatacggctggctttacccagttctgccgaatcaacgcagctgatctccttttccatttccgcttcgatggcctcttctaccgcatccggcagtttggtgccgtcgatagagaagaatttaatgccattatcgtagaacgggttatgcgatgcagatatcacaattccggcctctgcgcggaaggtacgcgtcagataagccacggccggtgttggcatcgggccagtgaagagtgcggaaaggcccgctgccgccagacccgcttccagtgctgactccagcatatagccagaaatacgcgtgtctttaccaataataatcttacgggagccgtggcgcgccagcactttacccgcggcccaacccagcttaagcacaaaatcaggtgtgatcggcgcatcccctacacgaccacgaatcccatcggtaccgaaatatttacgattactcatagcgtttgttttcctttgcagacagagtggcttccaccacccgcatcgcttctacggtttctttgacgtcatgaacacgaatgatgtgcgcgccttgcattgcggcaatgaccgcacaggccagactaccgctcaggcgctcggacggccccacgttcagcagctgcccaatcatcgattttcgtgacatacccaccaacagcggcaggttgaaatggtgaaattcagccaggcgcgccagtaatgaatagttatgggagagatttttaccgaaaccgaatccggggtcgagcaacaatttctcttttgcgatacccgcctgctcgcaacgtgctatttgctcaataaagtagcgattcacttctgcaaagacatcgtcatacttcggagcttcctgcatggtttttggatttccctgcatatgcatcagacaaaccggtaaaccggtttctgcagccgcctccagagcgccaggttcggaaagggagcggatatcattaataatgtgagcgccaactttcgctgactcacggatgacttctggtttggatgtatcgaccgagatccagacttcgaagcgttgagcaattgcctcaaccacaggaataacacgttgcaactcttcttcaacgctaacttccgccgcccctgggcgcgtggactcgccaccaacgtcaatgatcgtcgcgccagcattgatcatcagattcgcatgtttcaccgcatctatcagcgagttatgcgtgccaccatccgaaaaggaatcaggcgtgacgttgaggatccccattacgtgaggatggctaaggtccagtgaagtaccctgggcaaagagtttcatgatgttatccctggtatgaattgataagaaaaaaccccggagcacgccccggggttttcggtacaaatacagtcatctgatgcgggaacttacttgtcgcctaactgctctgacatggtgttacccgggttcggcgtacgcggttcatcaaccggacgaggagcctttggactaccattgtcgccagaattgttagaagcgcctggttcttcccagcccgctggcggacgtacatcgcgacgtgccatcaggtcatcaatctgcggtgcgtcgatagtctcatatttcatgagagcatctttcatcgcatgcagaatatccatattgtcggtcagaagctgacgcgcacgattatagttacgctcaatcagtgctttcacttcctggtcgatgatacgtgcagtttcatcggacatatgtttcgctttcgctacgctacggccgaggaatacttcaccttcttcttccgcgtacagcagtggacccaatttctcagagaagccccactgggtcaccatgttacgtgccagattggtcgcaactttaatatcgttggacgcaccggtagaaacatgttccggcccatagatgatctcttctgccagacgaccaccgtacagcgtagaaatctggctttccagtttctgacggctggcgctgattgcgtcgccctcaggcaagaagaaagtcacacccagcgcacgaccgcgtgggataatcgtcactttgtgcaccggatcgtgttccggcaccaggcgaccgataatcgcatgacccgcttcgtggtaagccgttgattctttctgcgcttccgtcatcaccatggagcgacgttccgcacccatcatgattttgtctttcgctttctcgaactcaaccatcgacacaacgcgtttgttgccacgagcagcgaacagtgccgcttcgttcaccaggttcgccaggtcagcaccggagaaaccaggagtaccacgggcaatgattgccgcgtcgatatcgggggccaatggtacgcgacgcatgtgaactttcaggatctgctcacgaccgcgaacatctggcaagccgaccacaacctgacggtcgaaacggccaggacgcagcagggccgggtcgagaacgtccggacggttagtcgcggcgataacgatgataccttcgttaccttcgaagccatccatctcaaccagcatctggttcagagtctgttcacgttcatcgtgaccaccgcccagaccagcgccacgctggcggcctacggcgtcgatttcatcgataaagatgatgcacggtgccgctttcttcgcctgttcgaacatgtcacgaacacgggatgcacccacaccgacgaacatttctacgaagtcagaaccggagatagtaaagaacggaactttcgcttcgcctgcaatcgctttcgccagcaacgttttaccggtacccggaggaccgaccatcaggacgcctttcgggatcttaccgccgagtttctggaagcggctcggctcgcgcagatactctaccagttcagcaacttcttcttttgcttcgtcgcagcccgcaacgtcagcaaaggtcgttttgatctgatcttccgtcagcatgcgcgctttgctcttaccaaacgacatggcacctttgccaccgccgccctgcatttgacgcatgaagaagatccagacaccaatcagcaacagcatcgggaaccaggagatgaagatagaagccagcaggcttggttcttcaggcggttcaccgacaaccttgacgttcttggtcaacaggttatccagtaatttcggatcctgaaccggaatgtaagtggtataacggttactatctttcttggtaacgttgatttcacgtccgttgatacgcgcttcacgaacctggtcgttattgacctcttgtaggaaggtagagtaatccaccttacggccattagactcgctgggcccaaagctctggaatactgacatcagcacaacggcaatgaccagccagagtattaggtttttcgccatgtcactcaagggattaacctcttattacaactgtgttaaaaacagcgtcaggatactctatatccagcatctttcaaactttcgtctgaaatctcccggttagggtttacgcccggtcgctacaatatacacttcccgcgaacgtgcacgagaagagtccggcttacgaactttgaccttcgtaaacagggagcgaatttcccttagatactcatcgaaaccttcgccctggaacaccttcactacaaaactgccacctggcgctaatacatcacgacacatttctaacgccagttccaccagatacatggcacgggggatatccaccgccggtgttccgctcatgtttggtgccatatcggacatgacaacctggactttgctgtcgccaacgcgctccagcagtgctttcatcaccagttcatcacgaaaatcgccctgaagaaagtccacaccaacgataggatccataggtaaaagatcgcaagcgatgatgcggcctttgccgccaatttgggtgaccacatattgtgaccaaccacccggagcagcaccaaggtcgacaaccgtcattcccggtttaaagagtttgtcactttgctgtatttcatcaagtttaaaccaggcacgggaacgtaacccctttttctgtgcctgttgaacatatttatcgctaaagtgttcctgaagccagcggctggagctggcagaacgcttcttacctgtcatttaactttcccatggggataactcatcgtaaccaattgcgtaaatttttacgcgcctatttggtgatatatgggagatggcggtagaatgacccgttttcaatcccaacgtaagcaaaaaatacgatgaatctgagtactaaacaaaaacagcacctgaaaggtctggcacatccgctcaagccagttgttctgcttggcagtaatggtttgaccgaaggggtgctggccgagattgaacaagcgttagagcaccatgaactcatcaaggtgaaaatcgccaccgaagatcgcgaaactaaaaccttgatcgtggaagctatcgtgcgcgaaaccggcgcctgtaatgtacaggtcatcggtaaaacgctggtgctttatcgcccaactaaagaacgtaaaatctcgctgccacgctaagattatcctaaagttacacacatttgctgtgtaaaacgaggggttttccgcaggcaggagagcaaaatgccacgctctgttcgttgataaaaggccgcatagcggcctttttcctttctttacaatacatcaacatcttgagtattgggtaattcttacaggtattccaccttaattacttcaaattctacttcgccgcccggcgttttgatgaccacaacatcatcttcttctttgccgatcaggccacgagcaataggcgagtttacagaaatcaggttttgtttaaagtcagcttcgtcatcgccaacgatgcgataagtctgttcttcgtcagaatccagattcagcaccgttacggtagcaccaaaaataacgcgcccattgttgggcattttggtgacatcaatcacctgcgcgttcgacagcttggcttcgatgtctttaatacggccttcgcagaaaccctgctgttcacgagctgcgtggtattcggcgttttctttcaggtcgccatgctcacgcgcttccgcgatagcagcaatgatttcaggacggcgcacagatttcagaaaatccagctcttcgcgtaatttttcagcgccgcgtaaggtcatcggaatagcttgcatttgttatacctcttgaatattcctgatggggcaagtcttcacccaccccggctgttcggcctgcccggcataactcctcaccgggaccagaagcaaaaaaataccgacccgggtacaagtcccaggtcagctacaattcacattttgatagtcattttaccctgaagttcccgaagggtcatcgtttactttatagggcgttgcgccgtagtatgacggctcgattccaggttgttagcgcgagattatgcgattttccagatttatcatcggattgaccagctgtatagcgttcagtgttcaggccgcgaatgttgatgagtacgttactcaactccccgctggtgccaaccttgccctgatggtgcaaaaagtcggcgcgtcggcccccgctattgattaccacagtcagcagatggcgctgcccgccagtacgcagaaagtgattactgcgctggcggcgttgattcaactcggccccgattttcgtttcaccacgacgcttgaaaccaaaggcaatgtggaaaacggcgtacttaagggtgacttagtggcgcgatttggtgccgatccgacgttaaaacgtcaggatattcgcaatatggtcgcgactttgaaaaaatctggcgtcaaccaaatcgatggcaatgtgttgatagatacctccattttcgccagccacgataaagcccccggctggccatggaatgacatgacacaatgctttagcgctccgcctgccgctgccatagttgaccgcaactgtttctccgtctcgctctacagtgccccaaaacctggtgatatggcttttatacgcgtggcatcttattaccccgttacgatgttcagccaggtacgcaccctcccccgaggttctgccgaagcgcaatactgcgaactggatgtcgtaccaggcgacctgaaccgctttacgctgacgggatgcctgccacaacgttctgagccgctcccgttggcttttgccgtgcaggatggagccagctatgccggggcaattctgaaagatgagttaaaacaggcaggtatcacctggagcggaacactgctgcgccagactcaggttaacgaacctggaacggtagttgccagtaaacagtcggccccgttgcacgatctgcttaagattatgctgaaaaagtcggacaacatgatcgccgatacggttttccgcatgataggccatgcgcgcttcaatgtgcctggaacatggcgggccgggtcggacgccgtgcgtcagatcctgcgccagcaagccggtgtcgatattggaaacaccattattgccgatggttcagggctttcgcggcataacctgattgccccgccaccatgatgcaggtgttgcaatacattgcccaacacgacaatgaacttaactttatctccatgctgccgctggcgggctatgacggctctttgcagtaccgtgcaggtctgcatcaggcgggcgtggatggaaaagtctcagcgaaaaccggttcgttgcagggggtatataacctggcgggattcattaccacagcgagcgggcaacgaatggcgtttgtacaatatctttctggctatgcagtagaaccggcggatcagcgtaatcgccgtattccgttagtgcgttttgaaagccgtttgtataaagatatttatcagaacaattagtcaaaaagaaaccccggcacatggccggggttttgctgattaacgcttgtaaatgaactcaacgccttcttcgtcgtcttcgtcccagtcatcatcccagtcctcatcatcctcttcagcaatctcttcaagctgctggcgatgataatcatcccacatgaattcgactttctctggctgtttcgcttcttcagcctgcacgaccgggttttcaatgataaaggtcatcacatcccagcagagatctttcacgcccagtccactcgccgcagagatcagataatatttatcttcccagcccagcgcttcagcaatcgctttcgctttctcttcagcttctgccttatccagcagatcgatcttattgaacactaaccaacgcggtttcgccgccagatcctggctgtatttttccagctcgctgataataatacgcgcgttttcaaccggatcggtgccgtcaatcggatcgatatcgatgaggtgcaacaggacgcggcaacgttccaggtgcttcaggaagcggatacccagacctgcgccttccgcagcgccttcaatcagtcctggaatatcggcaacaacgaagctcttttcgttgtccattcgtaccacacccagacttggcaccagagtggtaaacggataatccgccactttcggtttagccgccgataccgcgcgaataaaggtcgatttacccgcgtttggcatccccaacataccgacgtcagccagcagcatcagctccagcagcagctcacgcttatcacccggcgtaccgttggttttctgccgtggtgtacggttaacggacgatttgaaacgggtattgcccagaccgtgccagccgcccttagcaaccagcagacgctgaccgtgtttagtcatatcgcccatggtttcaccagtaccctggtcgattacacgcgtacctaccggcactttaatcgtcacgtctttaccgcgcttaccggtacaatcgcggcttgcgccgttctgaccgcgctctgcacggaaagatttttcaaaacgataatcgataagcgtgttcaggttttcgtcggcttccatccatacgtcaccaccatcaccaccgtcgccgccatccgggccgcctttcggaatatacttttcgcggcggaagctcacgcaaccattaccgccatcacctgcaacgaccagaatcgatgcttcatcaacaaacttcattttattctccgtaaatcattcgcctgcgcggggttgcgataccaccgttgtatgcttacgtaatccgccccaaatacgatgaccaatggcggaatacatcgcgcccgcaaccacgacaaacgcaccgagataacctaaaaggtttaacatcggtctggcgaagaaatcgggccaggccagtgataaaagatctgaaaaaaacagcgtaaacagtggggtgagcgtgatgatcgcgctcacctgcgctgcctgccagcgagccatcgcttccgccagggcgccatatcctaccaatgtattcagtccgcaaaaaattaaacatgcgagctgccagtggctaagctgcgctatcactccaggctttgccagagggaagagcgcaattgtacataaagtgtacagtaaaaacaggatctgcggtgaggccagccgacgcaataaaaccttttgcgccacgccataactcacccaaaccgtcgccgcaccgaccccaaagataactccccaggtgtaatcggtgagctttgtaaatatctcgaccagactggtgttaaaaaacatcaccaggccgctcaggagcatcaatgcccctacaacctgagtgctgcgcattttctctttcaggataaatacgctggcaaccatcatgccaactggcgagagttgcccaatcacctgcgaagcggtcggactcaggtattgcaaggatgagctgaacaggatgaagttcccaaacagcccggcggtcgccactgccaacaaaatcaaccagcgtggcttacgaaacacgcgtaatggcggcaacctcttcttcaccgcaagaatggcaccaaggccaatactcgccatcaagaaacggtaaaacacgattgtcggaggttccatcacctccagcacctgcttcattgcgattggcaacgccccccagcaaattgctgtggtgagcgccaaaagaatgccaatgcctgcctgctgcttcataccgtattccctgcaaagcgcatttgcggattaacgtcgcaccatgcgcatttttaccggttatcgaatgtaaaaagccccgcaacgtgttgcggggctttcatccgttaccgggacgcgaaaaacttattcagcttcgatgctgataaatttacggtttttcgggcctttaacttcgaatttcactttaccgtctgctttagcaaacagagtgtggtcacgaccgcaacctacgttagcgccagcgtggaatttggtaccacgttgacgaacgatgatgctacccgccagaacggattcgccaccgaaacgcttaacgcccaggcgtttagcttctgaatcgcgaccgttacgtgtggagccgccagcctttttatgtgccatttgaaatctctcctcaggtcttaggcgctgatgccagtaattttcacatcagtgaaccactgacgatggccctgctgcttacgatagtgtttacgacgacgaaacttaacgattttaactttctcgccacgaccgtgagcaacaacttcagctttgattacgccgccatcaacgaaaggaacgccgattttgacttcttcaccgtttgcgatcatcagcacttcagcgaactcaacagtttcgccagttgcgatgtccagcttttccaggcgaacggtctgaccttcgcttactcggtgttgtttaccaccactttggaaaaccgcgtacatataaaactccgcttccgcgcacaccttttcaatgattcagagtgcgctataaatattcacaatagggcgcgaatattacgcaaaacgcacgcctttgacaagtgctacagtcaatacacgaagaaaaaaaacacaacttgtacggtaacgtttatctgtgccattttttcagtacaatcaccctatattcctaaccataaaccctaagttgcctttgttcacagtaaggtaatcggggcgaaaagcccggcttttgcgatgaatttagaaaaaatcaatgagttaaccgcgcaagatatggcgggtgttaatgcggcaatccttgagcagcttaattccgacgtccaactgatcaatcagttaggctattacatcgtcagcggcggcggtaaacgtattcgtccgatgattgctgtactggctgcacgagctgttggctatgagggaaatgcgcatgtcaccattgctgccctgatcgagtttatccacacggcgactctgctacacgacgacgttgtggatgaatcagatatgcgcaggggtaaagctaccgccaacgctgcatttggcaatgccgccagcgtgctggtaggcgattttatttatacccgcgcgttccagatgatgaccagcctcggttcgctcaaagtgctggaagtcatgtcagaagccgtaaacgtcatcgcagaaggtgaagttctgcaactgatgaacgttaacgatccggacatcactgaagaaaactacatgcgcgttatctatagcaaaaccgcgcgtctgtttgaggctgccgcgcagtgttccgggattctggctggctgtacgccggaagaggagaaaggcctgcaggattatgggcgctatctcggcactgctttccagttgatcgacgatttactcgattacaatgccgatggcgaacagttaggtaaaaatgtcggcgacgatctgaacgaaggtaaaccgacgctgccgctgctgcatgcgatgcatcatggcacaccagaacaggcacagatgatccgtaccgccatcgaacagggtaacggtcgccatcttctggaaccggttctggaagcaatgaacgcttgtggatctcttgaatggacgcgtcagcgtgccgaggaagaagcagacaaagccatcgcagcattacaggtgctcccggacaccccttggcgagaagcactcatcggcctcgcgcacatcgctgttcaacgcgatcgttaatcccctcccttcatcccgcgcagtgcgcgggatgattccagtaaattccataaaaacactaattcagcgctataacacctgaaaaaaagggctgtgcatctttatatattctgaatattcacactttttacaggaactttttagagcaataggccatcaggagtatagtgatgcccgacagaagaagtgttctgaatgaaagcgactaacttaaggagtgaggaaagatggaaagtaatttcattgactggcatcccgctgacatcattgcgggtttgcgcaagaagggaacgtcaatggcggcggagtctcgcagaaatggtttgagttcctcaacgctggcaaacgcattatcgcgcccatggccgaaaggagagatgattattgcgaaagccctgggaactgacccctgggttatctggccatcacgctaccatgatccgcagacccatgagtttatcgacagaacgcagttgatgcgtagctacactaaaccgaaaaaatgagtggtctggcggtagccccgcgaacggggctgccagctctcagacgattactcgcctttcacacgctcaatatttgcacctaaagcgcgcagtttgtcttcaatgcgttcgtagccacgatcgatgtgataaatacgatcaaccaccgtcgtcccttccgcaatacagccagccagcaccaggcttgctgatgcacgcagatcggttgccataacctgtgcgccagaaagtttttcaacaccgtgacaaataacggtattgctttcgatttcggcatgcgcgcccatacggctaagctccggcacatgcataaagcggttttcaaagaccgtttcggtgatgaatccggtcccttctgccaccaggttcaacagcgtgaactgggcctgcatatcggtcgggaatgccggatgcggcgcggtacgtacgttaacagccttcggacgtttgccatgcatatccaggctaatccagtcttcgccgacttcgatgtccgctccagcgtcacgcagtttcgccagcacggcgtcgagagtatctggctgcgcgttacggcagataattttgccgcgagaaatcgccgccgccaccaggaaagtaccggtttcgatacgatccggtagcacgcgatagacaccgccgcctaaacgttccacaccttcgatgacgatacgatcggtgccctgaccgctaattttcgcacccagcgtaatcaggaagttcgcggtatcgacgatttccggttcacgcgctgcgttttcaataatcgtggtaccttccgccagggttgcagcacacatgatggtcaccgttgcgccaacgctgactttatccatcacgatatgtgcgcctttcagacgaccatcgacggaagctttaacgtaaccttcttccagtttgatggtcgcgcctaattgttcgaggccagaaatgtgtagatcaaccggacgcgcaccgatcgtacaaccgccaggcagtgaaacttgcccctgaccaaagcgcgctaccagcggccccagtgcccagatagaagcacgcatggttttaaccagatcgtaaggtgcgcagaatacattaacgtcgcgggcatcaatatgcacagaaccattacgttctactttcgcacccagctggcttagcagcttcattgatgtatcgacgtctttcagtttcgggacgttctggatctctaccggttcttccgccagtagagcggcaaaaaggataggcagagcagcatttttagcgccggaaattgtgacttcgccctggagcttcgttggcccctgaacacgaaatttatccatttagtttgttctcagttaacaattcatatccgctaccggcgaatcgcccatagctcaaaagccgttcagtttgcgatcgcgcgcccactccgcaggggtatacgctttgatcgacacagcatgaatgcggttatccgcaatatattccatcagcgggccatagaccgtctgctgttttttaacccgactcatgccgtcaaacaactcacccacggcaataacctgaaagtggctgccatcgccggaaacgtggacttcctggagggagagagcgttcatcaacacgctctgaatttcattattttccatgggatcttcaatcatcagttaataaaccagcgaaacatcttagagcaaagttgcgctggcataaataagcaaaaagcctcgctgataaatcagacaaggctcgacttgcaggcaggtttgccggacaggcggttaacgccatatccggcctgaaaaaatttaacgaggcagaacatcagcaggcaaattatacaatttcgcgagggtatacactttgtcgtttaccccctgaagcgtcacgttgttgccctgctttttcgccagatcgataagatggagcagcagtgccagtccacccgtatccacgcgggacacacggctaagatcgatgcaggtaatccccttcaccgcttcctcacgcatttcccaaagcggtagcagaacgtcctgatccagctctccggataacgccagcgtgtcacccgtctgcatccagctcagtgactcgctcattattttttctcttccagagtgattttctgttgagaaatcgatttcagttgcgcagtcaggccgtcgatacctttggtacgcagcagcgttccccactcgttttgtttggtggtgatcatactgacgccttcagcaatcatgtcgtaagcctgccagttgcccgtctgggagtttttacgccactggaagtccagacgcaccggcggacggccattcgggtcaataatggtaacgcgaataggcacaatggttttatcgcccagcggctgttctggcgcaatctgataggtttgaccgtgatacatcgccagcgcctgaccgtaagcctgcttcaggtactcacggaaagcggcaaagtaggcttcacgttgagcaggggtcgcactcttgtaatactggcccagcaccagcgcaccggcgtatttcacctgtacgtatggcagcagttcctgatcaacaatggtacgcagataatccgggttggcccgaatttgcggttgctcattcttcaggcgatcgaacgttttctgcgccgcctcgtccatcagcttatacggattggtctggtctgccgcggttgccgcactcagaggtgcaatcaccagcaaagcgaccatcattaaacgtttaaacatgcgtcggttctcctgaaattatttcgttgtacccacaggttcagtggtttcattattacctggcgcagcagctggcgcatcgccactattcttattgtcatcgcctttactaccgtaaaggaactgaccaatgagatcttccagcaccatcgcagacttagtgtcctgaattgtatcgccatccttcaggatagcagtccccagttccgggtcttcaaaaccgacgtttaatgccagatattgttcccccagcaggccggaagtacgaatgctcagcgaactggtatctggaatgtggttataacgttgttcaatttccagcgttacgcgcggcagataggttttcgggtccagcgtaatatccgccacccgacccacaacaacgccaccaatactgaccggagagcgcgctttcaggccgccaatgttatcgaacgtcgcataaagcgtgtaggtcggttcagtacgtatggacgtcacgttcgccgccttcaggcaaacaaacagcgccgccagcagtgctgctaataaaaagatacccacccaaatttcatttttttcgtttgcatgaactcaattcccaaacatcaatgcggtcagcacaaaatccagccccagaacagccagagacgagtggacaacggtgcgagtggttgcccggctaatcccggcagacgtcgggatggcgtcgtagccgttaaacaacgaaatccacgtcaccgtgatggcgaacaccacgctcttaatcagacagttgaccagatccatacgccagtcgacggcattttgcattgccgaccagaagaacccgctatcaatgcctttccaactgacgccgaccagagatccgccccagatccccacggcgacgaaaataaccgtcaacagtggtaatgaaataaccccagcccagaaacggggagaaataacccgacgcagcggatccaccgccatcatctccatactggagagttgctctgtagcgcgcatcaggccgatttctgcggttagcgccgaaccagcacgcccggcaaacaacaacgcggcaaccaccggccccagttcacgcagtagcgataacgccaccagcatacccagactggtttccgcactataagtggtcagaaccagataaccttgcagccccaacaccattccgatgaacacgccagaaaccacaataatcagcatcgacaggacgccgacattatagagctggcgcaccagcagcggcgcatgtttgcgaaattccggtttgccgaccagcgcattgaataacattaacccggcccgcccgaacgttctcagggttttaatccctttatgtccgagcgacgccagcgcatttaacagcatgagtggcttaactccctggtaaaagatcagcgtgataatcgccggcaggatagcggaacggaacaggcccgtcagctatcccgtccagaaactgacgtacgcgcggatcaggattcgcctgcaacgcctgggcactgccatgagcgacaattttttgtccgctaggatccaggcgtgatccgcaatacttaacacttccggcacatcgtgagaaaccaccacacaagtcacgcccagcgcgctgttcagctcagaaatcagcttcaccagtacgcccatggtgatgggatcttgcccaacaaaaggttcatcaaacatgatgagatccggctccagcgcaatcgcacgcgccagcgctgcacgccgcgccatcccaccggaaagttcagaaggcattagtttagccgctccacgcagccccacggcctccagcttcatcatcaccgtactatgcaacaatggcgcgggaagttgggtatgttcgcgcagtggataggcgacgttgtcaaatacgttcatatcagtgaacaacgccccggactgaaataacatgctcatccgtttgcgcactgtatacaggcgcgaacgagacatcgccggaatattctcaccatcgaaaaggatctcaccatgatctggtgcgatttgcccgccaatcagacggagtagcgtcgttttaccgatgcccgatggccccatgatcgccgtgatcttccctcgcggcacggtcagggaaatattatcgaagatgcagcgattgccacgcgtaaaactgacatcgcgcatatcgactaaattcgccacagactgctccataattcacccttcgtcttgcgttgattttctaagcatggcgctcaatttaaccttgaacccaacatatttacagaatattacccgccgtggttagcgaaagctggcatttgttttactttttagccgcataaagtcaaaattaagaatccgttacggctttctgaaaatcttcagcggaccggcgagtatacctgaagaaaggacgttagatgcttttagctacggcactgttaattgttggtttacttttggtcgtttacagtgccgaccgcctggtttttgccgcgtctattctttgccgaacctttggcatcccgccgctgatcatcggcatgacggtggtcagtattggtacatcgttaccagaaatcatcgtctcgcttgccgcgtctctgcacgaacaacgcgatttagccgttggtacagccctcggctcaaacattatcaatatattgctgatcctcggtctggctgcgctggttcgtccttttaccgtccattctgatgttctacgccgtgaattacccttaatgttgttgttcagcgtggtggccggttccgtactctatgacggacaacttagtcgaagcgatggtatctttctcctctttctggctgtgctatggctgctgttcattgttaaacttgcacgtcaggctgaacgtcaggggactgacagcctgaccagagagcagcttgcagagctgccgcgtgacggcggattgcccgtcgcgtttttatggctcggcattgcgcttatcatcatgccagtggccacgcgatggtggttgataacgccacggtgctggcgaattactttgccatcagcgagttgacgatgggtctgacggcaattgctatcggaaccagcctgccggaactggcaaccgcaatagcgggggttcgcaaaggtgaaaacgacattgctgtcggaaatatcattggcgcaaacatttttaatattgtcatcgtgttgggtttacccgcgctgataacgccaggagagattgatccactggcgtacagtcgtgactacagcgtgatgttgctggtgagcattatttttgcgttgctgtgctggcggcgctccccgcaaccgggccgtggtgtaggggtattattaactggcggatttatcgtatggctggcgatgttgtactggttatcgccaatactcgttgaataactggaaacgcattatgtcgcacgtagagttacaaccgggttttgactttcagcaagcaggtaaagaagtcctggcgattgaacgtgaatgcctggcggagcttgatcaatacatcaatcagaatttcacgcttgcttgtgaaaagatgttctggtgtaaagggaaagttgtcgtcatggggatggggaaatcggggcacatcgggcgcaaaatggcggcaacgtttgccagcaccggtacaccttcatttttcgtccatcctggtgaagccgcgcatggtgatttaggcatggttaccccacaggatgtggtgattgctatctctaactcaggtgaatccagcgaaatcacggccttaattccagtgcttaagcgtcttcacgtaccgttaatctgcatcaccggtcgcccggagagcagcatggcgcgcgccgcagatgtgcatctgtgtgttaaagtagcgaaagaagcctgtccgttagggctggcaccgaccagcagcaccaccgccacgctggttatgggcgatgccctcgctgtcgcgctgttaaaagcacgcggctttactgctgaagattttgcgctctcacacccaggcggcgcactgggtcgtaaacttctgctgcgcgtaaacgatattatgcatacgggcgatgagatcccgcatgttaagaaaacggccagtctgcgtgacgcattgctggaagttacccgcaaaaatcttggtatgactgtcatttgcgatgacaatatgatgattgaaggcatctttaccgacggtgatttacgccgtgtcttcgatatgggcgtggatgttcgtcagttaagtattgccgatgtgatgacgccggggggaatacgtgtgcgccctggcattctggccgttgaggcactgaacttaatgcagtcccgccatatcacctccgtgatggttgccgatggcgaccatttactcggtgtgttacatatgcatgatttactgcgtgcaggcgtagtgtaaagattcaaggataaacaacaatgagcaaagcaggtgcgtcgcttgcgacctgttacggccctgtcagcgccgacgttatggcaaaagcagagaacattcgtctgctgatcctcgacgttgatggcgtactgtcagatggcctgatttatatgggcaataacggcgaagagctgaaagcgttcaatgttcgtgacggttatggcattcgttgtgcgctcacctctgatattgaagtcgctatcattaccgggcgaaaggctaaactggtagaagatcgttgtgccacattggggatcactcacttgtatcaggggcagtcaaacaaactgatcgcctttagcgatttgctggaaaaactggcgattgccccggaaaatgtggcttatgtcggcgatgatctcatcgactggccggtaatggaaaaagtgggtttaagcgtcgccgtggccgatgcgcatccactgttgatcccgcgcgccgattacgtgacgcgcattgctggcggtcgtggcgcagtgcgcgaagtttgcgacttattactcctggcgcagggcaaactggatgaagccaaagggcaatcgatatgagtaaagccagacgttgggttatcattgtgctatcactggcggttctggtgatgatcggcattaatatggccgaaaaagacgataccgcccaggtggtcgtcaacaacaatgatcccacctataaaagcgagcatacggacacgctcgtctataacccagaaggggcactaagctatcgattgattgctcaacacgttgaatattattccgatcaggccgtttcgtggtttacgcagccggtacttaccacgtttgataaggataaaatcccgacatggtccgtaaaagcagataaagccaagctgaccaatgaccggatgctctatttatatggacacgttgaagtcaacgcacttgtgccagactctcaacttcgcagaatcacgacggataacgcgcagatcaatctggtgacgcaggatgttacctctgaagacctcgtcacgttatacggaacaacatttaactccagcggtctgaaaatgcgcggcaacttacgcagcaagaacgccgagctgattgaaaaggttagaacatcctatgaaattcaaaacaaacaaactcagccttaatcttgtgcttgccagctcacttctggccgccagcattccggcatttgcagtaaccggagacactgatcagccgatccacattgaatcggaccagcaatctcttgatatgcaaggcaacgtggttacctttaccggtaatgtcatcgtcacccagggcaccatcaaaattaatgccgacaaagtggtcgttacccgtccgggcggcgaacaaggtaaagaagtgattgacggctacggtaaaccggcaacgttctaccagatgcaggacaacggtaaacccgttgaaggtcacgcttcccagatgcactacgaactggcaaaagattttgtcgttctgacgggtaatgcttatctgcagcaggtcgatagcaacattaagggcgataagatcacttacctggtgaaagagcagaaaatgcaggctttcagcgacaaaggcaagcgcgtaaccaccgttctggtgccgtcgcagctgcaggataaaaacaacaaaggccagaccccggcacagaagaagggtaattaattcgttatggcaacattaactgcaaagaaccttgcaaaagcctataaaggccgtcgcgtggtagaagacgtcagcctgaccgtcaactccggggaaattgtcggtctgctggggccaaacggtgccggtaagaccaccactttctatatggttgtaggcattgtgccgcgcgatgcgggcaacatcattattgatgatgacgatatcagtctgctgcctctgcatgcacgcgcgcgccgcggtatcggctatctgccacaggaagcctccattttccgtcgcctcagcgtttacgataacctgatggcggtactgcaaattcgtgacgacttgtctgctgaacaacgtgaagaccgcgcgaacgagctgatggaagagtttcacattgagcacctgcgtgacagcatggggcagtcactctccgggggtgaacgtcgccgtgtagaaattgcccgcgcactggctgcgaatccgaaatttattctgctcgacgaaccgtttgccggtgttgacccgatctcggttatcgacattaaacgcatcattgagcacctgcgcgacagcggcctgggcgtgctgatcactgaccacaacgtgcgtgaaacactggcggtttgtgaacgcgcttatatcgtcagtcaggggcatttgatcgcccacggcacgcctacagaaatcttacaagacgaacacgttaagcgtgtataccttggggaagacttcagactctgatagggtagaagtttgcaacgttttagcaggagagtacgattctgaacatgaagcaaggtttgcaactcaggcttagccaacaactggcgatgacgccacagctccaacaggcaattcgtctgttgcagttgtcgacgctggaacttcagcaggagctacagcaggcgctggagagtaatccgctgcttgagcaaatcgacactcatgaagaaatcgacacccgcgaaacgcaagacagtgaaacgctggacaccgccgacgcgctcgaacaaaaagagatgccggaagagctgccgctcgatgccagttgggacaccatttacaccgctggtacaccatccggcaccagcggtgactacattgacgatgagctgccggtctatcagggcgaaacgacgcagaccttgcaggattacctgatgtggcaggtcgagctgacaccgttttccgacactgaccgcgctattgctacctctatcgtcgatgccgttgatgacaccggttatctgactgtcccgctggaagatattctcgaaagtatgggcgatgaagagatcgacatcgacgaggttgaagccgtccttaagcggatccaacggtttgatccggtcggtgtagcggcaaaagatctgcgtgactgcctgctaatccaactctcccaattcgataaaaccacgccgtggctggaagaggccagattgatcattagcgatcatctcgatctgttagccaatcacgacttccgcactttaatgcgcgtcacgcgtctgaaagaagatgtgctgaaagaagccgtcaatctgatccagtcgctcgatccgcgccccgggcagtcgatccagactggcgaacctgagtatgtcattccagatgtgctggtgcgtaagcataacggtcactggacagtagaactcaacagtgacagcattccgcgtctgcaaatcaaccagcactacgcctcgatgtgcaataacgctcgcaatgatggtgacagccagtttatccgcagcaatctgcaggatgccaaatggttgatcaagagtctggaaagccgtaacgatacgctactgcgcgtgagtcgctgtatcgttgaacagcagcaagccttctttgagcaaggcgaagaatatatgaaaccgatggtactggccgatatcgcccaggctgtcgaaatgcatgaatcgacgatatctcgcgtgaccacgcaaaaatacctgcatagtccacgaggcatttttgaactgaagtatttcttttccagtcacgtcaataccgagggcggcggcgaagcttcctccacggcgattcgtgcgctggtgaagaaattaatcgcggcggaaaacccagcgaaaccgttgagcgacagcaagttaacctctttgctgtcggaacaaggtatcatggtggcacgccgcactgttgcgaagtaccgagagtctttatccattccgccgtcaaaccagcgtaaacagctcgtttgacccaaccgataaggaagacactatgcagctcaacattaccggaaataacgtcgagatcaccgaggcactgcgcgaatttgttacagccaaatttgccaaacttgagcaatattttgaccgaatcaaccaggtctatgttgttctgaaagtggagaaagtcacccacacctcagatgcaacactgcatgtaaacggtggtgaaattcatgccagcgcggaaggtcaggacatgtacgctgccattgatggcttaattgataagctggcacgccagttgaccaaacataaagataaactgaaacaacactaattgtccgggcaattagcatgtgcatggcggcctgttgtgcggcacaacgggccatttgtacggttaatgctccgagcctgttccactgtttgagtgggcaggttcttaggtgaaattatgacaaataatgatacaactctacagcttagcagtgttcttaacagggaatgtacgcgaagccgcgtccactgtcagagcaaaaaacgcgccctggaaatcatcagcgagctggcggcgaaacaacttagcctgccgcctcaggtggtttttgaagctatcctgacgcgggaaaaaatgggcagtaccggtatcggcaatggtattgcaattccgcatggcaaactggaagaagatactctgcgtgccgttggcgttttcgttcagctcgaaacgcctatagctttcgatgccatcgacaaccaaccggtggacttactttttgccctgctggtgccggcagaccaaactaaaacgcacctgcatactctgtcgctggtggcgaaacgtctggcggacaaaaccatctgccgccgtttacgcgcagcccagagcgatgaagagctgtatcaaatcattacggataccgaaggtactccggatgaagcgtagttattcggtaatgtctcttttagacgttgtgaggagaaacagtacatggtactgatgatcgtcagcggacgttcaggttcaggtaaatctgtcgccctgcgtgcgctggaagatatgggtttttactgcgtggataaccttcccgtagtgttgttacccgatctggctcgaaccctggccgatcgcgagatttctgccgccgtcagcattgatgttcgtaatatgccggagtcaccagaaatattcgaacaggcgatgagtaacctgcctgacgctttctcaccgcaactactgttcctggatgccgaccgtaataccttaattcgtcgttacagtgacacgcgccgactgcatccgctttccagcaaaaacctgtcgctggaaagtgctatcgacaaagaaagcgatttgctggagcctctgcgttcgcgagcggatctgattgtcgatacctcagaaatgtccgttcacgagctggctgaaatgctgcgtacccgtctgctgggtaaacgtgaacgcgaactgaccatggtctttgagtctttcggcttcaaacacggtatccctatcgatgcagattacgtctttgacgtgcgcttcttgccgaacccgcactgggatccgaaactgcgtccaatgacaggtcttgataaacctgtcgccgcgttcctcgaccgccacacagaagtacacaattttatctaccagacgcgaagctatcttgaactatggttacctatgctggaaaccaacaaccgtagctacttgacggtcgccattggttgtaccggcgggaagcaccgttcggtgtatattgcagagcaactggcagactacttccgctcgcgcggtaaaaacgtccagtcacgccatcgtacgctggaaaaacgtaaaccatgaccgtcaagcaaactgttgaaatcacaaacaagctgggcatgcatgcccggcctgcaatgaagctgtttgaattaatgcagggttttgacgctgaagtgctgttacgtaatgacgaaggcaccgaggccgaagccaacagcgttattgcgctgctgatgttggattctgccaaaggacggcagattgaagttgaagcgaccggcccacaggaagaggaagcactggccgccgttatcgccctctttaactctggttttgatgaagattaatcttcatcactttgacattcaaatcccttcaagctcccccgacaataagaaaagcgcgtactgaaatcgttctcaatcaacgtcatttgtacattttgtgcgcttttcactttcagaagaaccttaagaaaaccttaagaggcattgtttaggttttgtttaagttaatcgaccatactggagatcgtcagaaaatatttccaggagatggcatgattcgcttatctgaacaaaatcccctgggcaccggaagacatcggaaatgttatgcgcatccggaagatgcccaacgctgtatcaagattgtctaccatcgtggcgatggtggcgataaagagatccgccgtgagttaaagtactacgcgcatcttggtcgccggttaaaagactggagtggaataccgcgctatcacggtaccgttgagacggattgcggaaccggttatgtctacgatgtgattgcagattttgacggcaaaccctccattacgctgaccgaatttgctgagcaatgccgttacgaagaagacattgcacaactgcgccagctactgaaacagctgaagcgttatttgcaggataaccgtatcgtgacgatgtcgctgaagccgcagaatatcctctgtcaccgcatcagtgagtcagaggttatcccggtcgtctgcgacaacattggtgaaagcacattgattccactggcgacctggtcgaagtggtgttgtctgcgtaagcaagagcggttatggaaacgatttatcgcccaaccggcgctggctattgccctgcagaaagatctgcaacctcgtgagagcaaaacgctggccctcacttcgcgcgaagcttaatccagctggtgttgttgcataaacggctcaccgcctaactgatacatctgccgtaaaatccacgcctgacggctacgcacgtagcccgatggcgaggagactttgaaacgaagtggattaggtaatacagctgccagtaatgcagcttccgaccgggtaagtttgctcgcgggtttgtggaaataacgttgtgccgcagcttcgacgccaaacacaccgtcgccaaattcggcgatattcaggtaaaccgtcaggatacgctttttgctccagactgtttctatccccagcgttaatccagcttccagcccttttcgtacccagctacgcccatcccataaaaagagatttttggccgtctgctgagaaatcgttgaagcaccgcgaatacggttttcattgcgctcgttgtgcgccagggctttctcaatggaagcgacatcaaagccccagtgctcaggaaatttctgatcttctgcggcaatcaccgccagtcccatccacggcgagatttgatccatactgacccagtcagaatgtgccacgtaacgaaaattgccatacagccaggcgctgacctgtcgctcgaccattaccgctgagaagggaacaggcgcaacactaaacaacgcgatgcccccgccccagaaaacggcgaggacaaccattaaccgcaaaagaaaacggcgaacgaaactaaacaccgttaagcggcttttactcattcagccagaaccagcacgcgggaaaccagcttatcaatgccgctcgccgcttctgcaatgttctgcgccagcatatatgctggggtggtgacaatcttattgtcttcatcaaccacgatatcatcgacaggacagggcacatgctccgcgcccatctcttccagcacttctgcggtatcgatatcagtaccgatggtcaaacgcagcgggaaatcgaaaattttcggcagcatcgctggggcaatacacataaaaccaagcggttttccggcctgatgcatcgcttgtgccagcgcctttaattcacggtcaacggtgcattcgctaccaagagtggcaaaattgcttaaattcttcgccgcgccaaacccccccggcacaatcaacgcatccagttcagcggcatcggcctgggccagaggacggatttcaccgcgcgttattcgtgccgcttcaatcagcacgttgcgcgtttccgtcatcgcttcgccagttaaatggttgataacatcaacctgctgcttatccggtgcaaagcagaccgcctgcgcaccgctgcgtgaaatagctaacaacgtcaacaccgcttcatgaatttcagaaccgtcatagacgccgcatccgctcagaattacgccaattttcttcattgtgatcatcctttcgcaattgactgaaacacattaatttttttaataaaaatggtacgcatcacacatttaactgattcatgtaacaaatcatttaagttttgctatcttaactgcgtgcggcctgaaaaacagtgctgtgcccttgtaactcatcataataatttacggcgcagccaagatttccctggtgttggcgcagtattcgcgcaccccggtctagccggggtcattttttagtggcttttgccacccacgctttcagcacttctacgtcgtgacgccactcttctttcatctcttcaatccattcaccgacgttatcttcccaggcaggaaggtccggagactgaatttgctgacccagctgttgcagatggcgtaaccccactgaccccgccgcacctttaattttatgtccttcctctacaatgccttttttatcctgcgccgtcagattcgactccagcacgctgacatagcccggcatcatcttctcaaacaccgctaacccgtcggtgatcagcttcggtcctacaagttcgagatactgttccagcatgggaatatcgagcaatgcttctgatttactgttctcttctgtcgtcaccgtactctcctcatcatcctgggtatcccagaatttcttgatcatcgcggttagcgccggaaccgaaagcggcttactcagcacatcatccattccagcattgaggtactcttgtttgtctttcagcacgttagcggttaaggccaccagcggcggtaaatcctcgcgcggataacgcttcgtcagttcacgagagatatccagcccggtcatatctggcaactgaatatccagcaacaccaggtcgtattcgcccggtttaaacatctccagcgccgccttgccggtcatggcgacatcaacgctgttacctaatttttccagcacagaacgcgcaacaatcacgttcagttcaatgtcttccaccagcagcacattcagcgccggtaaaggcatatcgtcttcatcaaacgcatcatcgacctcttctgctaccgacggtgcgtggatcgtcaacgtaaaggttgaacctttgccctgttcgctggtaaccgtaatatcgccgcccatatttttcgccagacgacgagaaacggccagaccaataccggtgccggtggcaggtttaccgccatgactgtctttcacctggtaatacatggcgaaaattttatccagctcatcctgcggaatgccgataccagagtcttccacttcaaaatgcagcatatcgccttcatcgtagcgcacgcgcacggtaacctggccttgctgggtgaatttgacggcgttactgatgaggttccacaggatctgccgtaaacgcgtcccgtcggtaatgacctgatgcggtaatggcagcgtcggctccaggttaaagcgcaatcctttttgttgcgcctgcaatgcggagagattttccagatcggcaaggaagctggtgaaatcaaccggttgattatcaagctggaccttgcgccgttccatcttatccatgtcgataatatcgttaaagatattccccagcgtgacggccgaaacatggatggtcttgagatatttttcctgctcggcggtgagttcggtatccagcagaatacggctcaggccgacgataccgttcagcggtgtacgcaattcgtgactgatggtggagataaacgtcgttttgtcgcggctggcccgttcaagcgcatcctgataccgcttacgctcggtaatgtcgcgaccaaagcccatcaaaccgtgacgtttacccacgcggtcgtagtacggcactttacggatttcaaagcaggctttgcgcccgtccgggtaatccagccactgttcataggtcagtgacacattatgacggaacactttttcatcggtttcaatgacttttgcggcggcttccggtgagtaaacatcagcaggtttcaggtgaaccagttgtttttcgctttttccggtcagcagctccatcgcgcggttacagccggaaaactctttatcttcgttacgataaaaaaccaggtcgggtgaagcatcaaggaaggaacgtaagaatgaggattgctgctcgagctgaatttgtgtctcttcgcgctctttgatttcaattttcagttggccgaaggtttcctgcagttctgcttccgctttttcacgaacggcgatttcctgatttagctgggcaatattatcttttaactgaacgttgaggctcaaatcgcgctcgcgcatctcctccagtttttgcaccagccgtgacagacgttgtcgtgactcctccagttgctcgacgaccaccgatagaaagtagaccgcccacggcgtaatcagcaaaccaaagaagatagaacgaataacatcaatgctttcgacctgaccatgcagcaccatggttaccgccatttgtaccacaatggcaagaacgacgagggccagcgccagcaacattgagaagcgcaccagacctaacttcatcatcaggtcaacataatactgcgccagcagacgaatttgcttcattagggaattccttcacgacaacctgccccaataatacccaattctgacagttacgttataaattgtgtgagaaatgcggaattcccctcaacgacctactccgttggaggtatccacggacgttccagcgccgatccctgtacgccatgttcattcagatagcgatccagctcgaccattcccgtccatcgattttcgcaccacagaggagcaagcagcgtcgggcgacgggcgctggcggaaatgcggtggtagatcacttccggtggcgtatggcgaatcatttctccggcagtgagcgtgtaatcctccagttcaataccgttcaaacgccccgcttcccaggctttcgccataatgctgcctttcacaatatgcagcggatgcagctttatgccgtccacgccggtttcaaccactcgctccagcgtttgcaaacattcagcctgcccttcgccaggcaggccgacaattaagtgggaacacaccttcagcccgcgctgacgtgccagctgggttgtacgctgataacaggcaaaatcatggccgcggttgatgcgatgcagtgttttgtcgtgggcggtttgtagccccagctccagccacacttcgtaaccctggtccttatattcgcaaagcagatccagcaccgcatccggcacgcagtccgggcgggtaccaacacacaaaccgacaatattggcctggctcaccgcctgctgatacatagaacgcagcacctgaacttccgcaaaggtgctggtatacgcctgaaagtaggccagatagcgtttagcgcggttaactaaattcgcctggtgcgccagttgctcggcaatggaacgatgctgctgcgcttcatcggcaaacgaggcaacattacagaatgtgcagccaccacgcccgatggtaccgtcacggttagggcagctaaaaccgccgtgtagcgtcagcttatgcaccttttgcccataacgacgggtgagatcaccaccaaacatattgactaatttctgtaactgcataatctgatagaccgcgccttgaaaagaggccaaagcctgccatttttagctcaattcggcgatgacctggatcaatcgtcccggcctgcttttatcaactgcataatcaatcaaaattaccgaaatttcatgcataatcacataaatcacttttgcttatcttgtgtcagatttttttatctccttatggattttaggcaaaaacagtagcatgaaacgtcattaccaattaaggcagtataaaatgctggttttctcgtcagttcaaggcaggataagggttaacacgcctttatgacagtcaggaattgactgtttctctaacgacttcccttttagccttaaagataaaatccattttaatttcagtaatttaataaagaattttgcgctaaagcacatttctgtaccaataagcttgccatttgacctgtatcagctttcccgataagttggaaatccgctggaagctttctggatgagcagcctgctcatcatatttatgcagtaattgagatcccctcttcaccgtattaaccgatgcgaaaaggacaacaagggggcgaatgcgaggcgcgcgtatgacacgcaaaccccgtcgccacgctctttctgtgcccgtgcgcagcggttcggaagtggggttcccgcagagcctgggggaggttcacgatatgttgtacgataaatcccttgagagggataactgtggtttcggcctgatcgcccacatagaaggcgaacctagccacaaggtagtgcgtactgcaatacacgcactggcccgcatgcagcaccgtggcgcgattctcgccgatggtaaaaccggcgacggttgcggcttgctgttacaaaaaccggatcgcttttttcgcatcgttgcgcaggagcgcggctggcgtttagcaaaaaactacgctgtcgggatgctcttcctgaataaagatcctgaactcgccgctgccgcacgccgcatcgttgaagaagagctgcaacgcgaaaccttgtcgattgtgggctggcgtgatgtccccactaacgaaggcgtgctgggtgaaatcgccctctcctctctgccccacattgagcaaattttcgttaacgctccggcaggctggcgtccgcgcgatatggagcgccgtctgtttatcgcccgccgccgcattgaaaagcgtctcgaagccgacaaagacttctacgtctgtagcctgtcgaatctggtgaacatctataaaggtctgtgtatgccggcggatctgccgcgcttttatctggatcttgcggacctgcgtctggaatcggccatctgcctgttccaccagcgcttctccactaacaccgtaccgcgctggccgctggcgcagccgttccgctacctggcgcataacggtgaaatcaacaccatcaccggtaaccgccaatgggcgcgtgcgcgtacctataaattccagacgccgctgatccctgatctgcacgacgccgcaccgttcgtcaacgaaaccggttctgactccagttcgatggataacatgctggaactgctgctggcaggcgggatggatatcatccgcgccatgcgtctattagtaccacccgcctggcagaacaacccggatatggacccggaactgcgtgccttctttgactttaactccatgcatatggagccgtgggatggcccggcgggcatcgtgatgtccgatggtcgcttcgctgcctgtaacctcgaccgtaacggtctgcgtccggcacgctacgtcattaccaaagacaagctcatcacctgcgcctctgaagtcggtatctgggattatcagcctgacgaagtggtcgaaaaaggccgcgtcgggccaggcgaactgatggtgatcgacacccgcagtgggcgtattctgcactcggcagaaaccgatgacgatctgaaaagccgccatccatataaagagtggatggagaaaaacgtccgccgactggtaccgtttgaagatctgcccgatgaagaagtgggtagccgcgaactggacgacgacacgcttgccagctaccagaaacagtttaactacagcgcggaagagctggactccgtaattcgcgtactgggcgaaaacggtcaggaagcggtcggttcgatgggcgatgataccccattcgccgtgctctccagtcagccgcgcattatttacgactacttccgccagcagtttgcccaggtgactaacccgccaatcgacccgctgcgtgaagcgcatgttatgtcgctcgccaccagtatcggtcgtgaaatgaacgtcttttgcgaagcagagggccaggcgcaccgtttaagctttaaatcgccgattctgctctactccgatttcaaacagctcacgacgatgaaagaggagcactaccgcgcagatacgctggatatcacctttgacgtcactaaaaccacgctcgaagcgacagtcaaagagctgtgcgacaaagccgaaaaaatggtacgtagcggcaccgtgctgctggtgctctccgaccggaatatcgctaaagatcgcctgccggttccagccccgatggcggttggcgcgatccagacccgtctggtcgatcaaagcctgcgttgcgatgccaacatcatcgtcgaaaccgccagcgcccgcgatccgcaccacttcgccgtgttgctgggcttcggcgcgacggctatttatccataccttgcctatgaaacgctgggccgcctggtagacacccatgcgattgccaaagattatcgtaccgtgatgctcaactaccgtaacggcatcaacaaaggcttgtacaaaatcatgtccaaaatgggcatctccaccatcgcctcttaccgctgctcgaaactgtttgaagcggtcggtctgcacgatgatgtagtgggcctgtgcttccagggggcggtcagccgcattggtggggcgagctttgaagacttccagcaggatctgctgaacctgtcgaaacgtgcctggctggcgcgtaagcccatcagccagggcggcctgctgaaatacgtccacggcggcgaataccacgcttacaacccggacgtggtgcgcacgctgcaacaggcggtacaaagcggcgagtacagcgactatcaggaatacgcgaagctggttaatgagcgtccggcaaccacgctgcgcgatctgctggcaattacgccgggtgaaaacgcggtcaacattgctgatgttgaaccggcaagcgaactgtttaaacgctttgataccgccgcgatgtctatcggcgcgttaagcccggaagcccacgaggcgctggcggaagcgatgaatagcatcggcggtaactcgaactccggtgaaggcggcgaagacccggcgcgctatggcactaacaaagtgtcgcgcatcaagcaggtggcttctggtcgcttcggcgttactccggcgtatctggtcaatgccgacgtcattcagattaaagtcgcccagggcgcgaagccgggcgaaggcggtcagttgccgggcgacaaagtcactccttacatcgccaaactgcgctattcggtgcccggagtgacgctgatctccccgccgccgcaccacgatatctactctatcgaggacttagcgcagctcattttcgacctcaagcaggttaacccgaaagcgatgatctccgtgaagctggtttccgaaccgggcgtaggcaccatcgcgactggcgtggcaaaagcttatgccgatttaatcaccatcgcaggctatgacggtggcaccggcgcaagcccgctgtcgtcagtgaaatacgcaggttgcccgtgggagctgggcttgttgaaacccagcaggcgctggttgccaatggtctgcgtcataagatccgtttgcaggtcgatggcggcctgaaaaccggtgttgatatcatcaaagcggcgattctcggcgcagaaagcttcggcttcggcactggcccgatggtggcgctcggctgtaaatatctacgtatttgccatctgaacaactgcgcaacgggtgtagcaactcaggatgacaaactgcgtaagaaccactatcacggcctgccgttcaaggttaccaattactttgaatttattgcccgtgaaacccgcgagctgatggcacagctgggcgtaacgcgtctggtggatctgattggtcgcaccgacctgctgaaagaactggacggtttcaccgccaaacagcaaaaactggcgctgtcgaagctgctggagaccgccgaaccgcatccaggtaaggcactctactgcaccgaaaacaacccaccgtttgataacggcctgctgaacgcgcagttgctgcaacaggcgaaaccgtttgtcgatgaacgccagagcaaaaccttctggttcgatattcgcaacaccgaccgttctgtcggcgcgtcgctttcaggctatatcgcccagacgcacggcgatcaggggctggcagccgatcctatcaaagcgtacttcaacggcaccgcaggccagagtttcggtgtgtggaacgcgggcggcgtggaactgtacctgaccggggatgccaacgactatgtcggtaaaggcatggcgggcggcttaatcgccattcgtcctccggttggttccgccttccgcagccatgaagcaagtattatcggcaacacctgcctgtatggcgcgaccggtggtcgtctgtatgccgcaggccgcgcgggtgaacgtttcggcgtgcggaactccggtgctatcaccgtggtagaaggcattggcgacaacggctgtgaatatatgacgggcggtattgtctgtattctgggtaaaaccggcgttaacttcggtgcgggcatgaccggcggcttcgcttacgttctcgatgaaagcggtgatttccgcaaacgcgttaacccggaactggtcgaggtcttaagcgttgacgatctggcgatccatgaagagcatctgcgcggtcttatcaccgagcatgttcagcatactggctctcagcgcggtgaagagattctggcgaactggtcaaccttcgccactaaatttgcgctggttaaaccgaagtccagtgatgtaaaagcactgctgggtcatcgtagtcgtagcgcagcagagttgcgcgtgcaggcgcagtaaggggtagcaacaatgagtcagaatgtttatcaatttatcgacctgcagcgcgttgatccgccaaagaaaccgctgaagatccgcaaaattgagtttgttgaaatttacgagccgttttccgaaggccaggccaaagcgcaggctgaccgctgcctgtcgtgcggcaacccatactgcgagtggaaatgtccggtacacaactacatcccgaactggctgaagctcgccaacgaggggcgtatttttgaagcggcggaactgtcgcaccagaccaacaccctgccggaagtttgcggacgagtctgcccgcaagaccgtctgtgcgaaggttcctgcactctgaacgatgagtttggcgcggtgaccatcggcaacattgagcgttatatcaatgataaagcgttcgaaatgggctggcgtccggatatgtccggcgtgaagcaaaccggtaaaaaagtggcgattatcggcgcaggcccggcaggtctggcgtgtgcggatgtcctgacgcgtaacggcgtaaaagccgttgtcttcgaccgtcatccagaaattggcgggctgctgaccttcggtattccggccttcaagctggaaaaagaggtaatgacgcgtcgccgtgaaatcttcaccggcatgggtattgaattcaaactcaataccgaagtgggccgcgacgtgcagctggacgatctgctgagtgattacgatgccgtcttccttggcgtcgggacttatcagtcaatgcgcggcgggctggaaaacgaagacgccgatggcgtgtacgcagcgctgccgttccttatcgccaacaccaaacagttaatgggctttggtgaaacccgcgacgaaccgttcgtcagcatggaaggcaaacgcgtggtggtccttggcggtggcgacactgcgatggactgcgtgcgtacgtccgtgcgccagggagcgaagcacgttacctgtgcctatcgtcgtgatgaagagaacatgccgggttcccgccgcgaagtgaaaaacgcgcgggaagaaggcgtagagttcaaattcaacgtccagccactggggattgaagtgaacggtaacggtaaagtcagcggcgtaaaaatggtacgtaccgaaatgggcgaaccggatgccaaaggccgtcgccgcgcggagatcgttgcaggttccgaacatatcgttccggcagatgcagtgatcatggcgtttggtttccgtccacacaacatggaatggctggcaaaacacagcgtcgagctggattcacaaggccgcatcatcgccccggaaggcagcgacaacgccttccagaccagcaacccgaaaatctttgctggcggcgatatcgtccgtggttccgatctggtggtaaccgctattgccgaaggtcgtaaggcggcagacggtattatgaactggctggaagtttaagctctgtcccagcgccgcctcctcagaaaagagtcggcgctgaaattctcctttctttctggaaagcgcctcgcataatctgaagaaaaccaatgtaatacgctcatctggattgttaccggtagatgcccggcgtatagctgattccattattcaacgcagcgccatataaagggacagataatggaatcgctctcagagagaacctcaacaggctaccagcaaatccacgacggtattattcatctggtcgatagcgcccggacggaaacggtacgtagcgttaacgcgctgatgaccgcgacatactgggaaattggccgacgaattgtcgaatttgaacaaggtggcgaggccagggctgcgtatggtgcgcagctaatcaagcgactatcaaaggatttaagtctaaggtataagcgtgggttctctgcaaaaaacttacgccaaatgaggcttttttacctcttttttcaacatgttgaaattcgccagacagtgtctggcgaattaacaccattgggaattccgcagacaccatctgcagaattcccatcggcaaagatttggcagacgctgtctgccaaattgagaggctgtttgatatttccacagcttttgtattgcatctcctattttcggtttgtatattcatgcaaataaacgaaggaaagttgccatgatttacattgaacagcttgaattaatccataaaagtggtgatgtgttgtatccagtaaaaataaccagaaaatcatcaggaaaaactgccttccaccttgttccattcggcttaaataagactcacgaccttctagaggtggaagatgcttcagaagcaattcggctggtgattgatgaacgtcattccattcgctgcagtacacttacagcaactattacgaataaaaagggcaagcgaattaagcggacaggtatatacagtatcaagggtgttaacataaaagaatacaacgtcaggtaatggcacagagcggtccgtcagttcaggtttggctctgtgccaaagatgggtcaggtcacacctgatctaataaatttaagccattaaatcagccttaaccttcaccaccacctttttaatctcacccggctcgccaacaacgcatcccggcttatgcggctctcctggcataaacacggcgaacattcccggtttcaggatgatggtttgctcgttttcaatggcgctacaaagctggtaatcatcttcatggtggaactcttcacattggcgcgcagtgcctgccatgccaaacagaatccgttcctcaccgtttaataacagctggatatcaatgtattgctcgtgcaattccgcttttttctcgacgggcgattgagtgttaaacgtcatgacattcataaaaatattgtcgccctgtaattcgtaacgacccggcgctttttcttgcggtctggcagctaaggccagcgttaacgcgtcctgtaacgcaggatgtaacccagcagacggtaatgactgtacttcacccatcatcataatttttctccctgggccaacagcgcagccccaagtaaacctgcatcatggcggtagtgcgccgccagtaaatcaacatgaaatgccgctggctcctgcgccagatacatttccaccaacgccagatacccttctgccagaccaacgctgccaccaaccaccacgcactggcaatcagttgtggctttaatatcagcgatcagccttgcaagcgtacgtgcggagagatgaatcagttgctgcgcctgctcatcgccctgcccggcgcgtgtgaaaatagttctagcatccgcgccagccagctcgccctgcgctgccgccgcaatgccgcgaccagaagcaattgcttccacgcaacctgtgcgtccacagccgcagactgggccgtgtggatcggcaagcgtatgcccgatgtgccccgccagaccgccagggccggtaagcagtttgccaccgctcactacaccgccgccgacgccagtggaaacggtgataaagaccatatcggttatatcgccttccagcgcctgatactccgcccatgctgcagcctgcgcgtcgttaatggcaatggtcggcaaattggtaagttgttccagcgttttgactaacggaaagtgtagcaatccaccgagattatgcggattcagcgccagcaaactgccgtcgcgaataattccggttgaagcgatggcaacccgctgcgcatgagcttgcaacggagagactaatgcggataaggcatcacgcaaggcttctggtgtctggctggctggcgtaggaagttcacgacgatcgcggatctgcccgtcagcgccaatcagcgcggcggcaagtttagtaccgccgatatcaatcgccagcgtggtcatagcaccgcctttttcatcgctgtgttgtaccactgacaaatgtgttcaagacgcgtaatggcagaaccgaccgtcaccgcccacgcgccgtggcgcatcgcatctgccgcctgagcaggcgtgttgtaacgcccttcggcaatcacccgacatccggcgtcgctcaacgttttcaccagcgccagatccggctcttctggcgtttcaggcgtggtatagccagaaagcgtagtgccaataatttcggctcccagcttttggcatgccaggccgtcttccggcgttgagcagtcggtcatcgccagtaaaccgtgatggtgaatacgtgccagcagcgtttcaacaggcaccggacgcgggcggtcggtgccgtcaatggcgataatgtccgcgcccgcctgcgccagcgcatcgacatcttcaatataggccgtgatgcgtaccggagaatcctccagatcgcgtttcacaatcccgataattggcacgctcaccaccgcacgcgtggcttgcagatttgccacaccttcaatgcgaatggcaaccgcgcccgcctgctctgccgctaatgccatggcggcgacgatttcgggtttatcgagcggactgtccggaaccggctggcaggagacaatcaggccaccgttagcagcgattttttgatccagttgtgcaagtaacgacatacatcttcccttagcgaaaggcccggtacatagaccgggcaacaggattaacttttggttttgactaaatcgtttttggcgctgccaaatggcacggcaccgctaaatggtttgccgtcgatagcgtcatgagtacgcaatgcttccgggcgcagccaacgctgaacgcgggaaggcatatccagaccaatcagcaggatcaccacgaacgtcagactgaacgagagcgatgccagcgcagtacccagatccagacgttgagcgatcaacgcgccgatgattggggccagtgcgccgcccaatgcgccaacgttgtaggtaaagcccaggcccgctgcacgctggtcggtatcgaaataaccgccaatcagtttcggtaagatcccggcgatcccttgtccaagcatttgctggaagaacagtaacagaccgagcacccagacgtttgcgccgccaatcgcaaataccggaataatcagcagctgcgaggccagcaggctacaaacgtacgctttgcgggttcccagccagtcaccgaggaagccacctacgcagcatcccacggccgcgccaaagccactaaagaacagcacattggcgacagtatgcgggttataagccagatcggttttcagatacgttggcagcagcgcctgaatcggccatgagtagaggaaagcaaacaacacgaccaccatcagcattacgcccgttggccagcgtttacccgtactttgcaccataaagctgataaagattgcggcgcataacagcccgagaacagcgacgattgcagcattttgcaggttaccggcgaagcagaaccacagcgcagtagccgccgccagtgtcattacgatattggcaatgcgatgttcaccacggtagagaatatccaccattgtgcgtactggtgctttacctgcgtgtttctctttccagtcttccgcttccgggatgtttttacgcagccagagagcaaagatgattggcaaaatgccgataaagaacagcgcacgccaaccccagaccggaaccaccaggctatagacctgagcggcaacgacggcccccacagagaagcctgaaatcaaaaaaccactggctttgttacgcagatgttttggccagctttcaatgacataggtggcgctggaaccgtattcacccgccatccccatgccgatgaccagacgagcgataaacatggtgatgtagcctggcgcaaagccgcaggccagcgtcccggccgagaagagaacgatgctggtgaccattgccagacgacgcccgtagcggtcacccatagcgccgagcatcaggccgccgaaccagcgagagataaaggctgcggagatcagacttgccgcctgcaccgtcgtcagcccgaattcaccctgtacttcggtgagtaccagggcgattaaaacgaaatcaaaaccgtcaagcagatatcccaaccaggcagcggaaaatgcccgccattgtgcacgattgagatggcgataccacgggatattctgggttgtagtactcattgtgagtctcccgcggtgggcgatgcccacacgctttggtatgaaaattgtagggtacagatgcgtttatttcccctcacccggtaggggcgagcgaggggaaacaactcacccgcgctcttgcatcaactgctgggccagcgccttcagttctggcagatatttttcatctaccggaccaaacggtttgcggcacagcggcacagaaacgacatccatataatgcaggacagttttcaggccgcggaatacgcccgttttgatcagtaaatcaatgactttattacattcggtttgcagcttctgcgcggtctggatatcgccttctttcagcgccttcacaatcccctgataacgccagcccatgatgttgtaggtactaccgataccaccatcagcgcccgccagaagaccagaggcgaagatttcgtcgtaaccgttatagagcaccagatcaggatgttcacgacggatctgctccatctgatagagatcgccagaggtctgtttcagcgcacctacgccaggcaacgtaacaagtgtgttgatctgatccagggtcagttttaccccactcagggctggaatgttgtacaccaccatcggcaaaccatccgccgaatcaataattgcccgatagtgatcgcagtgttcttcaaagctgaaaggatagtagaacggcgtgacggcggagacggcatcgaagccataacgtttagccgatgccgcaagttgttggctttcggcggtgctgacgcaaccgacgtgggcgatgagtttaatcttacctttcgcctcttcggcgacgatttccagtacctgttcacgctcggaaaggctttgtacaaaggcctcgccggtcgaaccacccacgtataaaccgtcgatgccctgctgaatattgaactgaaccaggcgacgcagactcgctttatccagtgcttgttgttggtcaaaaggagtcaggagtgcagccattacgccacgtaaattcgttgccataaatacctctgaagtgatgcttgtctgataaacgatatacctttatacctgttataccagatcaattaagcaacaccccatacagaaagcttataatgcgatctgcttcactaaagtggcattatttctttttgttggtggtctgaccgaaagcgtgccaggtagcagagacgctgttgagatgcgattgcaacgcacgatcggcttcgtcaggatcgtggcggcggatcgcgtcaacgatcgcaatatgctgttgatagctaacgttgttatgctcgtgcagagcctgatcagccacggttggacgtgcggcgattagccagtcgagcagggcaacgtggatcgccatgaagattgggttacctgggatctccgccagcacgcggtggaaatcaacgtctgaacgaatgaatgccgcgttgttatccagcgactgactgttgatttccagtgcttttgccagcaaatcgatttgctcatcggtggcgtgttcagccgcatagcgcaccaggctggattcaaagaacagacgtaattgttcgaaatgggcaatcccaccaggatgagaaaggaaatctttcgccatgccggaaagctcaccgatgatagtgtccgcagaaggacgcgagacgcgagcgcgttcgccgttgtttatttgcaccagacctttgcgttttaacgctgccagcgcttcgcgcacagaaggacgcccgacgttaaagaacgccatcagttcgcgttcagacggtaattgttcaccttcgccaaattcacgacggcggatcatctgttccagctcttcttccaccatttcggagagttttttacgcgccagcgggcggctacgcaagttgcgaccaattgcaggtgaagaatcttcggtttgcgaatcaaatgcgttcataaggcccattctgtaaggtcagtgtgattaacatcatcagtgacatcctatcacaggattgaaagtaggggaaaatggcaggtttttctctttgtgcctcatcattaccataattaacggaataattaactattgcgaaaaattaatgtaacgcagataaaaacatcccgtttgaattattcataagactattcacgagcattatgaatattatgaatgtgttcttacaaaataatcataagcgcatattttttaatgaaaaaccacctcacctacaattaaaaacacgacatccgcaccataaatagacttgcaaaaaatataacatcattgttttcaatctgccgtttatgggattgaccgttttcttttgacacggagttcaacaatgttcggcataattatatctgtcatcgtattaattacgatgggctatttgatcctgaaaaactacaaacctcaggtggtgctggctgccgcaggtatcttcctgatgatgtgcggtgtctggttagggttcggtggtgtactcgatcccgccaaaagcagcggctacttgatcgtcgatatttataatgaaatcctgcgcatgctgtccaaccgcattgccggattggggctgtcgattatggcggtgggcggttatgcccgctacatggagcgcacaggagccagtcgcgcgatggtgagcttgctaagccgcccgttaaaactcattcgctcgccgtatattattctgtcggcaacttacgtcatcggccaaatcatggcgcagtttattaccagcgcctccggcctgggtatgttgctgatggtcaccttatttccgacgctggtgagtctgggagtaagtcgcctctctgcggtggcggttatcgcaaccacgatgtccattgagtgggggattctggaaacgaactccatttttgcagcccaggtcgcgggaatgaaaattgccacttacttcttccactaccagcttccggtcgcctcttgcgtcattatctcggtggcgatctcccactttttcgtgcaacgcgcttttgacaaaaaagataaaaatatcaatcacgaacaggcagagctaaaagctctcgataatgtcccgccgctctattacgccattttacctgtgatgccgttaatcttgatgctcggctcgctgttcctcgcccacatcgggctgatgcagtcagaactgcatctggtggtggtgatgttactgagtttgacggtgacgatgtttgttgagttcttccgcaagcataacttgcgcgaaacaatggacgatgtgcaggcgttttttgacggcatgggtacgcagtttgccaacgtggtaacgctggtggtcgcgggtgaaatatttgcgaaaggcttaacgacgattggcactgttgatgcggttatcaggggtgcggagcattctggtctgggcggtattggcgtgatgattattatggcgctagtcattgccatttgtgccattgtgatgggctctggcaatgcgccgtttatgtcatttgccagtcttattccgaatatcgcagccggactacatgtaccagcggttgtaattattatgccgatgcattttgccacgacgctagcgcgcgcggtttcgccgattactgcggtggtggtcgttacgtcaggaattgcaggcgtttcgccttttgcggtggtgaagcgaacagcgatccccatggcagtcggtttcgtggtgaatatgattgccacaatcacgctattttattaagccattaaaagacaaaacaggccaccagggcctgtttttgtattacttcacaacgcgtaatgccggtcgaccaccgcgtggtggctgcggaggttcatcgtcaggatgagtgtcatcatcgtgatctggcttgtcgccatcaataaccgacataacggtttcgttgtctgccgatgcctcttcatcattcatgatgctggtatcttcatcgtaggcagcttcaggctcaaacatcgtgcctgcgccattttcacgggcgtagatagccagcacggcagccagcggcacagaaacctgacgcggaatgccgccaaagcgcgcgttaaagcgtacctcatcattcgccagttccagattgccgacagcacgcggcgcaatgttgagtacgatttgcccgtcacgcgcatattccataggaacctgcacgccagggagcgtcacatccaccaccaagtgcggcgtgagctggttatccagcaaccactcatagaatgcacgcagcagatagggacgacgtggtgttagctgtgacaaatccatacagattaactccggcccagacgcatttcacgttctgcttcagttaaagaagcaaggaaagagtcacgctcaaagacgcgggtcatatagcctttcagctctttcgcacccgggccgctgaactcgatgcccagttgcggcagacgccacagcagcggagcaagatagcaatcgaccaggctgaactcatcgctcaggaagtacggcttctgaccgaagaccggcgcaatcgccagcagttcttcgcgcagttgcttacgtgcggcatctgcttcagaagctgaaccgttgatgatggtgttcatcagcgtgtaccagtctttttcgatgcgatgcatgtacagacggctttcaccgcgagctaccgggtaaacaggcatcagtggcggatgcgggaaacgctcatccagatattccataatgatgcgagattcccacagggtcagctcacgatccaccagggtcggaacgctctgattcgggttgaggtcaatcagatcctgaggcggattgtccttttccacgtgttcgatctcgaaacttacacctttctcagccagcacaatgcggacctgatggctatagatgtcagtaggaccggaaaacagcgtcattaccgaacgtttgttggcagcgacagccatgaaaacctccaggtatagtcagaatttttactgctaccagccaccaggtggccagtcagaagttgtgttacccagtaaggaacgactctctttgttcgaaaatcaaacaaaaaatgagcaatacccgacatttgggcagaaaattggatgatagtttaccagattttgcgacctttgtggtgagtcgatgccggaaatggggaaaaagagatgcgctttagtctgaaatagttgacttagtcccttattggcgatgtggtttttgttttgcctgtctgtcagacggtagcaaaaagcaactttccaatttttacgctgattcagaatttaaccataaaaaaacccgccgaagcgggttttttcgcaaattgttttctgccggagcagaagccaattaacgtttggagaactgcggacgacgacgtgctttacgcagaccgactttcttacgttcaacctgacgagcgtcacgagtaacgaagccagctttacgcagttcagaacgcagggactcgtcgtattccatcagagcgcgggtgataccgtgacggatcgcaccagcctgaccagagataccaccacctttaacggtgatgtacaggtccagtttctcaaccatgtcgaccagttccagcggctgacgaactaccatgcgagcagtttcacgaccgaagtactgttccagagaacgttggttgattacgattttaccgttgcccggtttgatgaaaacgcgagctgcggaacttttgcggcgaccagtgccgtagtattgattttcagccattgcctataatcccgattagatgtcaagaacttgcggttgctgtgccgcgtggttgtgctcgttacccgcgtaaactttcagtttacggaacatagcacgacccagcgggccttttggcaacatgcctttaaccgcgatttcaatcacacgctcaggacggcgagcaatcatctcttcaaaggtcgcttgtttgataccaccgatgtggccggtgtggtgatagtacactttgtcagtacgcttgttgccggttacagcaactttgtcagcgttcagaacgatgatgtaatcaccggtatctacgtgcggagtgtattccgctttgtgcttaccgcgcaggcgacgagccagttcagtagccagacggcccagagttttaccggtcgcgtcaacaacataccagtcgcgttttacggtttctggtttagctgtaaaagttttcattaaaagcttacccaataaatagttacacgttggtgaacacccaaacgtcttcaattgttgaggttcacacgacaaagtccggcaaacctaccccttcgaatagcctatgccagcacacaaaaagttttgggaaaaaaactttcttgtaacgtggggtcgcaggattatagagaagtcggggtcaaagatcgacccctttttgtgatttgtgacaggttttaacccgccaaatgctcgcgcttcagatactcttcgctttgcatctcttgcagacgtgacaggcaacgctggaactcaaacttcagccgatcgccctgataaatttcatacagcggcacttctgcactcaccactaatttgacatggcgctcgtaaaactcatccaccagcgcaataaagcgccgcgcttcgctctccatcaaccgcgtcataactggtacatcaaacaacatgaccgtatgaaagagacgtgagagcgcaatatagtcatgctgactgcgggcgtcgacgcacagcgtagtaaaagagaccgccagcgtctggttctcgacgcccattgtcgccaatggccgatggttgatttctaacgtcggtgaattttctcgtttcgcccccgccagcgccaaccatagtttatccatctgcgcccgggtttcatcgttgagtggcgaaagccacagatgcgcctgagtgagtgtacgcagtcgataatcaacaccagcgtccacgttcattacatcacaatgctgtttaatggcatcgattgcaggcagaaaacgcgcacgttgcaggccatttcgataaagttcgtccggcggaatatttgacgtcgctaccagggtaataccgcgggtgaacagggctttcatcagaccgccaagtagcatggcgtcggtaatatcagaaacaaaaaattcgtcaaaacagagcacgtcagtttcggctttaaagcgatcggcaataatttccagcggatcggtctgcccctgtaaggcagttagctcttcatgcacccgcagcataaaacggtgaaagtgcaggcgctgtttccgctctcccggcaggctttgatagaaaaggtccatcagccaggttttcccgcgtcctacaccgccccacatatataagccacgcactggcgtatgctttgtgtcttcgcgtttaccccacagcttaccgacccgcgccattagcccactcgtcctgggggctggtggcgtgctattgatgagttcctgataaataatttccaggcggctgacggcctctttttgaacgtcgtcgggttgatggctgccttcattgagcgccttcaggtattgcgatgttggggtaacgctttgcatgatcttattgttattccttgaataatcggtgcgccgttgttcacggttgacgaaaaaaaggccgttctacactacgcgatatgcagtcgggattccacttctgtggaattaacggttatagtggcataatcagccgcaggcatggagcctgaagccaacaccctacggaaacaaaagacaacgggagatgttcatgacctgggaatatgcgctaattgggttagtcgtcggcatcattattggtgctgtggccatgcgttttggtaatcgtaaactacgccagcaacaggcgttgcagtacgaactggaaaagaataaagctgaactggacgagtatcgcgaagagctggttagccactttgcccgcagcgcggaattactggataccatggcgcacgactatcgccagctgtatcagcacatggcgaaaagctccagcagcctgctgccggaactgtctgctgaagcaaacccgttccgtaatcgtctggcagaatctgaagccagcaacgatcaggcaccggtgcagatgcctcgcgactattctgaaggcgcatccggcctgctgcgtactggcgcgaagcgcgactaatttatttttcgggcgcagccattgcgccctcctcttctctccctccccgactatcatttaatctggtgtctcattgttagccgtctgaaaattcaataacatcaaactgttttgaatctcttttcttatcattcaggtacgagagcaggaataatgaaaaaacaaacccagctgttgagtgcattagcgttaagtgtcgggttaactctctcggccgtcatttcaggccgtcgcgtcgattccaggccaggttgccgatcaggcccctctccccagtctggctccaatgctggaaaaagtgcttccggcagtggtgagcgtacgggtggaaggaacggccagtcagggacagaaaatcccggaagaattcaaaaagttttttggtgatgatttaccggatcaacctgcacaacccttcgaaggtttaggttccggtgtcatcatcaacgccagtaaaggctatgtgctgaccaacaaccatgtgattaatcaggcacagaaaatcagtattcagctcaatgatgggcgcgagtttgatgcaaaactgattggtagcgatgaccagagcgatatcgccctgttacaaattcaaaacccgagcaaattaacgcaaatcgctattgccgactccgataaattgcgcgtcggtgattttgccgtagcggtcggtaacccatttggccttgggcaaaccgccacctctggcattgtttccgcattaggccgcagcgggttgaatcttgaaggtctggaaaactttatccagacagatgcttccattaaccgcggtaactccggcggtgcactattaaaccttaacggtgagttaattggcatcaacactgcaatccttgcgcctggcggcgggagcgtcgggattggatttgccatccccagtaatatggcgcgaacactggcgcagcagcttatcgactttggtgaaatcaaacgcggtttgttaggcatcaaaggcaccgagatgagtgccgatatcgccaaagccttcaaccttgacgtgcagcgtggcgcgtttgtcagcgaagtgttgccaggttctggctcggcaaaagcgggcgtcaaagcgggcgatattattaccagcctcaacggcaaaccgctgaatagctttgctgagttgcgctctcgtatcgcgaccaccgagccgggcacgaaagtgaagcttggcctgctgcgtaacggcaaaccactggaagtagaagtgacgctcgataccagcacctcttcgtcggccagcgctgaaatgatcacgccagcgctggaaggtgcaacgttgagcgatggtcagctaaaagatggcggcaaaggtattaaaatcgatgaagttgtcaaaggaagcccagctgctcaggctggcttgcaaaaagacgatgtgatcattggcgtcaaccgcgatcgggtgaactcgattgctgaaatgcgtaaagtgctggcggcaaaaccggccatcatcgccctgcaaattgtacgcggcaatgaaagcatctatctgctgatgcgttaatgtcgtaaaccgggcatcaggcttacgtgtgatgtccggttaactcgtggtatgctgctgccgttcccttttttaatgacgcctccatcatgtttgtgaagctcttacgttccgttgcgattggattaattgtcggcgctattctgctggttgccatgccttcgctgcgcagccttaacccgctttccactccgcaatttgacagtaccgatgagacgcctgccagttataatctggcggttcgccgcgccgcgccagcggtggttaacgtttacaaccgtggtttgaacaccaactctcacaaccagcttgagatccgcaccttgggatccggtgtaatcatggatcaacgcggttatatcatcaccaataaacacgtcatcaacgacgccgatcagatcatcgtcgccttacaggatggtcgtgtatttgaagcattgctggtgggatctgactctctaaccgatctggcggtacttaaaattaatgccactggcggtttacctaccattccaattaatgcacgtcgcgtaccgcacattggcgacgtagtactggcgatcggtaacccgtacaacctcgggcagaccattacccaggggattattagtgccacgggtcgaatcggtctgaacccgaccgggcggcaaaacttcctacaaaccgatgcttccattaaccacggtaactctggcggcgcgctggtgaactcgctgggagaactgatgggcattaacacgctgtcgtttgataagagtaacgatggcgaaacgccggaaggtatcggctttgcgattcctttccagttagcaaccaaaattatggataagctgatccgcgatggtcgcgtgatccgcggctacattggtatcggcggacgcgagatcgcaccactgcacgcgcagagcggtggtatagatcaactgcaagggatcgtggttaatgaagtgtcacctgacggcccagcggcgaatgcgggtattcaggtcaacgatctgattatttcggtggataacaaaccggccatctctgctctggagacgatggatcaggtggcggaaattcgccctggttcggtgatcccggttgtagtgatgcgtgatgataagcagttaacgctgcaggtcaccattcaggaatatccggcaaccaattaagtcgagtgctcaaaacaaaaaaccggagtctgtgctccggtttttattattcgctaattaattacttattaacgaactcttcgcccagggcgatatctttcttcagcgtatccagcataccttccagtgcgctctgttcaaatgcgctcagggtaccgatagatttacgctcttccacgccgtttttacccagcagcagcggttgagagaagaaacgggcgtactgaccgtcgccttcaacgtaggcacattcgacaacgccttgttcgccctgcagtgcacgaaccagagacagaccaaaacgtgcagctgcctggcccatagacagggttgcagacccaccaccggctttcgcttcaaccacttcagtacctgcgttctggatacgtttggtcagatcagccacttcctgctcggtaaaactaacgccaggaacctgtgacagcagcggcagaatggtaacaccagagtgaccgccaataaccggcacttcaacttcgcctggctgtttgcctttcagttccgcaacaaaagtgttggaacgaatgatatccagcgtggtaacgccgaacagtttgtttttgtcataaacaccggcttttttcagcacttcagcagcaatcgcaactgtggtgttaaccgggttagtgataataccaatgcacgctttcgggcaggttttcgcaacttgctgtaccaggtttttcacgatgccggcgttaacgttaaacaggtcggaacgatccatacccggtttacgcgctacacctgcagagataagaacgacatctgcgccttccagcgccggagtcgcatcttcaccagaaaaacctttgattttcacagcagtagggatatggctcagatcgacagccacaccgggagtcactggagcgatatcatacagagagagttctgaacctgaaggcagttgggtttttaacagtagtgcaagcgcctggccaataccgccagcagcgccgaggactgcgactttcatcctaaactccttattatattgataaactaagatatgttgctccgctgccgcgaccttaatccacaaaattgccgtttacaatgaccacatctcaagaatgtgtagtcacgcaagtttagcgtttatgcatttaattgccgtaatcaggaacctaacttacgtaattaacagtcgcttatgcattagcgcaacattccaacaggtggtgacaatataccctaccgttcagccaaaacaacatcaatttgataacaattaatttacttttaagcagaatttgcatgccgtgacgcaggcatgtttctcaataacgaaatttgataaaatcccgctctttcataacattatttcagccttcttcagggctgactgtttgcataaaaattcatctgtatgcacaataatgttgtatcaaccaccatatcgggtgacttatgcgaagctcggctaagcaagaagaactagttaaagcatttaaagcattacttaaagaagagaaatttagctcccagggcgaaatcgtcgccgcgttgcaggagcaaggctttgacaatattaatcagtctaaagtctcgcggatgttgaccaagtttggtgctgtacgtacacgcaatgccaaaatggaaatggtttactgcctgccagctgaactgggtgtaccaactacctccagtccattgaagaatctggtgctggatatcgactacaacgatgcagttgtcgtgattcataccagccctggcgcggcgcagttaattgctcgcctgctggactcactgggcaaagcagaaggtattctgggcaccatcgctggcgatgacaccatctttaccacccctgctaacggtttcaccgtcaaagacctgtacgaagcaattttagagctgttcgaccaggagctttaatctctgccccgtcgcttctggcggcggggaaaatgttgcttatccctctcattccccttctttctcctgcgatacatttaacgaatagtgcgttttaccgcgacacatcattcacaaaatgaatacatacggtaaaaaaagcacattatgcaaaattcattatctaattgaaaatactataattaataataaataaccgtgttttttatacttttttgttattaaaattcacatttttaacacttagtatcaactgaaacagttagcgtggtattaattagttcaataattagtgtatacttgattttgtgatatgggtcacgaaacaaaggcccagctaaaagattatgtcgaggtaaaaatcatgaaaatcaaaaccactgtagctgcattaagcgtactttctgttctctctttcggtgcattcgctgccgactccattgatgctgcacaagcacaaaatcgtgaagcaatcgggaccgtatccgtaagtggtgtggcgtcttcgccaatggatatgcgtgaaatgctgaacaaaaaagcggaagagaaaggcgcaacggcctaccagattactgaagctcgtagcggtgacacctggcacgctacggctgaactgtacaaataaaccctcatcgtcttgtccgacgatattgcccccggttcgggggctttttttcgcgctaatgacgaacattaaaacgcaaatgcccttccagctcttcctctgcctcatcaaacagcaatattaacgcgccaaaacggcgacgcgttttctctcccagatgaacaaattcaatctcaagtggtagcggcaggacatcgttcattaacacatcccatagtgagtcgagatcgcgtaccttatctttagccagaccaaaggtttggctaaagtcacgataaaaatcctcctgactctcaatctcatcaaaatcaaaggtataaatattcatctgttgccaccgtcacgtttcgcggcgagttctgccgtgcatcgctaagtatagccatgaaaaaaccgacgcttttggcgtcggttttgacttaactatcggtcaacgcatgttgatacttatggagcatccccgccagccgatgaaccggttccgtcacctgcggtggcgcttgccagatgcgtagcttttcctggtagatttccagttcttccagcaactggccaaagtaccgacgacgtttatcatcgctacgggcagatatcacatggtctgctgtgcggcgcatttgtcggtgaaacgccgataaatcctcgttaaccgggatcggcgcatcacgcaggcgctggtgcgcgataatcatcgtcagcgccaggcgaaatttcggcaaatcccctgggaacttattcatcagcaaaaacagctgctgataaagtgccgggaggtggttctctttacgacgtgccacattggtagtcatcgcggaaacagcggcagaaacaaactgattaagcagtacacgtccggtcctgtcgcgcgatttatcccgcacaagcaaaataacggtgaacgcgagcacacagccgacgatttgccctaatgcgctgtcgagaaactgactgaaatggaaagtcatcgggttatccagcacgataatatttatggtgctggccagcgcccccatcgagcccagtcgccgtttctgtacttctataccgaggaaaaatcccagcactgccaggctaatacacagcagcaacatgctctgttgggtattagggataatcaccaaaaagtagagcagccctaacggcagcgcggccagcgtcccgtagataaagtcgatcgccaccatgcgtggattcggcaaacgcattgccagtgacgtcactaccgcaatcatcaccattgcaccactgccggaagtccagcccgtccacagccagaaaagcgtgcccagaatgcaggaaagtgtggttcgccagaagttaaccatcgcatgatgacgttcggctgactctactttgacttccggttcgccttgcaggatctcttcttcggtggcgttgatttttgtgttactgataacgccgcgcttgagaagctgataacgcgttgccgccgcgacccagctataaatggtgacaggcgtttcccgttccccggtccaggcgataactctccgcaggcgtttgagctgcttgtggacgtcctgcgcggtttctaccggcgtgtcaaaaattcgcggaaagtatcagtgatcaattccgggcgcgtattctgaataagataagtttcgcaggattgggtaatcagcgtcagcgatagcgtattgatcgcttttaaacgtcgattggcccgcgcccagcgggaagattccatattcaggttgctgcgcatgccttgtagcgccgtggtgcgtcgcaccaggtcgccccaggctttatcgacaacttcaccatcgccatgcttgatacagagttgcattaattgatattgcgcgaccagcaaactttccagctctcgatccacttcttgtttgatcgatcgcggagaaaagagcaaatccgccataatcgcacacacaataccgataacgatctcgctacaacgttcgacggcaaactgcggcgtaagcaatggttccggctgaatggtgatcacaatgatcagcgcggtataaccggccagcccccacgcgtacgagttttctattcgtaccagcgaggatatccaggtacaaaaaccggcccagatacagcacaccagaatcatcaataatggtgcgcggatcatcgcaatgatgatcaccagtccggcaatacagccaataaatgtgccgatgatgcgcaaaaagccacgatagcgaatagcgccagaatacggttcacctcccgcagcaaaggccggaccggcggcaacaatcgccgctgtcagtaccgcccagcgtggcgtttccagctggaagtgaaagccaacaaacagcgccagtacaatggcggtcgccagttttaccgcaaagcgaatatgttggttagcaatggagaaaatacccatcgtgattaaccaaactcacgcaggcgatgggccattttacggaagaacgaatcctggctttcgtcgcgatcttgtttgccagtgaccaccactgtagcagtggtgcccgcaggccagatgttctcttgctggttgtcgagacgaatacgaaccggaacacgttgcgccaaacgcacccattcaaggttagagtcgatggtcgccatccctttgtcgtcacgcgtgctgctggcgttggtgaccccagcggcaacactatcaacagtccctttcagcactttgttactgccaagcggcgtgatctctgcacgataccccggacgcaccccttccagcttagtttcttccatataggccagtacatagaaggagttctgtttcaccagcgcaaccgccgttgatcctcgagtaataaactcaccggtatagacgttgaggttggtcacccagccatctgctggcgcgcggatcaccgtgcgttcaagatccagttttgccagatcgcgggtcgcctgcgctttcgctaactgatgcagaaccgtttgtagtacgttgttagcctggtcgatctcttcgcgagacatcgcctgcacaccgagacggttacgacgtccggcctcctggcgtttctcctgtgccagtacctgataataagcaacatcggcttgcgcttcctcaagcgccttttgatagcgcggctggtcgatggtgaacagtatctgtccttttttcaccagctggttatcatgaacattcacctgggtaatgagtccagaaacgtccggcgcgatcgcaacgacgtcagcgctaaagcgcgcgtcacgcgtccagggggattcggtgtaatagacccaggcattaaaaattgcgatgaaggccagaatgactaatacgaccgtgatggccgtacgggagaattttcttattagtgttttcacttcaacctcaaacgaacagtcgcgatatcaaataaaacaagcagcaatagagcgcggtgttgaacaacgccggatgccagacaaagtcgtagatacctgttggcacaagtacccggcgcaccagccagaaaatcgccagtgataaaagcaattcaaaaaatatcggtgggaaggacagcccaaacaccacgataacgggaaacaaactcatgttgaccttggttgtatagagagagcaggcgttattattttcagcatctgtcgccgcagagaagggcatggaaagccgggcgagagcaacattgctgtagattgatatttaatatattagcgtaactgttatgctgttatctatattatgtgatctaaatcacttttaagtcagagtgaataatggaacgactaaaacgcatgtcggtgtttgccaaagtagttgaatttggctcttttaccgccgccgccagacagctacagatgagcgtttcgtccatcagtcagacggtgtcaaaactggaagatgagttgcaggtaaagctgttaaaccgtagcacacgcagcattggcctgaccgaagccggtagaatttactaccagggctgccgtcgtatgcttcatgaagtgcaggatgttcatgagcaactgtatgccttcaataacacccccatcgggacgctacgcattggctgttcttcaactatggcacaaaatgttctcgccgggctgacagccaaaatgctgaaagaatacccaggtttgagcgtcaatctggttaccggaattccagcccccgacctgattgccgacggtctggatgtggtgatccgcgtcggcgcgttgcaggattccagcctgttttcccgccgtcttggcgcgatgccaatggtggtgtgcgccgcgaaaagctatctcacacaatacggcataccggaaaaacccgccgatttaagtagccattcatggcttgaatacagcgtgcggcccgacaatgaatttgaactgattgcaccggaagggatctcgactcgcctgatcccgcaagggagatttgtgactaatgatccgatgacgctggtgcgctggctaacggcgggtgccgggatcgcctacgtgccgctgatgtgggtgatcaacgagatcaatcgcggtgagctggagatcctgctgccgcgttatcagtcagatccacgcccggtttatgcgttatataccgaaaaagataagctgccgctgaaggtacaggtcgtgatcaactcgctgacggattattttgttgaggtcggtaaattgtttcaggagatgcacgggcgcgggaaagagaagtaattcatattgtactgttacgttctacaaacctgtgccaacgggttcccctcaccctaaccccagaggagcgaggggaccgttcgtgcacgtagaaagattaattatccttctgaaaataatgaaattattacgcagtaccgccaacagtcaggttatcaactttcagcgttggctggcccacgccaaccggcaaactttgcccttctttaccgcagacacccacgccgttatccagtttcaggtcgttgccaaccatcgaaatctgctgcatggtttcgataccggaaccaatcaacgtcgcgcctttcaccggcttcgttactttaccgttttcaatcagatacgcttctgaagtggagaaaacgaatttgccggatgtaatatccacctgaccgccaccaaagttcggtgcatagataccgtactcaacggattcaataatttcctgcggggtcgatttacccggcagcatataggtgttggtcatacgcggcatgggcagatgggcgtaggattcacggcgaccgttgccagtcggcgtcatccccatcaaacgcgcgttgagtttatcctgcatgtagcctttcagaatgccgttctcaatcagcacgttgtactggcctggcgtaccttcgtcatcaatcgccaccgaaccacggcgatcgaccatcgtgccgtcatcaaccacggtacacagttctgaagccaccagctccccgacctgcccactaaatactgaagtgccgcggcggttgaagtcgccttccagaccgtgacctaccgcttcatgcaacagcacgcccggccaacctgcgccaagtactaccggcatggtgcccgctggtgcagcaacggcagaaagattgaccagcgccatacgcactgcttcttttgcccatgcatccgcacggacttcgccgtcaagatcggcaaggaagaactcataaccaaaacgaccgccgccgccactggcaccgcgttcgcgtttgccatcttcttcgaccagaacgctcacggaaagacgcaccagcggacgaacatccgccgccagcgtgccgtcggtggccgcaaccagaattaattcataaacgccgctgaggctggcagtcacttcttgtacgcgcttgtccgcttcgcgggcaaccttatcgacgcgacgcaggatatccagcttctcttcacggctcatgctttgcagcggatctaccgaggtatacaacgggctatgctctaccgcgcccagcgtctgtactttgccatcaccactatcacggacgatggtgcgcgccgcttgcgcactctgttccagcgccagcaggctgatttggtcagcgtaagcaaatccggttttttcaccactgattgcacgcacaccaacgccctgatcgatgttgtaagaaccatctttaataatgcggtcttctaaaacccaggattcgtgatagctcgactgaaaatagagatcgccataatcaaggcgacgttcggccagttgaccgaggatcgcgaacaagtcctgatgtttcaggccgttcgccgctagcaattgttcacttaccaggttaagactcatcgtttttgctactcgttagttactgcagtagaggattttttacggctgccggatgcggcgtgaacgccctatccgacctacggttatgttctggctcgttggcctttggcaacgattatcatatgagattggggcaattacgcgccctcgtcaaatcattgcgctttttctttacgcggttggcgcaacacttcgttgatttgcggatcgtccagcggacccgaaatgtgatagcgcaaaatggagactttgctccacagcggccccagcactttactggcggcaaacactgccgcgccaacaatggggttaaccgcaaaagccgcagccacgcccaccgtcgcagaaatctctggtgcgacaaccgcttccatattcaggtcgcgacgtaccagatttaccgaccctttcatggcgatatccgcctccaggccatccaccagcgtgtcgtcggtgtgcataacgccgtctttaatccacgcggtgctgcgaatggagtcaaaatagaacccttcgccaaaagtgtctctgaaatcaaaacgcagcttacgcatcagggcatctacgctcaataagcgcagcaattgcccggcatgtccggtattgatttcggtaatttcgcctttacccagttgagtatgaatgatgccattcaacgtcgcttcatctggctgccagggtgctttgcgccagtgtaaatcgtaatccacattaaatgacgactggcgtatgggcgtcgtgacaccaaaaaattctgcggcggcatcaattttctgcccgcgcagttttcctttcagcgaggtacgttcattccccggattattaacccattcaccatcggcagtaagccgcgagaaaccagtatcaatcagtccattggtcagcgttaacgtatcgccagaaatggtgagatcactgtcaatacgaccgaatttttgcccccagaaccagcactctgtgcatcgtatttgtgcgtccggccagccacggaagttaatgcgctccgttgtcgggaaaggtgatgacggtgttgaatcaccacgagttttcgccacgctcgggttgtaataaagatatttgatattcgccagccacggcgcgttattacgcatcgccagcgtggcattgatttcacgcccctgcgcctcaaccagggtgccatttgccgtcggttgcgaaacaatactcaggttattccattgctgatttcccagtgacaacataggcgtacgtaacgttatgtgttgtgggaaactcgctgcaccaccgacactctccgcagcgcctttctggaacagggccagccactcggcaccattcatcggcggcatattgagttcaacgccactttgttccggcaacggcgggagcgttttactgtctgccgcccaaatagcacgatcgagcgtcagcttttgaccaagcaaccagcggctattgaaatggttatccgcaccagcctgtccggttaattcaaagctgttgagattgccatcaaccttaacgtttaccggcagtggttcacccgcaggtttggctaacggtgaaggtaagtgactgctcacattcttcagatcgccgttcagctctacgttataggtcgcgccagcatgataaggcagctcaatgcccactttaccatcccacgccacgctgccactcaatgcttcgttcaccgcttcaggcagaacgccggttttcgccggttgccagttaccgttgaggtttaccgctacctggtaggcttttgccccttctttggtggaaaaatccacgttcaacggctgattaaaccagcttgctgtcagtggttcactttgcagatcgccattgataaagctgaatttaccgctcaaatttttcagggtgctgtcgagtggtttgataaacagactgttattacgcagcgtcacttcacctttcgcggttaccaactcgccgttcagcgggatatcaagatgtaagcgagcattcacatcgccgtcgagctgaagttcttgcagggtcgcacccagggaatctttcagcggtgtctcatcaaagtaagggcctacggctttacccggacctttaatgtcagcgtcaatcagcagtttttcttttgagtagtcagggatcactgcggtgagattactcgcgcgcacgccgcccagattaacgccatcggttttcatccataaaccgtcgttaataaagtccagttcaatatcaaggttagttaatgcaggccagtccggctggaaggcaaacttcgcgttgcgcagcggcaccagcacttcaaactgaccttcgttgtgtttataggggaagagttgcggattgccaccataaaccagcgtcgcgttatccgcttcaccgccctgaatcgcaccacttaaataatcaaccaggtctttacccatcaagttttccgggaaatagcgccaggcttgtgaaccatcatcggtactgatgccagccagaatacccagccagggttcatcgttagcaggttgcaggtaacgaaaaccgccgcgcgcatggacggctttggctttaacgtcaatattacgcccatccagctggaaacctttgtcattgttcagccagcttatagttgcctggccgtcggcgatttccagtggcgcacggaataccgtttcgtaaggcatctttgcctgcttcatcgacgcggtaagcaaaccattttcaacgctgccggaaagcgtcccggagaagtgttccgcacccggtaataatttccattgcttccaggccagatcgctccacgatgcctgaaaacgggtcttgtctgccgcctgaagcgggatatccagcgccagagtgttaatcttgccgctcggttgtgtggagcgccaaacatcacccagtgcaggtgaaagtttcgcggccagcgggcgtacgccctccaggcctgccagctccagattactggcgcgaatccggagttcgtcactgcgtttattgtctttgccgccaacgtcctgttccggtatccaggccagcgtcaatgctccgctcggccagggtttgccgtccatcgtgatccgtgtatcgggaatagagaactgccagcccggattttcacgcgtaatatgcgcggtcagattatccaccgacagcgtatgcgtttgcttctcgcccaaccagctggcaccgccctgtttcagccagacgtcaccgccggttacatcgcctttgtcgatcgtcatccagccttcaagggagaactgtgccgtttccagagcaatattgtcctgcatccatttaccgagccacggcttcaggtcgatgtcatccgcctgtagccagacgcgaccattgcttaacaacccctcatcatcgcgcaaatccatacgcacctgcatcacgccgtgctgtccggtaaggctggagaggcttaccaggccttccgcacggtgtcgacgtggatcgttcagccaggtgagttgtgggatcgccagctcggcgcgctgaccggatggcgtcagaaaactgacttcactgtcgcggagatcgaaatggtcaaattgacgaagaaacagatcgctgatgtgactggcttccaggctatcattaccaccaccgctggtgataggagtgttggtgcgaaagcgcagctgccagaaagtgaggtcgcgaaactgccagcgcatatgtaacaagctctgccagacatccagcgccagagtaacgcgtttaaccgaaaattcgccgccatcttttagttctgcacggatgtcgtgtgcttcaagcgtcgggccaaaattctgccagctggctgagagctgactggcttctaccggcatgccagtcgcggattctattttgttgaggatttccggacgccaggcgtcaagatgcggtaaagcaatacgcaggccgctaaccagcagggctgcgatcacaacgagcgcggctccagtaagcagtaaaatccccggcaatcgcctcacccgtcactccttgtctgctaaaaatgtgactcaaaaaccctttgccggatggcggcccagcatctgtttacatcattacgacgtcaaactgctcctggttatagagcggttcaatttgtactttaacctgtttaccaacgaaaatttccacttccgccagcgagtgtgactcttcgcctttcaaggcttcagctactgccggagaagcatagaccaggaaacggtcggagtcgtaagcatggtggacacgaacaatctcgcgcatgatttcatagcataccgtttccacggttttcaccgttccgcgaccgtggcaggttgggcattcgttacacagtacgtgctcaatgctttcgcgggtgcgtttacgcgtcatctccaccagccccagcgccgaaaaaccattaacgctggttttcacccggtctttgctcaacgcctgctccagcgagtgcagcacgcggcggcggtgatcttcattattcatatcgatgaaatcaataatgataatcccacccagattacgcaaccgtaactggcgagcgatagcctgcgtcgcttcaatattggtattgaaaatggtgtcgtccagattgcgatgaccgacaaacgctccggtattgatgtccacggtggtcatcgcttcggtctggtcgataatcagataaccaccggatttcagttctactttgcgttccagcgctcgctggatttcgttttcgacatcaaagagatcgaaaatcggctggcgtccggtgtaatgctccagcttgctggtcatctcgggaatgtactccgaggtaaactccagcaatgcttcgtaagtcaggcgtgagtcaacgcgaatgcggtccagttcggcgtcggcgaaatcacgcagaacacgctgcgccagcgccagttcgccgtacagctgataacgggtctgcgggcgttttttacgctccataactttggtccagacgcgtttcagataagcggcatcggaggccagttcagcctcgccaaccccttccgctgcggtacggatgataaacccgccctgctcgtcgcaatactctgcgaccacttttttcaggcgttcacgttctgattcgctttcaatacgttgggaaacaccaacgtgagaagcccctggcataaagaccagatagcgagaaggcagcgtgatatcggtggtcaggcgcgcccccttagtgccaagcggatctttcaccacctgcaccatcagatcttgcccctgacgaaccagttccgagatgtcgcgcaccgtgaattgcttttgttcttcacccgccacacattcggtgtgcggcatgatatcggatgcatgaagaaacgcggctttatccagcccaatatctacaaaagccgcctgcatacccggaagtacacgacttacacgacccttgtagatattgcctactattccgcgtcgcgcctcacgttcaatatgaatttcctgcagaataccgccatcaatatacgccactcgcgtttccgaaggcgttacgtttactaacaattcagccgtcatgtttatcccttttctcacgcagtgcgttaaaattacttaataattcatacgtttcaaccagcggtaagccgactacggcgtgatagctgccatttatcttcctgacaaaacagccacccagcccctgaataccgtatgcacctgctttatctaacggttcaccgctggcgacatagcccgcgatgtcttcgtctgttaacgttctgaaagtcacatcggtgaccaccaggcaatcgagaatgtgctggctgtcggccaacgccactgccgtcatcacctgatgggtctgacccgataatttgcgcaacatctgcgccgcatgctctgcgtcgcgcggtttctccagcacttctccattcaggataacgatagtatccgcacccagcaccgggagatcctgcgccgtttgcgcgacacccgcctgtgctttctcgcgcgccagacgcacaacatactgctgcgcgctctcctgcggctgacgctgctcctcaatgcccgtaacaatacgttcaaaggtcacgccaagttgcgcaagtaactcctgacgacgcggagaaccggaagctaaatacagagaagtcatagaaacctttattgcactgcaaactgctgacggactttacgcatcagcaagaaaatccacggccagagcaccccattgactacactactccagaacacttccggtctgaaagagacgttaatcactaaaaactctgcccagaaaacaataatatccaccaccagcgaaagcaacatgacgaccagcgcctgctgccataatgcgaggttgcggaaaagctggtatttcagcgccaccaggtaagcaatgatgctcatcgccaatacgcgtacgccaagcgtcgagccgctgatcagatccagtatggcacccatcacaaaacctgtgcccacatttacgcgatgaggcaaggccaggatccaatacaacaagatgagtaacacccagtttggccggaaaacaatcaggttatccggccagggcatgatttgcagcaacagcgcaatgaggaaagagagccagattacccaacgtccctggctacgatagctcgccactattgccctcccggcgcacgcgcaggcggttgagcaccactttgcggcggcgtagccctttgtggagagcgattagcagcaggctgtgtgggcgcagcaggcgcagtagctgcatttcctgtcgtcggttgctgcggagtcggctgagcgatccccgttgccggttcaggtaactttggccccatcgcgtctggcgaaggcaatacctgcggcatcatctgcatcagacgttcattagcaacacgatgcacctcttccggcgtcatcgggttagcgccgttacgatccgcgccccacagcagcagcagataacgcaaacgttgcagtcctgcagtcggacgcgcctgaatcacagtataagcgcgctgggtatcgagttttacggaagagacaaccgcgaccggatagccttccgggaaacgaccgcccagaccggaggtcaccagcacatcaccaacacgaatatccgtattcgctggcagatgctcaagctgcaaatcatccgtacaaccgttaccggctgcaattacgcggatatcgttgcgcagcacctggattggcagcgcgtgggtcgcatcacaaatcagcagcacgcgactggtcagtttagcgacggccaccacctgaccaacaacacctttgtcgctgatgaccggctggccttcataaacgccattaacgctacctttatcgataacaacttgatcgctataaggatcgttaaccgtggagataacctgagtcaccattttctgctcatcctgacgcagcggggaacccagcagctcgcgcagacgcgcgttctcctgtttgtattgtccaagcatcagcagttcactgtttttcagcaacagttcctgacgtaacgcccggttttcaagttctagttggtcacgcgaggccagcgtctgcgatacgccatccagcaattcacgaggagcattggaaacaaagtagaaaggactgacggcggtatccatataagtacggatttgactgaacgtccccaggcggctgtcggcaataataatgccgagcgccaccagcaccgccagaataaggcgaatctgtagcgacgggccacggctaaaaattggcttcataagttatgcgtattctcgtatcagaccaggcagggtaaacagacatttcccctgcctgcatccgattactcttcgctgaacaggtcgccgccgtgcatgtcgatcatttccagcgctttgccgccaccgcgcgccacacaggtcagcgggtcttcagcaacaacgactggaatgccggtttcttccattaacaaacggtcaaggttacgcagcagtgcgccaccaccggtgagcaccatgccgcgctcggagatgtcggaagccagttccggcgggcactgttccagtgcaaccattaccgcgctcacaataccggtcagcggttcctgcagtgcttcgaggatttcgttggagttcagggtaaaaccgcgtggaacaccttctgccaggttacggccacgaacttcgatttcacggacttcatcgcccgggtaagccgaaccgatttcgtgcttgatacgttctgcggtggcttcaccgatcagagaaccgtaattacgacgcacatagttgatgatagcttcgtcgaaacgatcaccaccaatgcgcacggaagaggagtaaaccacgccgttcaaggagataacagcaacttcagtggtaccaccaccgatatcaaccaccatagaaccggtcgcttcagaaaccggcaggccagcaccaattgcggcagccatcggttcttcaatcaggaagacttcacgggcaccagcgccctgcgcggattcacgaattgcgcggcgttcaacctgggtcgcgccaaccggtacacaaaccagaacgcgcgggcttggacgcataaagctgttgctgtgcacttgtttgatgaagtgctggagcattttttcagtcacgaagaagtcggcgataacgccgtctttcattgggcgaatggcagcaatattgcccggcgtacggcccagcatctgcttcgcgtcatgacctactgcagctacgcttttcggtgaaccggcacgatcctgacgaatggccaccacggaaggctcattcaatacgatgccttgtccttttacataaatgagggtattcgcagtacccaggtcaatggacaagtcattggaaaacatgccacgaaattttttcaacatactaagggataatcctgaaagctggggcggaaaagaaaatccgcttactttaccaaccacacgcagcagcgacaaggcgcaaaaatcatctgctacggtgaaaattagtgcagttcgtttcctttgttacaaatctctgcctgagtccagaaaggcttaatgcatcagcagcattcctcgcctgtttgcaaccgcgtaaggtcattcatctgcatatgtgctgcaacaatctggcgagcagacaagcacactcccatgagacgcagcgcgcgttattctacgtgaaaacagattaaacggcaggttaaaccgagtatctttgtgaatattttttcacgttagtatcaagtggctgtgaggacgcgaaaaaatccccttgcccgcctgtaacaccgcgctgaatcagggtctgccactcgcttcgcgaacgcacaccggtggcgtaaacttgggtgctggtcccggagcaggcttccaccaggctttgaaccagcagctggttctccgttcgcttctcaatgtttctgaccagccccggatggagcttgagtaactcaacattaagttctttgatccaactggtgcttaccagcgtcaaaccagcctggttgacggctacccgtacccctaaagcattcactaaacgaataacaggttgtaaacgactgatatgttgacctacatcggcctctgcaagttcaataattatgcgttttcgttgtgatttttcacattgcattaacgtatcgcgcagccaacgctgaaaacgcgggcgaatcagcgactcaacggtaacctgaatcgccagattttcctctggccagtaacgcaatagtggaataagacggctgatttgcagacggtcatactcttccgataagccaaactgcaagaccatcggcatatactccgccgagctaacctcttcattaccatcgaagatgcggcacatgagttcgcgatgatgaacctgaccttcgcgagtaaccgccggtttttgataaaggcgcgggccgccgcgactgagcatttgctcgataagcgtacgccagcgaacattaccgcgtcctttttcaggcaacgagtcatcgtaaatagcccagctattgccgccctgcaatcccgcattacgcgtggcagactctgcatgttccattacctgctcggtatcctgaccactacgccaggcgcagataccaatgtggatcatatcgtcgcgatcgagcattttattgttcggcaaggtatcgacggctttgattaactgaccggcgatgctctctgcctcttttaacgtccggtgcggtaacagcgcagcaaaatcactgcggtggtaacgcgccagcagtgcgccagggtagcgcatcataaatgtcgacagcagattcgtcagagtgaagaactgttcttcaacctggctgtgcccccaggtatcgctcaacatattgaaatccggcagacgaatcatcatcacgatcccgtgggtacctactttctcctgatcttccagtaacgttgctaactgattatcgaaaaagagtcggttattgaggccggttttcacgtcctgggcggcataagagcggatcagcgtatcaagacggctgtgttgttcgcgtgcgttctgaatttcacgaagcagcgtatctagcgcactgctggttctgggcggccattcatagatggttcccaacacattagagccacgctcaccgtttaagatacgagtagcccgggtttccagcaattcttgcccggcaagttgccgttgtaaccagcgtaccgccaggaagagcataacaatgataaagccaatcgcccccgtgagcggcgcggtagtcattaaagaatggaaatagttgcccatcggatcctgataaaccagacgcagcgacatccccggatgctttatcaacggaacactcagttcgcgaaacagatcgctggagccaaccggacgataactaccatttctggccagggtataaacctgtttatcaccatggagcaggtctacacgaacgatatctgccgacatcattaattcggtaatttgtggccttaatgtgctgaagtcattcgacacaaggtgggtatcaatcgccgtcgccaccgcctgaacgcgatgactaaacttatactgaattgcgttgtagaaacttagcgaacagcccagcaaagtcacaaaaattgttaacccggtgagcagcgtaacaaaggccgaaaatttcgtcgttaatctcatccttgtgttaactccgatagtgaggaagcgggcatactagcaaatcagatttatctcgcaatttattgcgcttcatcggctttgcttttccattagcgagtatagtcttcagaaattattttccaatccatcatgcacatgaggaccacttatgcaggcgttacttttagaacagcaggacggcaaaactctcgcatcggtacagacacttgacgaaagtcgcctgccggagggcgatgtcacggttgatgttcactggtcgagcctgaactataaagatgcgctggcgattaccggtaagggaaaaatcatccgtaattttccgatgattcctgggatcgattttgccggaactgtacgcaccagcgaagatccgcgttttcatgccggtcaggaggtgttactcactggctggggcgttggtgaaaaccactggggtgggctggcggagcaggcgcgagtgaaaggtgactggctggttgccatgccgcaagggctggacgcgcgtaaagcaatgattatcggtactgccggttttaccgccatgctgtgtgtgatggcgctggaagatgccggtgttcgcccgcaggacggggagattgtcgtgacgggtgccagtggtggcgtcggcagtaccgccgtggcgctgctgcataagttgggttatcaggtcgttgccgtttccggtcgcgaaagtacccatgaatacctgaaaagtttaggtgccagtcgtattctccctcgtgatgagtttgccgaatcccgtcctctggaaaaacaagtctgggctggggcaattgacactgttggcgacaaagtgctggcaaaagtgctggcgcaaatgaattacggcggctgcgtggctgcctgtggtctggcgggtggttttactctgccaaccacggtcatgccatttattctgcgtaatgtccgtttgcaaggggtggattcagtaatgacgccaccagaacgccgcgcacaagcctggcagcgactggtcgccgatttaccggaatcattctatacccaggcggcaaaagagatatctctgtcagaggcaccgaactttgccgaggccatcattaataaccagatccagggtcgcacgctggtgaaggttaactaaccatttagcaaggaataataagagaggaaactcattttgacatcattattcaatcggttaacgggaaaagcggttagccggacagctttcgtcgaacaccttggtcaggaagttgtacaacatcatccaaactggaaagtcatgatttcgactgaccacaaattgatgcgcattgatactcctctaaacagccattattgatatgcctccgtcgcctgttaggtttatggtgctttgcctgggcgacactacgcttaacctattactgatttctggtcccatggggtgaataatctgattttatttgactacaaattaaccactcgaacctatttaatgctgagaattgtcagtcggttgattttgcgtgctttagcattcacatctatccagacgatgcagtgaaaattgggtaatccccagcaaccgctgcgtaatgtcgtctatcttgtcgcgatcctggcatccctacattatttgtggtctgtgaagattatctcattgcagcccctcatcttcgcagggctggctttacagcttttcaccttacgttataagaagttccgtcgatgatggcgctaatttcgtgaattgtgcggcttgttgcaaattacacggtgttgaaggttatttacatgttagctgttgattatcttccctgataagaccagtatttagctgccaattgctacgaaatcgttataatgtgcgacctcgtcctccctgacacagtttttgcgctgcggaaaaggtgacattggcgcaacgaaggtatattttgttttttgccggaggatagcagcagatcgctgcacaatgtccgtcaagtctaacattgacactctggggcaaaatagaccggcgtcccggcctgctggaatttatcgctatgcatacagctgtcggggcatacgctttacagacggcggtgaaacgcctgtcacaatcacactaaacaaagagtacggaacccactcatggatattcgtaagattaaaaaactgatcgagctggttgaagaatcaggcatctccgaactggaaatctccgaaggcgaagagtcagtacgcatcagccgtgcagctcctgccgcaagtttccctgtgatgcaacaagcttacgctgcaccaatgatgcagcagccagctcaatctaacgcagccgctccggcgaccgttccttccatggaagcgccagcagcagcggaaatcagtggtcacatcgtacgctccccgatggttggtactttctaccgcaccccaagcccggacgcaaaagcgttcatcgaagtgggtcagaaagtcaacgtgggcgataccctgtgcatcgttgaagccatgaaaatgatgaaccagatcgaagcggacaaatccggtaccgtgaaagcaattctggtcgaaagtggacaaccggtagaatttgacgagccgctggtcgtcatcgagtaacgaggcgaacatgctggataaaattgttattgccaaccgcggcgagattgcattgcgtattcttcgtgcctgtaaagaactgggcatcaagactgtcgctgtgcactccagcgcggatcgcgatctaaacacgtattactggcagatgaaacggtctgtattggccctgctccgtcagtaaaaagttatctgaacatcccggcaatcataagcgccgctgaaatcaccggcgcagtagcaatccatccgggttacggcttcctctccgagaacgccaactttgccgagcaggttgaacgctccggctttatcttcattggcccgaaagcagacactattcgcctgatgggtgacaaagtgtcggcaatcgcggcgatgaaaaaagcgggcgttccttgcgtaccaggttctgacggcccgctgggcgacgatatggataaaaaccgtgccattgctaaacgcataggttatccggtgattatcaaagcctccggcggcggcggcggtcgtggtatgcgtgtagtgcgcggcgacgctgaactggcacaatccatctccatgacccgtgcggaagcgaaagccgcattcaataacgatatggtttacatggagaaatacctggaaaatcctcgccacgtcgagattcaggtactggctgacggtcagggcaacgctatctatctggcggaacgtgactgctctatgcagcgtcgtcaccagaaagtggtcgaagaagcaccagcaccgggaattacaccggaactgcgtcgctacatcggcgaacgttgtgctaaagcgtgtgttgatatcggctatcgcggtgcaggtactttcgagttcctgttcgaaaacggcgagttctatttcatcgaaatgaacacccgtattcaggtagaacacccggttacagaaatgatcaccggcgttgacctgatcaaagaacagctgcgtatcgctgccggtcaaccgctgtcgatcaagcaagaagaagttcacgttcgcggccatgcggtggaatgtcgtatcaacgccgaagatccgaacaccttcctgccaagcccaggcaaaatcacccgtttccacgcacctggcggttttggagtgcgttgggagtctcatatctacgcgggctacaccgtaccgccgtactatgactcaatgatcggtaagctgatttgctacggtgaaaaccgtgacgtggcgattgctcgcatgaagaatgcgctgcaggagctgatcatcgacggtatcaaaaccaacgttgatctgcagatccgcatcatgaatgacgagaacttccagcatggtggcactaacatccactatctggagaaaaaactcggtcttcaggaaaaataagactgcaaaagcgtcaaaaggccggattttccggccttttttattactggggatcgacaacccccataaggtacaatcctcgctttcttcacccatcagggacaaaaaatggacactcgttttgttcaggcccataaagaggcgcgctgggcgctggggctgacccttttgtatctggcagtttggttagtagccgcttacttacctggcgttgcccccggttttaccggctttccgcgctggtttgagatggcctgcatcctgacgccgctgctgtttattggactgtgctgggcgatggtgaaatttatctatcgcgatatcccactggaggatgacgatgcagcttgaagtaattctaccgctggtcgcctatctggtggtggtgttcggtatctcggtttatgcgatgcgtaaacggagcaccggcaccttccttaatgagtatttcctcggcagccgctctatgggcggtattgtgctggcgatgacgctcaccgcgacctatatcagtgccagttcgtttatcggcgggccaggagctgcttataaatacgggctgggctgggtattgctggcgatgattcagcttcctgcagtctggctttcactcggtattctcggcaagaagtttgcgattcttgcgcgccgctacaatgcagtgacgctgaacgatatgctgtttgcccgctaccagagtcgtcttctggtgtggctggcgagtttgagtttgctggttgcgttcgttggtgcgatgaccgtgcagtttatcggcggtgcgcgcctgctggaaaccgcggcgggtattccttatgaaaccgggctgctgatttttggtatcagcattgcgttatataccgcctttggtggctttcgcgccagcgtgctgaacgacaccatgcaagggcttgtgatgctgattggcaccgttgtgctgcttattggcgtggtacatgccgctggcggcttaagcaacgcagtacagaccttgcaaaccatcgatccgcaactggttacgccacaaggcgctgacgatattctgtcgcctgcctttatgacgtcgttctgggtactggtgtgctttggcgtgattggcctgccgcatactgcggtgcgctgtatctcttataaagacagcaaagcggtacaccgggggatcatcatcggtacgattgtagtcgcaatcctgatgttcggtatgcacctggccggagcgttaggtcgtgcagtgatccccgatctcaccgtaccggatctggtgatcccgacgttaatggtaaaagtgctgccaccgtttgctgccgggatctttctggctgcacctatggctgcgatcatgtcgacgatcaatgcccagttgctgcaaagttccgctacgatcattaaagatctctatctgaatatccgtccggatcaaatgcaaaacgagacgcgtctgaagcggatgtcggcggtaattacgttagttctcggcgcgttgctgctgcttgccgcctggaagccgccagaaatgatcatctggctgaatttgctggccttcggtgggctggaagccgttttcctgtggccgctggtgctgggtctttactgggaacgcgccaacgccaaaggcgcgctaagtgcgatgatcgttggcggcgtgctgtatgccgtactcgcgacgctgaatattcagtacctgggcttccaccctattgtgccctcgttactactaagtttgctggctttcctggtcggaaaccgtttcggtacatccgtcccgcaagctaccgttttgactactgataaataaagagttttgccatgccttggatccaactgaaactgaacaccaccggcgcgaacgcggaagatcttagcgatgcgctgatggaagcgggtgccgtttctatcacttttcaggatacccacgatacgccagtatttgagccgctgccgggcgaaacgcgcctgtggggcgacaccgatgtgattggtctgttcgacgctgaaaccgatatgaacgacgtggtggcgattctggaaaaccatccgctgctcggcgcaggcttcgcgcataaaatcgaacaactagaagataaagactgggagcgcgaatggatggataatttccacccgatgcgctttggtgaacgactgtggatctgccctagctggcgtgatgtgccggacgaaaacgccgtcaacgtgatgttagatccagggctggcgtttggtacgggtacccatccaaccacctctctgtgcctgcaatggctcgacagcctcgatttaaccggtaaaacagtcatcgactttggctgtggttccggcattctggcgatcgcggcgctgaaactgggtgcagcaaaagccattggtattgatatcgatccgcaggcgattcaggccagccgcaacaacgccgaacgtaatggcgtttctgaccgtctggaactctacttaccgaaagatcagccagaagaaatgaaagccgacgtggtggtcgctaacatccttgcaggcccattacgtgaactggcaccgttaatcagcgtcctgccggtttcaggcggtttgctgggcctttccggtattctggcaagccaggcagagagcgtttgtgaagcttatgccgatagcttcgcactggacccggtcgtggaaaaagaagagtggtgccgtattaccggtcgtaagaattaaccttcgcatcgccgtagggtgacgcggggcgaagtgcgagcaagctcacaaaaggcacgtaaatttgccggttatttacgcaaatttgcgtgccaaaattttcattcataaagaaaaattgagaacttactcaaatttctttgagtgtaaattttagtcactattttctaatatgatgatttttatgagtaattatcgcaccacgctcattttaaatgcaattctttgatccatctcagaggattggtcaaagtttggcctttcatctcgtgcaaaaaatgcgtaatatacgccgccttgcagtcacagtatggtcatttcttaactcatgcgcatcggacaatatcagctcagaaatcgcctgatcgcagcgcccatggctggcattacagacagaccttttcggacgttgtgctacgagatgggagccggattgacagtatccgagatgatgtcttctaacccacaggtttgggaaagcgacaaatctcgtttacggatggtgcacattgatgaacccggtattcgcaccgtgcaaattgctggtagcgatccgaaagaaatggcagatgcagcacgtattaacgtggaaagcggtgcccagattattgatatcaatatgggttgcccggctaaaaaagtgaatcgcaagctcgcaggttcagccctcttgcagtacccggatgtcgttaaatcgatccttaccgaggtcgtcaatgcagtggacgttcctgttaccctaaagattcgcaccggctgggcaccggaacaccgtaactgcgaagagattgcccaactggctgaagactgtggcattcaggctctgaccattcatggccgtacacgcgcctgtttgttcaatggagaagctgagtacgacagtattcgggcagttaagcagaaagtttccattccggttatcgcgaatggcgacattactgacccgcttaaagccagagctgtgctcgactatacaggggcggatgccctgatgataggccgcgcagctcagggaagaccctggatctttcgggaaatccagcattatctggacactggggagttgctgcccccgctgcctttggcagaggttaagcgcttgctttgcgcgcacgttcgggaactgcatgacttttatggtccggcaaaagggtaccgaattgcacgtaaacacgtttcctggtatctccaggaacacgctccaaatgaccagtttcggcgcacattcaacgccattgaggatgccagcgaacagctggaggcgttggaggcatacttcgaaaattttgcgtaaacagaaataaagagctgacagaactatgttcgaacaacgcgtaaattctgacgtactgaccgtttctaccgttaactctcaggatcaggtaacccaaaaacccctgcgtgactcggttaaacaggcactgaagaactattttgctcaactgaatggtcaggatgtgaatgacctctatgagctggtactggctgaagtagaacagcccctgttggacatggtgatgcaatacacccgtggtaaccagacccgtgctgcgctgatgatgggcatcaaccgtggtacgctgcgtaaaaaattgaaaaaatacggcatgaactaattcaggttagctaaatgcttgattaaaaaggcgctactcggcatggggaagcgccttttttataggtgtcacaaagggagtgaccatgagaacaggatgtgaaccgacccggtttggtaatgaagctaagaccattattcacggtgatgcgcttgccgaacttaaaaagatccccgccgaaagtgtcgatctgatctttgccgacccaccatataacatcggtaaaaattttgatggtctgatcgaagcctggaaagaagatctgtttatcgactggctgtttgaagtgattgcagagtgccaccgcgttctgaaaaagcagggcagcatgtacatcatgaacagcacggaaaacatgccctttatcgatctccagtgccgcaagctttttaccatcaaaagtcgcatcgtctggtcatatgacagttctggagtacaggcgaaaaaacactacggctccatgtacgaacccatcctgatgatggtgaaagacgcaaagaactacacattcaacggtgatgctattctggtagaagccaaaaccggatcgcagcgcgcgttgatcgattatcgcaaaaatcctccacagccatacaatcatcaaaaagtaccgggtaacgtctgggattttccgcgcgtgcgttatttgatggatgaatatgagaaccacccgacgcaaaaaccggaagccttactgaaacgcattattctcgcctcttccaacccaggcgatatcgttctcgacccgtttgccggtagctttactaccggtgccgtagccgtcgccagcgggcgaaaattcattggtattgagatcaacagcgagtacatcaaaatggggcttcgacgactggatgtcgcgtcacattactccgcggaggaactggcgaaagtgaaaaaaagaaagacgggcaaccggtcaaaacgatgtcgggttagcgaagttgaccccgatctcattgcaaagtaaaggaagtgtaagcctggttttcagattattcatttcgtgtatatttcctgccagacttggttaaacatacacaggctcaggtaatgattcgcaagtattggtggctcgtcgttttcgctgtcttcgtttttctgtttgatactttactgatgcagtggattgaactgctggcaacagaaacagacaaatgccgcaatatgaactcagttaatccactaaaactggttaactgtgacgaactgaattttcaggacagaatgtgaatttacatgacacttaattcattcgtttgatgaattaatttcgttatgttttcatctggcatgaacattcttaatacgttatcgaccagagcgggggcttgtttataaagatcataacccgccatattcattaaccagttttgaacaattccgctgaaggcaccattaataataatcatcacaacatctaaatcgaggttatttgctacacaaccttgttgctgacacgcctgcaatacttcgcggagagtctgcggattgaagcccatcttttcgcgtatcactccctcggccagcatctcatcattaaattcacatttgtgatataagattttcagcaacgcctgctggcggggaattttggcaatatattgcaagccgacaatcaatttttcacgcaattgttgaaacgggtcatgctctaatccagccgtcaagtgttcctggattaactcccgcaatgaaggctgttgcaaccacatctcattaaacagttgagtcttgttttcgaagtgccagtagatagcgccacgcgtaacgttagcagcgtcggcaatgtcgttgagtgtcgtcttgcttacgccatgctgcgcaaactgggcgatggcagtttcaatcagttcttgccgggtcttcagagcttcggctttggttctttttgccatgattaattattcaggaaataaatatattcgatacagagtgagaaaatagcgaaggttaatctatcacctaatgtgtatttatacgagaggctaatattgagttgctataaatcgtcaaataaataatatatattatttacctaaaatacattcgccacatgaatatatatttcaatttacgaggttttaattctgcctctttcaacccgcgtcaaaataaaacagtagaatattaatctttttttgtgtttatgtgccttgagacgccagtattcataactattccttacatcgacgaatgataatttgtaggatagcaaactgtatttttctttctgcgagttaacgcgttgcctttctgggtaaataacgcgcttttggttttttgaggaatagtaatgacgaaacatgccaggtttttcctcctgccctcctttattctgatctccgcggctttaatcgccggttgtaacgataagggagaagagaaagctcacgtcggtgaaccgcaggttaccgttcatattgtgaaaacggccccgttagaagttaagactgaattaccaggccgcaccaatgcttaccgtatagccgaagttcgcccacaggttagcgggatcgtactgaatcgtaatttcactgaaggcagcgatgtacaagcaggccagtccctgtaccagatcgatcccgcgacctatcaggcaaattatgacagcgcgaaaggcgaactggcgaaaagtgaagccgccgccgccatcgcgcatttgacggtaaaacgttacgttccgctcgtgggtacgaaatacatcagccagcaggagtacgaccaggccattgctgatgctcgccaggccgatgctgccgtgattgccgcaaaagccacagtcgaaagcgctcgcatcaatctcgcttataccaaagtgactgcgccaattagcggacgtatcggcaaatcgaccgtgaccgaaggcgctcttgtcactaatgggcaaacgactgaactggcgactgtccagcagctcgatcctatctacgttgatgtgacccaatccagcaacgattttatgaggctgaagcaatccgtagagcaaggaaatttgcataaggaaaacgccaccagcaacgtagagttggtcatggaaaacggtcaaacctatcccctgaaaggtacgctgcaattctctgatgtgaccgttgatgaaagcaccggctccataaccctacgtgccgtcttccctaacccgcaacatacgcttttgccgggtatgtttgtgcgcgcacggattgatgaaggcgtccaacctgacgccattcttatcccgcaacaaggcgttagccgcacaccgcgtggtgatgcaaccgtgctgattgttaacgataaaagtcaggtggaagcgcgccctgtcgttgccagtcaggcgattggcgataaatggttgattagcgaaggtctgaaatctggcgatcaagtcattgtcagcggcctgcaaaaagcgcgtccgggagagcaggttaaagccactaccgatacccccgcagatactgcatcgaagtaaggtaatctgacatggcaaacttttttattcgacgaccgatatttgcatgggtgctggccattattctgatgatggcgggcgcactggcgatcctacaattacccgtcgctcagtatccaaccattgcaccgcctgcggtttctgtttcagcaaactatccgggcgctgatgcgcagaccgtgcaggatacggtgacgcaggttatcgaacagaatatgaacggtatcgataacctgatgtatatgtcctccaccagcgattccgccggtagcgtgacaattacccttaccttccagtccgggaccgatcctgatatcgcgcaagtgcaggtgcagaacaaactccagctcgccacgccgttgctgccgcaggaggttcagcagcaggggatcagtgttgaaaagtccagtagcagctatttgatggtggcgggctttgtctctgataacccagacaccacacaggacgatatctcggactatgtggcctctaacgttaaagatacgcttagccgtctgaatggcgtcggtgacgtacagcttttcggcgcacagtatgcgatgcgtatctggctggacgccgatctgctaaacaaatataaactgacaccggttgatgtgattaaccagttgaaggtacagaacgatcagatcgctgccggacagttgggcggaacgccagcgttaccagggcaacagttgaacgcctcaattattgctcagacgcggttaaaaaatccggaagaattcggcaaagtaaccctgcgcgtaaacagtgacggctcggtggtacgcctgaaagatgtcgcacgagttgaacttggcggtgaaaactataacgttatcgctcgtatcaacggaaaaccggcggcgggcctggggattaagctggcaaccggcgcgaatgctctcgataccgcgaaagccattaaggcaaaactggcggaattacagccattcttcccgcagggaatgaaggttctctacccttatgacaccacgccattcgtccagctttctattcacgaagtggtaaaaacgctgttcgaagccattatgctggtgttcctggtgatgtatctgttcttgcagaatatgcgagcaacgctgatccccaccattgcggtacccgtggtgttattagggacgtttgccatcctcgccgcttttggttactccatcaacacactaacgatgttcgggatggtgcttgccatcgggctgctcgtcgatgatgcgatagtggtggtggagaacgtcgagcgcgtgatgatggaggataagctcccgccaaaagaagcgacggaaaaatcgatgtcgcaaattcagggcgcactggtgggtatcgcgatggtgctgtcagcggtatttattccgatggcattcttcggcggttctactggggcaatttatcgccagttctctatcaccatcgtttcggcaatggcgctttctgttctggtggcattgattcttacccctgcgttatgtgcaacactgctcaaacccacctcagctgagcatcacgaaaataagggtggtttcttcggctggtttaataccaccttcgatcatagcgttaaccactacaccaacagcgtcggcaaaatcctcggttccacaggacgatatttactgatctatgcgctgattgttgcaggaatggtggtgttgtttttacgtcttccgtcttccttcttacctgaagaggatcagggtgtctttctgaccatgattcagttacccgctggcgcgacgcaagagcggacgcaaaaagtgttggatcaagtgacggattactatctgaagaacgagaaagcgaacgttgaaagtgtctttacggttaacggctttagcttcagcggccaggcacaaaacgccggtatggccttcgtcagtctgaaaccgtgggaagagcgtaatagtgatgaaaacagtgcggaagcggtaatccatcgtgccaaaatggaattgggcaagatccgcgacggttttgtcattccattcaatatgccagccattgttgaactgggcacggcaacgggtttcgactttgagttaattgatcaggctgggctgggtcacgatgccctgacccaggcccgtaaccagttgcttggcatggcggcgcaacatcctgccagcttagtcagcgtgcgtcctaatggcctggaagacaccgcgcagtttaaactggaagttgaccaggaaaaggcgcaggcattaggtgtttcactttctgacatcaatcagaccatttcaacggcgttgggtgggacttacgttaacgacttcatcgaccgtggtcgcgtgaaaaaggtgtatgttcaggcggatgccaaattccgtatgctgccagaagatgtcgataaactttatgtccgcagcgccaacggcgaaatggtgccattctcggcctttaccacttcacattgggtgtatggctctccgcgactggaacgctacaacggtctgccgtcaatggagattcagggggaagccgcgccaggaaccagttccggcgatgccatggcgttgatggaaaaccttgcgtcaaaattacctgcgggcattggttatgactggacgggtatgtcgtatcaggaacgcttatcgggaaaccaggctcccgctctggtagcaatttcctttgtggttgttttcctgtgccttgctgcactctatgaaagctggtcaattcctgtctcggttatgttggtagtgccgttagggattgtcggcgtgctactggcggcaacactctttaatcaaaaaaatgacgtctactttatggtgggcttgctaacgacaattggcttgtcggccaaaaacgctattttgattgttgagttcgctaaagatctcatggagaaagagggtaaaggtgttgttgaagcgacactgatggcagtacgtatgcgtctgcgtcctatcctgatgacctctctcgcctttattctcggcgtattaccgctagctatcagtaacggtgccggcagtggcgcgcagaacgctgtgggtatcggggtaatgggaggaatggtctctgcaacgttgctggcaatcttcttcgtaccggtgttctttgtggtgatccgccgttgctttaaaggataaatcagaaacataaaggcgctttcgggtgcctttattatttccagtgaaacccataaaaattaataagatattcttctgctcactctttaaaagctttctatagttcccgctcccttcactatttttacaattcacataatttgtcattattcattccgcaagatttataacctccggtgataaaatggcattcagctcgttaataagagagttaacttattaagcgttagcgtttattactgaggtaacaccatgaaaagattaattcctgtggcattgctcaccgcattgctggcgggctgtgctcacgattcgccctgcgttccggtttatgacgatcagggtcgtctggttcacaccaatacctgtatgaaaggcacgactcaggataactgggaaacggctggggctattgctggcggggcagcggctgttgctggcctgacgatggggatcatcgctctgtcgaaataactgaacagggcgcggagtttcgcgctctgtttaacgatacagtatctttacataagataaaatattgctatattctgctggctaattctctgctgatttagcatgttatatcgcgttatttcgctgctttcgaaataacgcatcaatttaactttcacacttcccaccagaaatatactcacgctaacaatcattattctgcttagtaaaacacgcgtaaatattttgcgccaaaatgtggcgcatgtttcattttcgcaccattgcggggcgctgtttttattatttcctgtctacactcagcttattgcgacgcgaaatcgggcgcaaaagctggcactacttttgcttataagaggatggccacagacaggtaaaagacgtttcccaaacgtcctataacgataattttcgcctcacaggaagcattatgaaaaagatgatgatagccacactggctgccgccagcgtgctgcttgccgttgcaaatcaggcgcatgctggcgcgacgcttgatgccgttcagaaaaaaggttttgtgcaatgcgggatcagtgatggattacctgggttctcttatgccgatgcagacggtaagttttcaggtattgatgttgatgtttgtcgtggtgttgccgctgctgtatttggtgacgacacgaaagtgaaatataccccactcacagcaaaagaacgcttcaccgctttacagtcaggggaagtggatttgctctcccgtaatacgacctggacttcatctcgcgatgccgggatgggaatggcatttaccggcgtcacttattacgacggcattggcttcctgacgcacgataaagcggggctaaaaagcgcgaaagaactggatggcgctaccgtctgtattcaggcgggtactgataccgaactcaacgttgccgactatttcaaggcaaacaatatgaagtacacaccggtgactttcgatcgctctgacgaatcagcgaaggcactggaatctggtcgctgcgatacgctggcctcggatcagtcgcaactgtatgccctgcgcatcaaattaagcaacccagctgaatggattgtcttaccggaggttatctctaaagaaccgcttgggccggtagttcgtcgtggcgatgatgaatggttctcgattgtacgctggacgcttttcgccatgctgaatgctgaagagatgggcatcaattcccagaacgtcgatgaaaaagcggctaatccagcaacgcctgatatggcacatctgctgggtaaagaaggcgattacggcaaggatctgaagctggataataaatgggcctataacatcatcaaacaggtgggtaactactcggaaattttcgagcgtaacgtaggttcagaaagcccgctgaaaattaaacgtgggcaaaataatctctggaataacggcggtattcagtacgcgccgcccgtgcgttaagtcagtgtgaggtaacgggcgtcgctacggcggcgctctcttcagcgttatgctttccgaggtttctatgtctcatcgccgctcaaccgttaaaggctcactctcttttgccaaccctacggttcgcgcctggttattccagatccttgccgttgttgctgttgtcggcattgttggttggttatttcacaacactgtaacgaatctcaataatcgtggcattacttcaggttttgcctttctggatcgcggcgctggcttcggtattgtccagcatttgatcgattaccagcagggcgacacctacggacgcgtttttattgtcggcttactcaatacgctactggtttctgcattgtgtattgtgttcgcttctgttttaggcttctttatcggtctggcgagactttcggataactggctgctacgaaaactatccacaatttatattgagatcttccgtaatattcccccgctgctgcaaatcttcttctggtactttgccgtgttgcgcaatttgcccggaccacgccaggctgtgagcgcgtttgatctggcctttttgagcaatcgtgggctttatattccgtcaccgcagctgggagacggatttattgcgtttatcctggctgttgttatggctatagtcctttctgttgggctattccgctttaataaaacataccagataaagaccggacaactgcgccgcacctggccgatcgccgcagtgttgatcattggtttgcctttactggcgcaatggctttttggcgcagcactacactgggatgtcccagccctacgaggctttaacttccgcggcgggatggttttaattcctgaactggcagccttaacgctggcactttcggtttatacatctgcatttatcgccgagattatccgcgctgggatccaggcagtgccttatggtcaacatgaagcggctcggtcactgggattacccaacccggttacgctacgccaggtcattattccccaggcactgcgagtgattattccgccgttaaccagccagtatctcaacatcgtcaaaaactcctctcttgccgccgctattggctatcccgatatggtttcgctgtttgctggcaccgtgctgaaccagacggggcaagccatcgagacgatagccatgaccatgtcggtctatctgattatcagcctgactatctcgctgctgatgaatatctataaccgccgcatcgcgatcgttgaacgctaaggagtcatgatgacaaaagtattgctgtctcagccctcgcgcccagcgagccataactcaagccgcgcgatggtgtgggtgcgaaaaaatctgttctccagctggagcaatagcctgctgactattggctgcatatggttgatgtgggaactgatcccaccgttgctgaactgggcatttttgcaggctaattgggttggctcaacgcgtgccgactgcacaaaagccggtgcctgttgggtcttcatccacgaacgatttggtcagtttatgtatggactttacccacacgaccaacgctggcgaattaacctggcattactgattggccttgtgtcaatcgcaccaatgttctggaaaatactcccgcatcgcggtcgctatattgcggtctgggcggtgatttacccactgattgtctggtggctgatgtatggcggtttttttggtctggagcgggttgaaacccggcaatggggcgggctgacgctaactttaattattgcatccgttgggattgcgggggcgctaccgtgggggatcttactggcgttaggtcgccgctcccatatgccgattgtgcgtatcttatcggtcatttttatcgagttctggcgcggcgtaccgctgattaccgtattgtttatgtcttcggtcatgctgcctttgtttatggcagaaggcaccaatatcgacaaactgatccgcgcgctggttggcgtgatcctgtttcagtcagcatatgttgcggaagtcgtgcgaggcggattacaggcgctgcctaaagggcaatatgaagcggcagagtcgctggcgttgggttactggaaaactcaggggctggttattctgccacaggcgttgaagctggtaattcctgggctggtaaataccatcatcgcactcttcaaagataccagcctggtgatcattatcgggttgttcgatcttttcagtagcgttcagcaggcaaccgttgatcccacctggttgggtatgtcgacggaagggtatgttttcgccgcgctgatctactggatcttctgtttcagcatgtcgcgctatagccagcatctggaaaaacgttttaacaccgggcgtacaccgcattgaggacactatgagccaaattttactgcaacctgctaacgcgatgattacgctggaaaacgtcaataaatggtatggacaattccatgttttgaaaaatataaatttaaccgcgcaaccgggagaacggatcgttctgtgtggcccttcaggttccggtaaatcgacaaccattcgttgtattaatcatctggaagaacatcaacagggacggatcgtggtagatggcatcgaacttaatgaagatatccgcaatattgagcgcatccggcaggaagtgggaatggtctttcagcatttcaatctcttccctcatctgaccgttctacagaactgtaccctggcaccgatttgggtacgcaagatgccaaagaaagaggctgaagctctggcgatgcattaccttgagcgggtgagaattgccgaacatgcgcataagtttcccggacaaatttctggtggtcagcagcaacgcgttgccattgcgcgttcgctgtgtatgaagccgaaaattatgttgtttgatgagccaacgtcggcgctcgatccggagatggtgaaagaggtgctggatacgatgattgggctggcgcagtcgggtatgacaatgttgtgtgtaacacatgagatggggtttgcacgtaccgtcgctgaccgggtaatttttatggatcgtggggagatagtggaacaagctgcacctgatgaattttttgcgcatcctaaatcagagcgtacgagggcatttttatcgcaggtaatccattaattgaatgttagttcgaaaagcaaaaaggccatcctttcggatggcctttcgcttgatttgatgtctggcagtttatggcgggcgtcctgcccgccaccctccgggccgttgcttcgcaacgttcaaatccgctcccggcggatttgtcctggttgggagagtgttcaccgacaaacaacagataaaacaaaaggcccagtcttccgactgagccttttgttttatttgatgtctggcagttccctactctcgcatggggagaccccacactaccatcggcgctacggcgtttcacttctgagttcggcatggggtcaggtgggaccaccgcgctactgccgccagacaaattcttttctaatctgccgaactttaacctaaaaagtggtgctgatacccagagtcgaactggggacctcacccttaccaagggtgcgctctaccaactgagccatatcagcacgctaaatttgatgcctggcagttccctactctcgcatggggagaccccacactaccatcggcgctacggcgtttcacttctgagttcggcatggggtcaggtgggaccaccgcgctacggccgccaggcaaattctgttttatcagaccgcttctgcgttctgatttaatctgtatcaggctgaaaatctttctctcatccgccaaaacagcttcggcgttgtaaggttaagcctcacggttcattagtaccggttagctcaacgcatcgctgcgcttacacacccggcctatcaacgtcgtcgtcttcaacgttccttcaggacccttaaagggtcagggagaactcatctcggggcaagtttcgtgcttagatgctttcagcacttatctcttccgcatttagctaccgggcagtgccattggcatgacaacccgaacaccagtgatgcgtccactccggtcctctcgtactaggagcagcccccctcagttctccagcgcccacggcagatagggaccgaactgtctcacgacgttctaaacccagctcgcgtaccactttaaatggcgaacagccatacccttgggacctacttcagccccaggatgtgatgagccgacatcgaggtgccaaacaccgccgtcgatatgaactcttgggcggtatcagcctgttatccccggagtaccttttatccgttgagcgatggcccttccattcagaaccaccggatcactatgacctgctttcgcacctgctcgcgccgtcacgctcgcagtcaagctggcttatgccattgcactaacctcctgatgtccgaccaggattagccaaccttcgtgctcctccgttactctttaggaggagaccgccccagtcaaactacccaccagacactgtccgcaacccggattacgggtcaacgttagaacatcaaacattaaagggtggtatttcaaggtcggctccatgcagactggcgtccacacttcaaagcctcccacctatcctacacatcaaggctcaatgttcagtgtcaagctatagtaaaggttcacggggtctttccgtcttgccgcgggtacactgcatcttcacagcgagttcaatttcactgagtctcgggtggagacagcctggccatcattacgccattcgtgcaggtcggaacttacccgacaaggaatttcgctaccttaggaccgttatagttacggccgccgtttaccggggcttcgatcaagagcttcgcttgcgctaaccccatcaattaaccttccggcaccgggcaggcgtcacaccgtatacgtccactttcgtgtttgcacagtgctgtgtttttaataaacagttgcagccagctggtatcttcgactgatttcagctccatccgcgagggacttcacctacatatcagcgtgccttctcccgaagttacggcaccattttgcctagttccttcacccgagttctctcaagcgccttggtattctctacctgaccacctgtgtcggtttggggtacgatttgatgttacctgatgcttagaggctttttcctggaagcagggcatttgttgcttcagcaccgtagtgcctcgtcatcacgcctcagccttgattttccggatttgcctggaaaaccagcctacacgcttaaaccgggacaaccgtcgcccggccaacatagccttctccgtccccccttcgcagtaacaccaagtacaggaatattaacctgtttcccatcgactacgcctttcggcctcgccttaggggtcgactcaccctgccccgattaacgttggacaggaacccttggtcttccggcgagcgggcttttcacccgctttatcgttacttatgtcagcattcgcacttctgatacctccagcatgcctcacagcacaccttcgcaggcttacagaacgctcccctacccaacaacgcatcagcgtcgctgccgcagcttcggtgcatggtttagccccgttacatcttccgcgcaggccgactcgaccagtgagctattacgctttctttaaatgatggctgcttctaagccaacatcctggctgtctgggccttcccacatcgtttcccacttaaccatgactttgggaccttagctggcggtctgggttgtttccctcttcacgacggacgttagcacccgccgtgtgtctcccgtgataacattctccggtattcgcagtttgcatcgggttggtaagtcgggatgacccccttgccgaaacagtgctctacccccggagatgaattcacgaggcgctacctaaatagctttcggggagaaccagctatctcccggtttgattggcctttcacccccagccacaagtcatccgctaatttttcaacattagtcggttcggtcctccagttagtgttacccaaccttcaacctgcccatggctagatcaccgggtttcgggtctataccctgcaacttaacgcccagttaagactcggtttcccttcggctcccctattcggttaaccttgctacagaatataagtcgctgacccattatacaaaaggtacgcagtcacacgcctaagcgtgctcccactgcttgtacgtacacggtttcaggttctttttcactcccctcgccggggttcttttcgcctttccctcacggtactggttcactatcggtcagtcaggagtatttagccttggaggatggtccccccatattcagacaggataccacgtgtcccgccctactcatcgagctcacagcatgtgcatttttgtgtacggggctgtcaccctgtatcgcgcgcctttccagacgcttccactaacacacacactgattcaggctctgggctgctccccgttcgctcgccgctactgggggaatctcggttgatttcttttcctcggggtacttagatgtttcagttcccccggttcgcctcattaacctatggattcagttaatgatagtgtgtcgaatcacactgggtttccccattcggaaatcgccggttataacggttcatatcaccttaccgacgcttatcgcagattagcacgtccttcatcgcctctgactgccagggcatccaccgtgtacgcttagtcgcttaacctcacaacccgaagatgtttcttgcgaaccatcatcgtgttgcgaaaatttgagagactcacgaacaactctcgttgttcagtgtttcaattttcagcttgatccagatttttaaagagcaaaacttcgcagtgaacctttgcaggtacactctgaagtattttttatttaatcactacagagatggtggagctatgcgggatcgaaccgcagacctcctgcgtgcaaagcaggcgctctcccagctgagctatagccccataacatgtagttaaaacctcttcaaatttgcggtgcaaatttggtaggcctgagtggacttgaaccaccgacctcacccttatcaggggtgcgctctaaccacctgagctacaagcctgtagaggttttactgctcattttcatcagacaatctgtgtgagcacttcaaagaacgcttctttaaggtaaggaggtgatccaaccgcaggttcccctacggttaccttgttacgacttcaccccagtcatgaatcacaaagtggtaagcgccctcccgaaggttaagctacctacttcttttgcaacccactcccatggtgtgacgggcggtgtgtacaaggcccgggaacgtattcaccgtggcattctgatccacgattactagcgattccgacttcatggagtcgagttgcagactccaatccggactacgacgcactttatgaggtccgcttgctctcgcgaggtcgcttctctttgtatgcgccattgtagcacgtgtgtagccctggtcgtaagggccatgatgacttgacgtcatccccaccttcctccagtttatcactggcagtctcctttgagttcccggccggaccgctggcaacaaaggataagggttgcgctcgttgcgggacttaacccaacatttcacaacacgagctgacgacagccatgcagcacctgtctcacggttcccgaaggcacattctcatctctgaaaacttccgtggatgtcaagaccaggtaaggttcttcgcgttgcatcgaattaaaccacatgctccaccgcttgtgcgggcccccgtcaattcatttgagttttaaccttgcggccgtactccccaggcggtcgacttaacgcgttagctccggaagccacgtctcaagggcacaacctccaagtcgacatcgtttacggcgtggactaccagggtatctaatcctgtttgctccccacgctttcgcacctgagcgtcagtcttcgtccagggggccgccttcgccaccggtattcctccagatctctacgcatttcaccgctacacctggaattctacccccctctacgagactcaagcttgccagtatcagatgcagttcccaggttgagcccggggatttcacatctgacttaacaaaccgcctgcgtgcgctttacgcccagtaattccgattaacgcttgcaccctccgtattaccgcggctgctggcacggagttagccggtgcttcttctgcgggtaacgtcaatgagcaaaggtattaactttactcccttcctccccgctgaaagtactttacaacccgaaggccttcttcatacacgcggcatggctgcatcaggcttgcgcccattgtgcaatattccccactgctgcctcccgtaggagtctggaccgtgtctcagttccagtgtggctggtcatcctctcagaccagctagggatcgtcgccttggtgagccgttaccccaccaacaagctaatcccatctgggcacatccgatggcaagaggcccgaaggtccccctctttggtcttgcgacgttatgcggtattagctaccgtttccagtagttatccccctccatcaggcagtttcccagacattactcacccgtccgccactcgtcagcgaaacagcaagctgtttcctgttaccgttcgacttgcatgtgttaggcctgccgccagcgttcaatctgagccatgatcaaactcttcaatttaaaagtttgatgctcaaagaattaaacttcgtaatgaattacgtgttcactcttgagacttggtattcatttttcgtcttgcgacgttaagaatccgtatcttcgagtgcccacacagattgtctgataaattgttaaagagcagttgcgacgcagctttcagctcactgtcgcgaggggcgtatattacgctttcctctttcagagtcaaccctgaatttcaggattttttctcttcgttgttacgaccatcttgtgaagtgtttcacgttgtcgtctcaacggaggcgcattatagggatcccaattttttgcacaagtacttttttgatctttttttctgtttgttgttttttcaccctttttgctgcattcgcacacaaaacggtgcttttttgcatactaaaagacttgcacaaggccaataatgcccccaaagtcattagtaaatcatttattgctgaggtaagtatgtctgatgttttacgcccataccgcgatctttttccacaaatcggtcagcgcgtaatgatcgacgatagcagtgtcgtgattggtgacgttcgtctggctgatgatgtggggatctggccgctcgttgtgattcgtggagatgtacattatgtacagatcggagcacgcaccaatatccaggatggcagtatgttgcatgtcactcataaatcctcgtacaacccagatggcaacccattaaccattggcgaagatgtcactgttggtcacaaggtgatgctccacggctgcaccattggcaatcgagttttggttgggatgggctcaattttacttgatggcgcaatagtagaagatgatgtgatgattggtgcgggtagtctggtcccacaaaataaacggctggagagcggatatctgtatctcggtagccccgtcaaacagatccgcccgttaagtgatgaagagaaggctgggttacgctattccgcgaataattacgtgaaatggaaggacgaatatctggatcagggtaaccagacccagccttgatcatcttcactttgttcctgaattaagttttccgcttcttcttccagatcccagcgatgctgacgaaaactcgctaaccactgttctggcgtatctccagtaaaacgatacgccagactctcgccagagatcgcacatgtcagttgcatgccattcacgagagcgggaaaacatacacattttttattctcgtcccactcttctctgtccggaaactggatggcctgattcacgcggacaattcctcctgcaattgctttataactggttctacgtcaggcagaacaccgtgccagagaagaaaggcatgagccgcctgtgccaccagcattcctaaaccatcagcattacgctttgagcctcgctgctcacaccatgccagaaaaggagtttttcctttctgatagaacatgtcatagcaataaatgcctggatgaatgagcgatgacgggatcgccggaatatcaccactgatgccactggatgttgcattaataatgagatcaaactcatgaccttccagttcgtccatacccaacgcctgaatactgccagtgtgcgcaaacaatttagccaactcttccgcgcgggataccgtccgattagtgattgtcaccgcacagtccagggaaagaagtggcagtagtacgccgcgagatgctccaccagcgccgatgagcagaatacgtaaaccaggacggataaaagacagacgttccagatcgcttaacaaacctataccatcggtattgtcacccagcaggcgtccatcttctaaccgcttgagggtattaacagcaccagccaacgctgcccgttcagtaagctcatccgctctggcaaaagcctcttctttaaaaggcaccgtcacattcgcacctttaccaccagcacgaaagaaagcgttcagtgtgttgatgaaatcattgatgggtgccaacacgcgcccatagggatgttcaatattcagttgctgagcaaattgctgatgaatgaatggcgatttgctgtgggctatcggattaccaaaaacagcataggtttccattatgttacccctgtcgaaacagttcacccgtcagggcatcgcggatttctgaaggatttaaacgcccccccgtttcaccaggcacaaccgggaacgccgcgccaaattgtgcgcgaacttcgtctactgttcgacaaggtggcaatccactcaagttggcactggtagaaaccagcggtttaccataagcctggcacaaagcaaccaccaacggatggtcggtgactcgtacagcaagcgaatcaaagcggcccgtcaaccagcgcggtgttgtcgcaggcgcgggaaagacaaaggtgacaggacctggccagcgggaaaaaatggtttcacgctgcgcatcagtcagcatggtgtcatcaatatagggtttaagctgctcgtaatttgccgcgattaaaatcagccccttatcaaccggacgctgttttaactccaacagtctcatcactgctgtttcgctatcaggatcgcacccaacaccgaaaacggcttccgttggataggcgatgacacgttcttcattgaggacatctatcgcagctgcgatagcgtctccttgcaggttattattcacgttattattccgccgaaaccggctttccacattgtttactggcacaaaagtgttttacaccctgcgcggttttcttttcgatgagtagtggataatgacactcagggcattctccagctatgggtttgaagttaatggcaaattgacactccgggtagcgatcacaggagtgaaatgttttgccataacgggagcggcgctggaccagatggcccgtccggcattgggggcatgtaattgctgtttcgtccggtttatcgataagttcggtatgttcgcattcagggtagttactgcaaccaataaacataccaaagcgtccctggcgtaataccagatttgcgccacatgcaaggcaaacctgcccctccagaactttgacaatatgtccatccgctgaagatttcagaggacggacgtagtcacacgccggatactgtgagcatccaagaaacggaccgtgtttcccggatcgaataaccagttcagccccgcactttgggcaggactcattattacgcaccgtgaacagtgctgatttcgccataacaacttatgctgaattaaagaaatgattaatgcagcataccttcattcacttcaaagagtaattcttccatttgctggtacgcattttcgcagcccggaatattgaacaacaccatcaggattacccatttcaggtcttccaggtcgaactctgcggtatccagcgcgagcactcgctctatcaccatttcacgggtttcaaggttaagcacctgaatttgctcaaggaaaagcagaaaaccacgacagctggcatccagtctttcacactcctcaggggtataaatacgcatggagagtggatcagaggccagttgcatcggttctgccagtccttcctgataatccgcaagcttttccagccaaagcagggcattgtagatatcttctcgatcaaatcctgcgtcggtaagatcctgttcaagtttgtcttgatccacacgcaactcagcttctgtgtgaatataggtttcaaacaaatacattagtacgtcgaacatggcatgccctcctcaatcggacatagccgccgggtacagctgcgatccatcctgctaactccagttcgagtagttgagtaactacctctggcacaggttggccggcacgttcagcgacgacgtcaacaggtgttacctcatctcctacgttagccaggagctcaggaaatggcaatgccacgtcttgctgatctggtgaataaaatgaattttcaggggcgtctggcaaccagtgcaatccaaattgcaagttttccagaatttcttccggttccgtcacaagaatcgcaccttgttttattaaccagtgaggcccttcgcttcccggattccctattggacctggcaaggcaaaaacttcacgcccctgctcaagcgcacaacgtgctgtcaccagcgaaccactgcgcaaagccgcttccaccaccagtacacctttacttagaccactgataatgcgatttcttcgtgggaaattgtaagcaaggggtggaacatcgaggggaaattccgagacgagagctccgccatgttcaagcagactggcagccagtcgggcatggcggcggggatgaatggtattaagtccattccccaatacagcaatgctgacgccatttacctgtaaggccgctttatgcgccacaccatcgattccacgcgccagtccactcgtaattgtcactccacgcgtcgccagagtttcgcaaaataaccgtccccatcgctcgccataccatgaatgcgcccgactccccactacggcaagctgaaatgaatgcagcgcgtgcagttctccttcaacaaacagtgcgccggggtaatctgtcgtcaccagaagttgaggaggataaaattcgctgtccgcagggattaaatgatggttgggttgctccaaccaacaaagtgagctttcgatactctttcgcggaaatgaaagaaagcgttgtgcctgccgcaatgtaagccctgtttgctgcaatccaaccgcatcaatttgcgactgttttgccagccagtgagctatacggaccatatcatcgccgtacaagctgctgatactcattaaacgcagccaaatttctgtatcgaccatccttatctccctgccataagcagccttagcaatctttgcgattggtcagtgatgctgtcaatcagagggggatttgtctagaatagaagaaataatctttctaactcctgaacacatctctggagatttatgtcagttttgcaagtgttacatattccggacgagcggcttcgcaaagttgctaaaccggtagaagaagtgaatgcagaaattcagcgtatcgtcgatgatatgttcgagacgatgtacgcagaagaaggtattggcctggcggcaacccaggttgatatccatcaacgtatcattgttattgatgtttcggaaaaccgtgacgaacggctggtgttaatcaatccggagcttttagaaaaaagcggcgaaacaggcattgaagaaggttgcctgtcgatccctgaacaacgtgctttagtgccacgcgcagagaaagttaaaattcgcgccctggaccgcgacggtaaaccatttgaattggaagcagacggtctgttagccatctgtattcagcatgagatggatcacctggtcggcaaactgtttatggattatctgtcaccgttgaaacaacaacgtattcgtcagaaagttgaaaaactggatcgtctgaaagcccgggcttaaggataagaactaacgtgtcagaatcactacgtattatttttgcgggtacacctgactttgcagcgcgtcatctcgacgcgctgttgtcttctggtcataacgtcgttggcgtgttcacccagccagaccgaccggcaggacgcggtaaaaaactgatgcccagcccggttaaagttctggctgaggaaaaaggtctgcccgtttttcaacctgtttccctgcgtccacaagaaaaccagcaactggtcgccgatctgcaggctgatgttatggtcgtcgtcgcctatggcttaattctgcctaaagcagtgctggagatgccgcgtcttggctgtatcaacgttcatggttcactgctgccacgctggcgcggtgctgcaccaatccaacgctcactatgggcgggtgatgcagaaactggtgtgaccattatgcaaatggatgtcggtttagacaccggtgacatgctctataagctctcctgcccgattactgcagaagataccagtggtacgctgtacgacaagctggcagagcttggcccacaagggcttatcaccacgttgaaacaactggcagacggcacggcgaaaccagaagttcaggacgaaactcttgtcacttacgccgaaaagttgagtaaagaagaagcgcgtattgactggtcactttcggcagcacagcttgaacgctgcattcgcgctttcaatccatggccaatgagctggctggaaattgaaggacagccggttaaagtctggaaagcatcggtcattgatacggcaaccaacgctgcaccaggaacgatccttgaagccaacaaacaaggcattcaggttgcgactggtgatggcatcctgaacctgctctcgttacaacctgcgggtaagaaagcgatgagcgcgcaagacctcctgaactctcgtcgggaatggtttgttccgggcaaccgtctggtctgatagtccactcttctaagcccggtcttgccgggcgtttttatacttatgaaaaaacaacgtaatttacgtagcatggcggcccaggccgttgaacaagtcgtcgagcaagggcaatcattaagcaacattctgccaccgctccagcaaaaagtttccgataaagacaaagcacttcttcaagagttgtgctttggcgtactgcgtacgctttcgcagttagactggctgattaataagttaatggcccgtccgatgaccggcaaacagcggaccgtgcattacctgattatggttggtttgtatcaactgctttatacccgcattccacctcatgctgcgctggctgaaacggttgaaggcgctatcgcaattaagcgtccgcaacttaaagggttgataaacggtgtattacgccagttccagcgtcagcaagaagagttattagccgagtttaatgccagtgatgcacgttatctgcatccttcctggttgctgaagcgtctgcaaaaagcgtatccagagcagtggcaatccatcgtcgaagccaataaccagcgtccgccaatgtggctgcgcgttaatcgtacgcatcattcccgcgacagctggcttgcattgttggatgaagcaggaatgaaaggtttcccgcatgcggattaccctgatgctgtacggctggaaacacctgcacctgttcatgcgctacctggttttgaagacggatgggttaccgttcaggatgcatcagcacaaggttgcatgacctggcttgcgccacaaaacggtgaacacattctggatctttgtgccgcccccggcggtaaaacaacgcatatccttgaggtggcaccagaagcgcaggttgttgcggttgatattgacgaacagcgcctctctcgcgtttacgacaatttaaaacgccttggtatgaaagcgaccgtgaaacaaggtgatggccgctacccttcccaatggtgtggcgagcaacagtttgatcgcattttattagatgcgccttgttcagcaaccggtgtgattcgtcgccatccggatattaaatggttacgtcgcgatcgcgatatcccggaactcgcgcaattgcagtctgaaattctcgacgccatttggccgcatttaaaatccggtggaaccctggtctatgccacctgttcggtgttaccggaagagaatagcctgcagattaaagcctttttgcaacgtaccgctgatgccgaactttgcgaaacaggaacaccagagcaaccgggtaaacaaaatctgcctggtgccgaagagggcgacggcttcttttacgctaagctaatcaaaaagtgatgagataacgggtcgcgactgatgaaaattatcattctgggtgccggccaggttggcggcacactggcggaaaacctggttggcgagaacaacgatatcactgttgtcgataccaacggtgagcgtctgcggaccttgcaggataaatttgacctgcgagtcgtgcaggggcatggctctcatccacgcgtattgcgggaggcaggtgccgacgacgccgatatgctggttgctgtaaccagttcagatgaaaccaatatggttgcctgccaggtagcctactcacttttcaacacccctaatcgcatcgctcgcatccgctcaccagactacgtgcgcgatgccgataagctatttcattcagatgctgtaccgattgatcatctgatcgcaccagagcagttggttatcgataatatttaccgactgattgagtatcccggcgcattgcaggtggtgaacttcgctgagggtaaagtcagcctcgctgtggttaaagcctattatggcggcccgctgattggtaacgcactttcgaccatgcgcgaacatatgccacatatcgatactcgtgtggcagcaattttccgccacgatcgccccattcgtccacaaggttcgaccattgtggaagctggtgatgaagtgttctttattgccgcttcacagcatatccgcgcggtgatgagtgaattacagcgactggaaaaaccgtataagcggatcatgctggttggtggcggtaatatcggtgcagggctggcgcgtcgtctggaaaaagattacagcgttaaactcatcgaacgtaatcagcagcgcgctgccgaactggcggaaaagttgcagaatacgatcgtcttttttggtgatgcgtcggatcaagaactgctggccgaagaacatatcgatcaagttgatctgtttattgccgtcaccaacgatgacgaggccaatatcatgtccgccatgcttgccaaacgtatgggtgcgaaaaaggtgatggtattgatccagcgtcgcgcttatgtggatctggttcaggggagcgtgatcgatattgcgatttcaccacaacaagcaactatttctgcgttgcttagccatgtgcgaaaagcagatattgttggtgtttcctcattgcgccgcggcgtagcagaagctattgaagccgttgctcacggtgatgaaagcacctcacgcgttgtcggcagagtcattgacgaaatcaagctaccgccaggaacgattattggagcggtggtacgtggaaacgacgtgatgattgccaatgacaatctgcgcattgagcaaggcgatcacgtaattatgttcctcacagataaaaagtttattaccgacgtcgaaagactcttccagccaagccctttcttcttgtaattaataaggcgtctaatgacgccttattatttccctttgattatcaaggattaattaaattcattcctggcaggaaaatggcttaacatttgttagacttatggttgtcggcttcatagggagaataacatgagcattattaaagaatttcgcgaatttgcgatgcgcgggaacgtggtggatttggcggtgggtgtcattatcggtgcggcattcgggaagattgtatcttcactggttgccgatatcatcatgccacctctgggcttattaattggcgggatcgactttaaacagtttgctgtcacgctacgcgatgcgcagggggatatccctgctgttgtgatgcattacggtgtcttcattcaaaacgtctttgattttctgattgtggcctttgccatctttatggcgattaagctaatcaacaaactgaatcggaaaaaagaagaaccagctgccgcacctgcaccaactaaagaagaagtattactggcagaaattcgtgatttgctgaaagagcagaataaccgctcttaacaagcgcctgaaagcagaagaccagtggtaaaaaagtgatttactttcttgccactggcctcccagttcccccgattgccatgttttccttttcgcatgtaactgcctttccccttcttatttttctctacgcgctgtcggaataagggatcatgtagtaatgcttctatcgcattatcctttatctgccctttagtatgctgatatcggctcataaaaactccaattggttattttacggcgcgagtgtaatcctgccagtgcaaaaaatcaacagccactcttaacgccactcgccccttgttcaagagcttcaagaatcgaacaataaacactgctatgggcggtcccacaacaggcatcgttaaggcgttgcaaggaacgctgcatactctgcaactcggctatccgtgcttcgacttcctgcaatctttcctgcacaatgccttttgactcctgacaggtatggtgttcaggatcgatacggatcgacagcaactcgcggatcgactccagactgaaacctagttgtctggcatggcggataaatttcaatcgctggagatcgctttcggtatacaggcgaaacccaccttcagtacgcacttcatgctccatcatctgctgtttttcgtaataacgaatcgtgtcgggtgttacttccgccatttttgccagctcaccaatgcgatacatacatactccactagttatcgttgattttattcaacaacttgtcagcataatcgccgcgtaaaaaatcggtactcagtccagcttgtcgcagcttcaattccagtaatgacaatcgacggctaacctcttgatattgcggatcatcgtgacggatacctttgagaatatccagaagctgaattgcttccctccgttgctcaagttctggcggtaagcaaccgccattcttcaacaagcgataccccgcacgtaattccggtggcacgtgagaatcatcatccagtatcaatggttcgccgctacctgccaggttatcaaactcacctttcgcttgcgcttctgctatatgacgctctgcccactggtcaagtaaccacatatatactccaggggatgaacaaaaagagtacagctattgtagataagtggggatgctacgggtataaaaaaacccgccggggcgggtttttttacgttgcttcagattactctgcagcagcttctgctttctctgaacgatcaaccagctcgatgtaagccatcggcgcgttgtcgcctgcacggaagccacacttcagaatacgagtgtaaccaccggcacggctcgcgaaacgcgggcccagttcgttaaacagttttgccacgatctcgttatcacgagtacgggcgaatgccagacgacgattagcaacgctatcagtcttggcaagagtaatcagcggctcaactacgcggcgcagctctttcgctttaggcagagtcgtcttgatgatttcatgacgaaccagtgaacctgccatattgcggaacatagcctggcgatggctgctgttgcggttcagttgacgaccactcttacgatggcgcatgaccttatccttctcagtaaaaccttaacctgtgatccggttactcgtcagcgatgcttgccggtggccagttttccaggcgcatgcccagagacagtccacgggaagccagcacgtctttaatctcagtaagagattttttaccaaggttaggcgttttaaggagctcaacctcggtacgctgtaccagatcaccgatatagtggatagcttctgctttaaggcagttagcagagcggacagtcaattccagatcgtcaacagggcgcagcaggatcggatcgaactctggtttctcttctttcacttcaggctgacgtacatcacgtaagtcaacgaaagcttccagttgttcagccagaatggttgccgcacgacgaatcgcctcttcaggatcgattgtgccgttggtttccatttcgatgaccagcttgtccaggtcggtacgctgttctacacgcgctgcttcaacattgtaggcaatacgctccacagggctgtagcatgcgtcgaccagcagacggccgattgggcgctcatcttcttccgaatgaattcgggtagaagccggcacataaccacgaccgcgctgaactttgatacgcatgctaatagacgcgttctcatcggtcaggtggcagatcacgtgctgcggcttgacgatttcgacatcaccgtcgtgggtgatatcggctgcagtcacagggccaatgccagatttattcaaggtaagaataacttcatctttgccctgaactctcaccgccagccctttcaggttgagcaggatttccaggatatcttcctgaacgccttctttggtgctgtactcatgtagtacaccatcaatctcaacctcggtcaccgcgcaacccggcatcgatgagagcagaatacggcgcagtgcgttacccagagtatggccaaagccacgctctaaaggctcaagggtcaccttggcgtgcgtcgaactcacttgctcgatatcaaccaggcgcggttttagaaactctgtcacagaaccctgcattgtgtcctctctttggtactaagctttacttggagtaaagctcgacgatcaggtgttcgttaatgtccgcagacagatcagaacgctccggcttacgcttaaacgtaccttccatcttgccagcatcaacttccagccaggttggcttttcacgctgctcagccagctccagagcggctttcacgcgagactgcttcttcgctttctcacgaatgcttacaacgtcattcggactaacctgataagaagcgatgttaacaacacgaccgtttaccataattgctttatggctaaccagctgacgtgcttctgcacgagtggcaccgaagcccatacggtatacaacgttgtccagacgaccttccagcagagccaacaggttttcaccggtgttgcctttcagacgtgctgcttctttgtagtagttacggaactgacgctccagcacaccatagatacggcgaactttttgcttttcacgcaactgcacaccatagtcagacagacgcggtttacgcgcaccgtgctggccaggagcttgttcaattttacacttggtatcgatcgcgcgaacgccagacttaaggaataagtcggtgccctcacgacggctcagcttgagcttaggacccaaatatcttgccattttctttctccaacaaacctggaaaacgaggcgttatacgcgacgttttttcggcggacgacaaccgttatgagggatcggagtcacatcagtaatattagtgatgcggaaacctgcggcgttcagagcacgaatagtagattcgcggcctggacccggacctttaaccataacttccagattcttgatgccgtattctttcacggcgtcagcgcaacgctctgctgcaacctgagctgcaaacggagtggatttgcgagaaccacggaaaccggaaccaccggctgttgcccaacccaacgcgttaccctgacgatcagtgatagtcacgatggtgttgttgaaagaagcatggatatgagccacgccgtcagagacttgttttcttacacgtttacgtgcacgaattggtgcctttgccattattcaatcaccccgattatttcttgatcggtttgcgcggacccttacgggtacgtgcgttggtcttggtacgctgaccgcgaaccgggagaccacgacgatgacgcaaaccgcgatagcaaccaagatccatcaggcgcttgatgctcatgctgatttcacggcgcagatcaccttcaacgacaaatttggcaacttcgtcacgcagcgtgtcgatttgtccttcagacagctcactgatcttaacatcttcagcgatacccgctgcagccaggatggctttagaacgggtcttgccgacgccataaatcgaagttaatgcgattacggcatgcttatgatcaggaatgttaatgcctgctatacgggccactatgcactcctactatttaatatgtacgttccatgctgaaaagcccgttttcaggatactcaaatggaaacgcacagacatacaaaagattggctggctaatctagccagctcaacccaactttgcaagaaaaatatgcgaaaaaatcagccttggcgctgtttatgcttcggctcggcactgcaaatcacacggatgacaccatcacgcttaacgattttgcagttacggcataatttcttgacggaagcacgaactttcatttttactctccgtaacttctcgggcgaccaattatcggccgtagcctttcaggttcgccttcttcaatgcagactcatactgactggacatcatcagagtttgcacttgagccataaagtccataatcacgacaacaacgataagcagtgaggtcccaccgaagtagaacggtactttcattgcatcacgcatgaactccgggatcaggcagataaaggtaatatacagcgcaccaaccagggtcaggcgggtcattactttatcgatatacttcgccgtttgctctcccggacgaattcctggtacaaatgcaccggacttcttcaggttatctgctgtttcacgcgggttgaaaaccaacgccgtgtagaagaaacagaagaagatgattgcagacgcatagagtaacacataaagcggttgcccaggctgcaaatacagcgaaattgttgtcagccagttccaaccagtaccgcccccgaaccatgacgcgatggtcgccgggaacagaataatactggaagcgaagattgccgggattacccccgccatattcactttcagcggtaaatgtgtgctctgtgcagcatagacacgacgaccttgctgacgtttcgcgtagtttaccacaatgcggcgttgaccacgctcaacaaatacaacaaagaacgtcactgcaaatactaatactgcaaccaacagcaacacgaggaagtgcaggtcgccttgacgcgcttgctcgatagtatgggcaatggctggcgggagtcccgcgacaataccggcgaagataatgattgaaataccgttgccgatacctcgttcagtaatctgttcgcccaaccacatcaggaacatcgttcctgtgaccagacttacaacagcggtgaagtagaatgcaaagcctgggttaatcaccaggccttgcataccaggcatattcggcagaccggtagcaataccgatcgactggaatattgccagcaccagagtaccgtaacgggtgtactggctgatcttacgacgaccagactccccttctttcttaatttctgccaacgttgggtgaaccaccgtcagcagctggataatgatcgacgccgaaatatacggcatgatccccagagcaaagatagaagcacggctgagagcaccaccagagaacatgttaaacatctcaatgatggtgcctcgctgttgctcaagcagtttggcaagtacagcggcatcaataccagggatcggaataaaagagccaatacggaacacaatcagcgcaccgataacaaacagcagtctgcgtttcagctcgcctaagccacctttggcactttgaaaatctaatcccggttgtttagccatctgctacttattcctcgattttaccgccagcagcttcgatagcagcacgagcgcctttagtaacacgcaggccacgaacagttaccggagtcgttacttcgccagccaggatcactttcgcgaactcgatctggataccgataatgttagccgctttcagcgtgttcaggtctacaacaccgccttctactttagccaggtcagacagacgaacttcggctgtaatcgctgctttacgagaagtgaagccgaatttcggcagacgacggtacagaggcatctgaccaccctcgaaaccgcgacgtacgccaccgccagaacgagatttctgacctttgtgaccacgaccaccggttttaccgaggccagaaccgataccacgacccaggcgtttacccgcctttttggagccttcggccggagacagagtatttaaacgcatctcttactcctcaactttaaccatgaaggaaaccgcgttgatcataccgcgaatagcaggagtatcctcgcgctctacggtgtgaccaatacgacgcagacccaggccaagcagcgttgccttgtgtttcggcagacgaccgattgcactgcgggtttgagtaattttaatagtctttgccatggtttatttccccagaatttcttcaacggatttaccacgcttggcagcgaccatttctggagaattcatattttccaggccatcaatagttgcacgaaccacgttgatcgggttggtggaaccatatgctttagccagaacgttatgaaccccagcgacttccagaacggcgcgcattgcaccaccggcgatgataccggtaccttcggaagccggctgcatgaatacgcgagaacccgtgtgaacacctttaacagggtgttgcagagtgccgttattcagcgcgacgttaatcatattgcgacgggctttttccatcgctttctggatcgctgctggaacttcacgcgctttaccgtaaccaaaaccaacgcgaccgttaccatcgccaactacagtcagagctgtgaaggagaaaatacgaccacctttaacggttttagatacgcggtttaccgcgatcagcttttcctgcagttcgccagcttgtttttcgatgtgagccatcttacacctctaccttagaactgaaggccagcttcacgggcagcatctgccagtgcctggacacgaccatgatattggaacccggaacggtcaaaggatacatctttgatgcctttttccagagcgcgttcagcgacagctttacccacagctgcagccgcgtctttgttaccggtgtacttcagttgttcagcgatagctttttctacagtagaagcagctaccagaacttcagaaccgttcggtgcaattacctgtgcgtaaatgtgacgcggggtacgatgtaccaccaggcgagttgcgcccagctcctggagcttgcggcgtgcgcgggtcgcacgacggatacgagcagatttcttatccatagtgttaccttacttcttcttagcctctttggtacgcacgacttcgtcggcgtaacgaacacccttgcctttataaggctcaggacgacggtaggcgcgcagatccgctgcaacctggccgatcacctgcttatcagcgcctttcagcacgatttcagtctgagtcggacattcagcagtgatacccgcaggcagctgatggtcaacaggatgagagaaacccagagacaggttaatcacattacctttaaccgctgcacggtaacctacaccaaccagctgcagcttcttagtgaagccttcggtaacaccgataaccattgagttcagcagggcacgcgcggtaccagcctgtgcccaaccgtctgcgtaaccatcacgcggaccgaaggtcagggtattatctgcatgtttaacttcaacagcatcgttgagagtacgagtcagctcgccgtttttacctttgatcgtaataacctgaccgttgatttttacgtcaacgccggcaggaacaacgaccggtgctttagcaacacgagacattttttcctccgattaggctacgtagcagataatttcgccaccaagaccagcctggcgcgctgcacgatcagtcataacacctttagaggtagaaacaactgcgatacccagacccgccataactttcggcagctcatctttacgtttatagatgcgcagacctgggcggctgacacgctgaatgctttctacaacagctttgccctggaaatacttcagagtaagttccagttcaggcttggtgtcgccttcaactttaaaatcttcaataaaaccttcttccttcagcacgttggcgattgccactttcagcttggaggaaggcatggtgaccgcagctttgttcgcggcctgaccgttacggatacgggtcagcatatccgcgatcggatcttgcatgctcatctgtctttactcccgtgattcaattggtgacaattaccagctagcctttttcagacccgggatttcaccgcgcatagcggcttcacggaccttaatacggctcaacccgaacttccgcaggaaaccatgcggacgacctgtttgacggcagcggttacgctgacgagacgggctggaatcacgcggcagagtctgcagcttgagaacagcgttccaacgatcttcgtcggaagcgttcacatcagagatgatcgctttcagttcagcgcgtttcgcgaagtatttatcagctaaagctacgcgttttacttcgcgtgctttcattgattgcttagccatttagtaaccctaccttacttgcggaacgggaagtcaaaggcagccagcagagcgcggccttcttcgtcagatttcgcagtagtggtaatggtaatatccaaaccacgaacgcggtcgactttatcgtagtcgatttctgggaagatgatctgctcacggacacccatgctgtagttaccacgaccgtcgaaagacttagcggacaggccacggaagtcacggatacgaggtacagcaatagtgatcaggcgctcaaagaactcccacatgcgttcgccacgcagagttactttacagccgatcggatagccctgacggattttgaagcctgcaacagatttgcgtgctttggtgatcagcggtttttgaccggagattgctgccaggtctgctgctgcgttatccagcagttttttgtcagcgatcgcttcaccaacacccatgttcagggtgatcttctcgacccgagggacttgcatgacagaattgtagttaaactcagtcatgagttttttaactacttcgtctttgtagtaatcatgcagtttcgccatcgtactactccaaattacttgatagtttcgctgttagacttgaagaaacggacttttttgccgtcttcgaatctaaagcctacacggtcagccttgccggttgccgcattgaagattgctacgttggaaacctgaatagcggcttctttttcaacgatgccacccggttggttcagggccggaaccggcttctgatgtttcttaaccaggttgataccttcaacaatgaccttgccggaagacaggacattcttaactttaccgcgtttacctttatctttaccggttaacacgataacttcgtcatcacgacggattttcgctgccatgattcgctccttagagtacttctggtgccagagagataattttcatgaacttctcactacgaagctcacgagttaccggcccaaaaatacgcgtaccgataggctgctcgctgttgttgttcagaagaacacaagcattaccatcgaagcgaatgacagaaccgtccgggcgacgaacacccttcttggtgcgcaccactaccgccttcagcacatcaccttttttgaccttaccacgcggaattgcttctttgatggtgatcttgatgatgtcgcctacgcctgcgtagcgacggtgcgagccacccagaaccttgatacacattacgcgacgtgcaccggagttgtcggcgacgttcagcatagtctgttcttggatcattttagtgctccgctaatgtcaactactactgagacccgaaaatcaggtcgttaaaaatccccatatcgagggcgcggcattataacaccgcttcaaggatatgggtagaaaaaataaacggctcatttctgagccgtttattcgtatcgagagagtgtactgtattacagaaccgctttctctacaacgcgaaccagcgtccaggatttagtcttggacagcggacggcattcgcggatttcaaccacgtcaccgataccgcattcgttgttctcgtcatgtacgtgcagtttggtcgtacgcttgatgaatttaccgtagatcgggtgtttcacaaaacgttcgatagcaacaacaatggatttctccattttgtcgctaacaacgcgaccttgcagagtacggattttatcggtcattacgcacccgccttctcgttcagtaaagtcttaacgcgtgcgacatcgcgacgcacttgcttcaacaggtgagactgttgcagctggccacttgcagcctgcatacgcaggttgaactgctcacgcagcaggttcagcagctcggtgttcagctcttcaacgctcttctcacgcagctcttttgctttcattacatcaccgtcttagttacaaaggtggttttaatcggcagtttcgctgctgccagcttgaatgcttcacgggccagctcttccggaacaccgtccatttcatacaggactttacccggctgaatcaaggcaacccaatactccacgttacctttacctttacccatacgcactgccagcggcttttcagtgatcggtttgtccgggaacacacggatccagatcttaccttgacgcttaactgcacgggtcatagcacgacgtgctgcttcgatctgacgggcagtcagacgaccacggccaacagctttcagaccgaagctgccgaagctaacatccgtaccctgcgccagaccgcggttacggcctttgtgcattttacggaattttgtacgctttggttgtaacatcagcgacgctccttatttacggcctttacgctgctgctttttaggctgagcagccggtttttccggttgttcaacagcagccataccacccaggatctcgcctttgaagatccacactttaacgccgattacaccgtaagtggtgtgcgcttcagaggtgttgtagtcgatgtcagcacgcagagtgtgcagcggtacgcgaccttcgcggtaccattcggtacgtgcgatttccgcgccgcccagacggccgctaacttcaactttaatacctttagcgcccagacgcattgcgttctgtacagcacgcttcatagcacgacggaacataacgcgacgttccagctgagaagtgatgctgtcagcaaccagttttgcgtccagttcaggcttacgaacttcggcgatgttgatctgtgcaggaacgccagcgatgtccgctacgaccttacgcagtttttctacgtcttcaccttttttaccgataacgatacccgggcgagcagtgtgaatggttacacggatgctcttagccggacgctcgataacgatacgagatacggacgctttagccagttccttagtcaggtactgacgtactttaaaatcgctgtccaggttgtcagcgaattctttggtgttcgcaaaccaggtagagttccatggttttacaatacccaggcgaataccattaggatgtactttctgacccattgctagtctccagagtctcagcgatcggacacaaccacagtgatgtggctggtgcgcttcaggatgcgatctgcacgaccttttgcacgcggcataatgcgcttcatgctcgggccttcgtctacgaaattttcgtaactttcagatcgtcaatgtcagcgccatcgttgtgttcagcgttagcaatggcagattccagaactttcttgaccagtacagccgctttcttgttggtgtaggtcaaaatatccagagcctgcgacactttcttaccgcgaatcaggtcagcaacaaggcgaaccttctgagcagaagaacgagcatggcgatgtttagcgatagtttccatctcttcctcctaccttatttcttcttcgcttttttatcagcagcgtggccgcgataagtacgagtcggtgcgaattcacccagtttgtgaccgaccatttcgtcggttacaaataccggaacgtgctgacgaccattatggacagcgatggtcaaaccgatcatgttaggaaagatcgttgaacgacgggaccaagtgcgcaggggcttcttgtctccgctttccaccgctttctctaccttcttcagcaagtgcaggtcaataaaaggacctttcttgagagaacgtggcatggcttatcctctaaaattatttgctacggcgacgtacgatgaatttatcagtacgcttgttgctgcgggtcttcttacctttggtctgaacgccccacggagttaccgggtgcttaccaaagttacgaccttcaccaccaccatgtgggtggtctaccgggttcatcgcggtaccgcgaacggtcggacgaacaccacgccagcgtgcagcacctgctttacccagaacgcgcagcatatgctcagcattgccaacttcgcccagagttgcacggcagtctgcttctactttacgcatttcaccagaacgcagacgcagggtgacataagcaccatcacgagcaacgatctgaacgtaagtaccagcggaacgtgccagctgaccgcctttacctggtttcatttctacgttatgaacagtagaaccaaccgggatgttgcgcatcggcagggtgttacctggtttgattgcagcatcaacgccagactgaatctggtcgccagctttcaggcctttaggggccaggatgtaacggcgttcaccgtctttgtacagaaccagcgcgatgttcgcggaacggttcggatcgtactcaagacgttcaacaactgccgggataccgtctttgttgcgtttgaagtcaacaatacggtaagcctgcttgtggccaccaccgatatgacgagtggtgatacggccattgttgttacgaccaccggatttgctgtttttttccagcaacggagcaaaaggtttgcccttgtgcagctcagggttaaccactttaactacgtggcgacgacccggagatgtcggtttacatttaacaactgccattgtattactcctccgacttactcagcgccgccaacgaagtccagattctggccttctttcagggtgacgtaagcttttttccagtcgctacgacgaccgatacgctgtccgtgacgtttaactttccctttaactaccagggtgttaacgacttcgacttcgacttcaaacagtttctgcacagcagctttgatttctgctttggtcgcgtctttagcaactttgagtacgatggtgttggatttttccatcgcagtagacgctttttcagaaacgtgcggtgcacgcagcaccttcagcagacgttcttcacgaatcatgccagcatctcctcaacttgcttaacagcatcagcagtcattacgactttgtcgaaggcgatcaggctaaccgggtcgataccagttgcatcgcgtacgtcaaccttgtgcaggttgcgcgcagccaggaacaggttttcgtccagctcaccggtgatgatcagcacatcttccagagccatgtctttcagtttctgtgccagcagcttagttttcggcgcttctacagagaacttctcgacaacgatcagacgatcctgacgtaccagttcggacaggatgcttttcagcgcgccgcggtacatcttcttgttaactttttgactgtggtcctgcggacgagcagcaaaggtcacgccaccagaacgccagatcgggctcttgatagaaccagaacgcgcacggccggtgcctttctggcgccacggttttttaccggaaccagttacttcagcacgagtcttctgagcacgagtaccctgacgagcaccagctgcataagcaacaacaacctggtgaaccagcgcttcgttgaaatcacgaccgaaggtagtttcggaaacagtcagcgcgctctgcgcgtctttcaatactaattccattgctatctccttacgccttcacagctggtttaacgatcaggtcgctaccggttgcacccgggacagcacctttaaccagcagcaggttgcgctcagcgtcaacgcgtactacgtcaaggctctgaacggttacacgttcgttacccatctgacctgccattttcttgcctttgaacactttgcccggagtctggttctgaccgatagaacccggaacgcggtgagacaaggagttaccgtgagtagcgtcctgggtacggaagttccagcgcttaacggtacctgcgaaacctttacctttagaggtgccagttacgtcaacttttttaacgtcagcaaacagttcaacgctaatgctctgacctacagtgaactcttcgccttcagccaggcggaattcccacagaccacggccagcttctacgccagctttagcgaagtggccagcttcaggcttggtcacacggttagcttttttagcaccggtggtcacctgaatagcacggtagccatcgttagccaggtctttaacctgagtaacgcggtttgcttcaacttcgattacggttactgggatagaaacgccgtcttctgtgaagatacgggtcatacccacttttttaccgactaaaccaatcattgtttcaacctctcaatcgctcaatgacctgattaacccaggctgatctgcacgtctacaccggcagccagatccagacgcatcagagcatcaacggttttctcggttggctcaacgatgtcaaccagacgcaagtgagtacggatttcgtactgatcgccgcgcgtctttgttgacgtgcggggagatcagaacagtgaagcgctctttgcgtgtcggcagcgggatcggaccacggacctgcgcaccagtgcgcttggcagtctcgacgatttccgcggttgcttgatcgatcagacgatgatcaaacgctttcaggcggatacggattctttggttctgcatgagaccagagctccaattattttataaacgaaaatgattactcctcagacccattacgattgatgggagagtgtaaccgttcttacgtagctccccgattgggagcattgttaggtagccaaattcggctaactgaggttcagattgaacctgctgtcaactacgacaagcccgcgcattatacgcaaatctgagcctgacgcaagcatcgggtagaaattaatcgcaacgcgcagattgcgagctgtattccacgaaatttgtaaggttgtgaagatagcgtttttcaccggaaccaggttaacaaatcagcgatttctctgttgctgagcatccggagttattcgatggtgatactccaattacagaggatgttttatggacgctacccttccctttctgattttgtacgcttgtttatctgtcctactttttttatgggatgcaaagcatggcttgttacctgacagatttacctgcccgttactctggtcaggtcttttgttctctcaggtttgtaatcctgactgtttagccgatgcgttatggggggcgattattggttacggcacattcgctgtcatttactgggggtatcgcatactgcgtcataaagaaggattaggctatggtgatgtgaagtttctcgccgcccttggtgcctggcatacctggaccttcttgccacgactggttttccttgctgcctcattcgcttgcggagccgtagttgttggtctgctcatgagaggaaaagagtcattaaaaaacccgctgccgtttgggccatttctggcggctgcgggtttcgttgtaggttgggatagtttgctggcaggccgttaatctttaacttttatttgtgattgcaggtaattttgtaaaccgattttaccgatgagatccagctcagtttcgagccagtcaatatgaccttcttcatcggcaaggatctcgatcatcatatcacggctaacatagtcatgaacgctgtcggcatacgcgatagcctcacggagatccttcgcgccttccagttctaatcgcaggtcggattgcagcatctcctcgacatcttcaccaatccccagtttgcctaaatcctgtaagttggggattccttctaaaaacaaaatacgctcgatatatttatcagcgtgtttcatctcatcgatggattcatggtattcgacgtcattgagacgcatcaggccccagtttttaaacatccgggcatggagaaaatactgattgattgcgacaagctcatttcccaatagtttattgagataatttatgattttaacatcacctttcattttatagtccctccgcttccactattagagcgtagatggggctagcgggatgtcaaaaaataagcgtggtcttcaggcaatctctttaaattctggcatctgcatcaactcgtcctgcatcacttcgcgcgcggcgcgaatgcacttaccgcattgatttcccacaggaataaacttacgcaattgttggaaagattgcggatgaaactgacggactgcctggcgaatttttttgtcacttacaccattacacaaacaaacgtacatgattgctcccgttcaaattctgcgcaaagtgtaaatgagaatggttatgattacaatagcacagttttatttgcgccatagttcagcgagcaaaattacgactaaatatttcgagctcaaattacgggcagcaaaaagggcgccgaagcgcccttttcaattcaaaactaattaacgtgtaattagcccagaactttagcaacaacgcccgcgccaacggtacggccgccttcacggattgcgaaacgcagaccgtcgtccatcgcgatcgggtggatcagggtaacaaccattttgatgttgtcgcccggcattaccatctctacgccttccggcagttcgatggtaccagtcacgtcagtagtacggaagtagaactgcggacggtagcctttgaagaacggagtatgacggccgccttcatctttggacagaatgtacacttcagattcgaacttggtgtgcggcttgatggtgcccggcttagccagtacctgaccacgttcgatttcttcacgtttgataccacgcagcagaacacctacgttctcaccagcacggccttcgtccagcagtttgcggaacatttcaacgccagtacaggtagacttctgagtctctttgataccaacgatttcaacttcttcaccaactttgatgataccgcgttctacacgaccggtaacaacggtaccacgaccggagatggagaatacgtcttcgatcggcagcaggaacggcttgtcaatcgcacgctctggttccggaatataagaatccaggaagccagccagttccaggattttcgcttcccactctgcgtcgccttccagcgctttcagagcagaaccacgaacgatcggagtgtcgtcgcccgggaagtcgtactgagacagaagttcacgaacttccatttcaaccagttccagcagctcttcgtcatcaaccatgtcgcatttgttcaggaacacgatgatgtacggaacgcctacctgacgacccagcaggatgtgctcacgagtctgcggcatcgggccgtcagtcgcagcaactaccaggatcgcgccgtccatctgagcagcaccggtgatcatgtttttaacatagtcggcgtgccccgggcagtctacgtgtgcgtagtgacgggtcggggtgtcatattcaacgtgagaagtgttgatggtgataccacgagctttttcttccggcgcgttatcgatctggtcgaatgcacgagcagcaccgccgtaggttttagccagtacggtggtgattgcagcggtcagagtagttttaccgtggtcaacgtggccgatagtaccaacgttaacgtgcggttttgtacgttcaaatttttctttagacacggctatattccttactatagtgctctccccttcaggagagagcacgggactttggtattaacccttaggcttatttaccacgggcttcaattacggcctgagcaacgttactcggcgcttcatcatacttcaggaattccatagtgtatgatgcacgacctttggtcagagaacgcagctgagttgcgtatccgaacatttcagacagcggtacttcagcgtggatcttaacgccagtaacttcagattcctgacctttgagcataccacgacgacggctcaagtcaccgataacgtcaccggtgttctcttccggagtttctacttcaaccttcatgatcggctcaagcaaaactggtttcgctttcttaaagccttctttaaaggcgatagaagcagccagtttaaacgccagttcagaggagtcaacgtcatggtaagaaccgaagtgcagacgaatacccatgtctactaccgggtagcctgccagcggacctgctttcagctgttcctggatacctttatcaacggccgggatgtattcgccagggattacaccacctttaatgtcgttgatgaactcgtagcctttcgggtttgaacccggctccagcgggtacatgtcgataacaacatgaccatactgaccacgaccaccagactgtttcgcgtgtttaccttcaacatcggtaactttctggcggatagtttcacggtaagcaacctgcggtttacctacgttcgcttcaacgttgaattcacgcttcatacggtcaacgatgatgtcgaggtgcagttcgcccatacccgcgataatggtctggttagattcttcgtcagtccatacacggaaagacgggtcttctttagccagacggcccagagccagacccattttttcctggtcagctttggttttcggttcaactgcgatggagattaccggctcagggaattccatacgttccagaatgatcggcgcatccgggtcacacagggtgtcaccagtggttacgtctttcagaccgatagcagcagcgatgtcgcccgcgcgaacttctttgatctcttcacgtttgttagcgtgcatctgaacgatacgaccgaaacgctcacgtgcagctttcacggagttcagtacggtatcaccagagttaaccacaccggagtaaacacggaagaaggtcaggttaccaacaaacgggtcggtagcgattttgaacgccagtgcagagaacggctcatcatcacttgcgtgacgctcagccggagtgtctttaccgtcgtccaggataccgttgatcgcaggtacgtcaaccggggatggcaggtaatcaattaccgcatccagcatcgcctgaacacctttgttcttgaacgcagaaccacaggttaccaggatgatttcgttgttcagaacgcgctgacgcagagcacctttgatttctgcttcagtcagttcttcaccacccaggtatttttccatcagctcttcagaagcttcagctgcggattcgatcaggttctggtgccattcgttagccagttcaaccatgtctgccgggatatcttcgtattcgaaggttacgccctggtcagcgtcgttccagttgatagctttcattttcaccaggtcaacaacaccggtgaaatgttcttcagcaccaatcgccagctgcagcggaaccgggttcgcgcccagacgggttttgatctggttaacaactttcaggaagttcgcacccatgcggtccattttgttaacgaacgcaatgcgcggaactttatatttgtttgcctgacgccatacggtttcagactgcggctgaacaccaccaactgcgcagtaaaccattaccgcaccatcgagaacacgcatggaacgttctacttcgattgtgaagtcaacgtgccccggggtgtcgatgatgttgatgcgatgcggctcatactgcttagccataccagaccagaatgcagtagtcgcagcggaagtgatggtaataccacgttcctgctcctgctccatccagtccatggttgcagcgccgtcatgaacttcaccgattttatggtttacaccggtgtagaacagaatacgttcggtagtagtggttttaccggcgtcgatgtgcgcactgataccgatattacggtagcgtgcgatgggtgttgtacgagccatttgtttcctcgtttatcttttaggcgttcaatttaagtagcccaaagcgggctgcttactggaagcgcccgcctggtgactaaaactccgaagggattaccaacggtagtgtgcgaacgccttgttggcttcggccatacggtgaacgtcttcacgtttcttaactgcagtacctttgttttctgcagcatcagaaagttcgttcgccaggcgcagagccatggatttatcaccgcgtttacgagcagcttcaacgatccaacgcattgccagagcattacgacgaaccggacggacttcaactggtacctgataagtagaaccaccaacgcggcgagacttaacttctacagtcgggcgcacgttttcgagagctacttcgaatgcttccagttcagatttaccagagcgctgagccagggtctccagcgcgctgtatacgatagattcagcagtagattttttaccatctaccatcaggatatttacaaatttagccagcagttctgatccgaacttcggatccggcagaattttacgctgaccaatgacgcgacgacgtggcatggaaatactccgttgttaattcaggattgtccaaaactctacgagtttagtttgacatttaagttaaaacgtttggccttacttaacggagaaccattaagccttaggacgcttcacgccatacttggaacgagcctgcttacggtctttaacgccggagcagtcaagcgcaccacgtacggtgtggtaacgaacacccgggaggtctttaacacgaccgccacggatcaggatcacggagtgctcctgcaggttgtgaccttcaccaccgatgtaggaagtcacttcgaaaccgttagtcagacgaacacggcatactttacgcagcgcggagttcggttttttaggagtggtagtatatacacgagtacatacgccacgtttttgcgggcatgcttccagcgcaggcacgttgcttttcgcaactttgcgagcacgtggtttgcgtaccagctggttaactgttgccattaaatagctcctggttttagcttttgcttcgtaaacacgtaataaaacgtcctcacacaatatgaggacgccgaattttagggcgatgccgaaaaggtgtcaagaaatatacaacgatcccgccatcaccaggccatctggctggagtgcttaaccgtaagtctgacgaaatcagtatagtcaatgggaataatgtcgttcgaaatttgaccagtcaaaccgcgggcaataaggtcttcgttcagggcatagaccttaatgggggcattacgcagactttcaaggtagcggttaccgtcaactgcggcagttacaccatcttgcaataatagcagttcgtcgccctcactgagcagacgcagcagcgcagcaaaatccgtcagccagggtgaacgatgtaatgtgtgcagcataaacgcctcaaaacctcaaaataacatcgtagttggcgagttcgcggcgtaaggcatctgcttcgagcggcgtggcttcgacaacaaagggtgtctgcggatctaacccgcgttcgcgcagtgaagccgcacaaacccagcactgttcaatgtcgtacagacccaacaatttaaaagtggcaatgtaatcacgcgccagcactgcatcgggcttttgtcctgacagcagctgaaaaacgccatcagcgataaagaagacggccagatcgtcagttaatgcggaagttgccagtaaagcatctaaaccttcccgaccagcagctgtaccatgaggtgcagtagaaaaaacaaacgcaattcgtttcatcagaactgtaccaccctgtcacaggtcagcgaggcttccgccagcgccccaagtccgcttaaggtaaatcctggctgaaggtttgacgaagccagccccagccttcctgcttcagtttcatcgacgataccgcggcgtaacgctgccgctacgcagatattcagcgccacaccatgttgcgcattcaactgttgccagccgcgcacaaggtcaaattcgtcacttgccggtgaggtcaattggttagcgttatagaccccttcccgatagaaaaagacgctgcttaactcatggccttcggctatcagcgcctgcgcaaactgaaaagcactactcgcctgttgcgtaccgtatgctggcccggtcaccacgatggcaaaacgcattacttatcttgccccaggaagtcgccacttttgaactggcgaatatagagataaacagtatgtttggaaatattcagacgatcagcaacctgattaatcgcgtcttttatgtcgaatatccctttctcgtagagattcaatacgatctggcgatttttggcgttattagaaacattgcgatcggcattcacttcttcgatggtgaactccagcgtttgggtaaccagatcttctacagaggaagcaaagttgacatttgagccgacatccggcgtctctggtggcacgaaggtgctcataatctgcgagaaaggaacatcgaggttcatattaatgcacagcaggccaattacacgctgttcgcgattacgaatggcgatggtcagcgacttcattaatacgccgcttttggcgcgagtaaagtagcatttagaaacgctgctatccgctcccgtcatatcgtgaagcatacgtagcgccaggtcggtaattggcgaaccaatcttccggcctgtatgttcaccgttagcaatacgaatggctgaacattttaaatcctgcaaagagtgcaaaacgatttcacagtgggagccaatgagcatcgctaacccgtccaccaccgcttcgtaggatttcagaatatcaaaatcgctctggtcgaaaggacgttgatccagtaaatccaactcactggtttcgttggttaaaagcgacctggacatgaaaaaaaacactccttttcaggagcctgtcgttaacttttcagggcaggctcattaatgatgcgggtaactaaattaatacagcggaggttccgctttccagcactaattatatccggcctgtaataaaaaaaccgccgcctggtcaggcggcggttcttaatgcttattttttagcagaatctgcggctttcgcatcagcttccggctttgcatcagccttcggcgctggtttcacatccagcagctctacgtcaaacaccagggtagaattcggtgggatccccggaacacccgctttgccgtaagccagttctggtggaataaccagtttgatcttaccgcctttcttgatgttcttcagaccttctgtccaacccgggataacaccgtccagacggaaagaaagcggttcaccacgggtgtaagagttgtcgaactctttaccgtcgatcagcgtacctttgtagttcactacaacagtatcgctgtctttcggtgcttcgcctttaccggcttctactacctgataaaccagaccagttgaagaggttttcacacctttctctttggcaaatttctcgcggtactctttaccttttgcttcgttatcagccgcgtctttttccatcttcgcctgagcagaagacttcacgcgagcttcgaatgcttgcagagtctgttcgatctcttggtcggagagtttgctcttatcagcaaatgcatcctgaacaccagcgatcagctgatctttatccagtttgatgcccagtttttcttgttctttaagagagttttccatgtaacgacccagcgaagcacccagtgcataagctgatttctgatcgtcatttttgaacgctgctttgctgtcagcagttgtagcaggttttgcagcttcagcagcaaaagtgattggtgcatgcagggcaacggccattgtggtcgccagcagcgttactttaaacagtgatttcatccatatctccaggatcggggcatctcaccccagggttaactattatcagaagggtactataaagcgttgtcgaacaaatctacatacagacacgccctattatcatctattttcagactctttttgtttaaattagtttcgatgaccgcgaaatgagtgctgtctcgggcagcaaagttaagtagaatccgcggcgaccattcgacaaaagaggtgaatcatgcaggatttatcattggaagcacgcctggcagagctggagagccgactggcttttcaggaaatcaccattgaagaactgaacgtcacggtgaccgctcatgaaatggagatggcgaaactgcgcgatcatctgcgtctgctgaccgagaagttaaaagccagccagccgtcgaacatcgcgtcgcaggctgaagaaacgccaccgccacattattgaggcgtaaaaaaagcggggattccccgcttttttgtcaccttttcggtattagtggcaaccacaaccgccgttgcctttaccgccacagcagccttcgccaccgtgttcatgaccgtgatcgtggccatgaccgccgcagcaaccgtcgtggtcgtgatcgtggtgatgatcgtgcgcgccgtgaacgtggccatgagccagttcttcttcggtcgcttcgcgaatcgccacaacttcaacgttgaatttcaggttctgaccggccagcatgtggttaccatcaaccacgacgtgatcgtcttcaaccgcagtgatttcaaccggtaccggaccctggtcagtttcagccaggaaacgcatacctacctgcagttcatcaacgcccataaatacgtctttaggaacacgttgcaccaggttttcgtcgtactgaccgtaagcgtcgttcgcgccaacagcgacatcaaatttgtcgccaacttcatgaccttccagcgccgtttccaggccagagatcagggaaccgtgaccatgcaggtagtccagcggcgcactcaccggagactcatcaaccaacacaccgtcttctgtacgtacctgataggccaggctgaccaccaggtcttttgctactttcatgatatctcctgagcatgggaagaatagtggcgcagattgtagcggaattctgcagccgtgtactcactagcttaaaaaaactcggcgcatatcgctagtccggatgaaaaatcccgatcacttgctcatctttgcgaacgtgatcgcgggcttctttgtctgcttctcgcatctgatgtccgcacttaacacattcaacaatatcaatattattttcgcgccacatcgccattgaatcctgcgcctgacaggccgggcattttgcgcccgcaataaaacgttttcggattgccatctttaccctctactcaaattcatcccagccgtccagctggcgtcgttcttgttgcatttcacgctggaaaatctcttccagttcgcgtcgggcttccctggcgcgagaaatttgtacggtatcagcatgcatcgggattaactcccgcagcattcgcatatccaggcggcgaaaatgcagttgcgcccgctgtgcctgatgcggatgcatgccaagcgtgaccagcgtcttgcgccccagctctaacgcactggagaatgtttcacgggaaaactgcgtcacccctgcctgtaataactcatgcgcttccacacgtccgcgcgctcgcgcaagaatatgcaaatgcggaaagtgctgctggcatatttccaccagcttcatggtgtcttccggctcgttacaggtaatgacgatagactcagcggcctctgcacccgcagaacgtaaaagatcgacctgcgtggcgtcgccgtaataaactttgtagccatatttacgcatcaggttaacggcgctgatatcccgctccagcacggtaatgcgcattttatttgccatcagcaaacgaccaatcacctgaccaaaacgcccgaagcccacgacaatgacctggggtttatcatcgttgacccacggtttttcgtcttcttcttccggtccgttaaactggcgggatagccatttatccaccagcttcatcagcaacggcgtggtcatcatggaaagcgtcaccgtcaccagcaacagcgccatctggtcaccctggaataaacgttgtgaagaagcggtagaaaagaggacaaaggcaaactcaccgccctgactcaacacgccagcaaactgcatccgctctgagctacgcacgccatacaatcgcgccagcagatacaacacgagaattttcaccgccaccagcacaaccacgcttatcactacccacaacagatgggtataaagcaccccgagattgagcgacatgccgacagagataaagaacaaaccgagcagcaagcctttgaagggatcgatagccgtttccagttcatggcgatattcactttccgccagcagcacgcccgcaataaacgtaccgagcgccatcgacagccccagcgcgtccataaacaatgcggaacccaacaccaacagcagcgtcgcggcggtgaacacttcccgcacgccagaagctgcaataaaacggaataccggacgcagtaaatagcgcccgccaatcagcatgccgacaaacgccagcaccttcatgccgatcttcatccagtcgaaatgttcgtctgccgaacccgccaacaacggcactaacgccagtgccgggatcaccgccagatcctgaaacagcagaaccgaaaacccgagctgcccggattcgctgcgattcatccctttctcacgcatcaattgcaacgccattgcagttgaagacatcgcaaggccaatgccaccgacaaccgccgcctgccaggcgaaatccgtcagcatcaataatcccgccagcaacgccgcgcttaacagcacctgtgccgcgcctacgccaaaaatcgaacgccgcagttgccaaagtttggagggattcaactcaagaccgatgataaacatcaggaataccacgccgagttccgaaaagtggaggatctcatcgacgtcgctaataaaccccagcccccatggaccaattgcaattcctgccagcaaatatcccaacacagcgccaatacccagccgcgatgccagcggcaccgcagccaccgccgcgaagagaaacagcactcctgcgagtaaaaaatcggaaccttccatcagcggcctcctggagacagcggatttgccagccagtcaccgtaggctctggcgtgactcgccagctcctgtgcgctttgccgtctcgcccagtaaataatgatgggacttaaccaatgcatccggcacatgcccgccgccagttcaaagggacgcagaacatcgctcatcgggtagcgattcaatgcgtcataacggtaagcactttccggctcgccggtggtaatcacgctacgccagtactttcccgccagttggtttcctcccggcccgctggcaaaaccacgacttaatacccggtccagccactctttcagtagcgccgggcagctataggtataaagaggatgctgaaagacaatcacctcgtgctcgcgcagtaatgcctgctcacgggggatatcaataaaaaaatcgggatagtgcgcataaaggtcgtgcacggtaacattgctgagctgcgtggccggtttaagcagtacccggtttgccaccgagtcctgagattccggatgggcatacagcagcaaaactttcgctggctgagacatcatccccctcccggtatggtttttgtgtatagtcgctgttttgggctaccattgcgcccggtgcggcagctcgcccatacattacattatcataatgataagttaacatagtctgaacatacggcgccttatgattgttttctcctcgttacaaattcgtcgcggcgtgcgcgtcctgctggataatgccaccgccaccatcaaccccgggcagaaagtcggcctggtgggtaaaaacggctgtggtaaatctaccctgctggcattgctgaaaaatgaaatcagcgccgacggcggcagctacaccttcccgggaagctggcaactggcgtgggtgaatcaggaaacgccagcgttaccgcaagcggcgctggaatatgtcattgacggcgaccgtgaatatcgtcaactggaagcgcagctacacgacgccaacgaacgtaacgacgggcacgccattgcgaccattcatggcaagctggatgctattgacgcatggagtattcgctcccgtgccgccagcctgctgcacggcctcggtttcagcaatgaacaactggagcgcccggtaagtgatttctccggtggctggcgtatgcgtcttaaccttgcccaggcgctgatttgccgttcagacttgctgctgctcgacgaaccgactaaccacctcgatctcgatgccgttatctggctggaaaaatggttgaagagctatcagggcacgctgatcctgatctctcacgaccgcgacttcctcgatccgatcgttgataaaattattcatatcgaacaacaaagcatgttcgagtacaccggcaactacagttcgtttgaagtacagcgcgccacccgtctggcgcagcaacaagcgatgtatgaaagccagcaggaacgcgtaacgcatctgcaaagttatatcgaccgtttccgtgccaaagccaccaaagcgaagcaggcccagagccgcattaagatgctcgagcgtatggagctgattgcccccgcgcacgtcgacaacccgttccgctttagcttccgcgcgccggaaagcctgccaaatccgttactgaagatggaaaaagtcagcgcgggctatggcgatcgcattattctcgactcgattaaactgaacctggtgcccggctcgcgcattggtctgttaggccgcaacggcgcgggtaaatcgacattaatcaaactgttagccggtgaacttgcgccagtcagcggtgaaattggtctggcgaaagggatcaagctcggctacttcgcccagcatcaacttgaatacctgcgcgccgacgaatcacctattcaacatctggcacgtttagcgccgcaggagctggaacaaaaactgcgtgactacctcggcggctttggtttccagggcgataaagtaaccgaagaaacgcgccgcttctcaggtggggaaaaagcccgcctggtgctggcattaattgtctggcagcgtccgaatctgctgctgctcgacgaaccgactaaccaccttgacctcgacatgcgtcaggcactcaccgaagcattaatcgagtttgaaggcgcgctggttgtcgtttcgcacgaccgtcatttgctgcgttccaccactgacgatctctacctggttcacgatcgtaaagtcgaaccgttcgacggcgatctggaagattatcaacagtggttgagcgacgtacaaaagcaggaaaaccagaccgacgaagcgccaaaagagaacgcgaacagcgcccaggcacgtaaagatcagaagcgtcgggaagcggagctgcgtgcgcaaacccagccgctgcgtaaagagattgcccgtctggaaaaagagatggagaagctgaacgcgcaactggcgcaggcggaagagaaactcggcgacagcgaactgtatgaccagagccgtaaagcggagttgaccgcctgcctgcaacagcaagccagcgccaaatccggcctggaagagtgcgaaatggcgtggctggaagcccaggagcagcttgagcagatgctgctggaaggccaaagcaactgatggcgcagataacgacgaccgatgccaatgaatttagcagcagtgctgaattcacccctatgcgcggctttagcaattgtcatctacaaactatgctgccgcgtttgtttcgtcgtcaggtgaaattcaccccgtactggcagcggctggagttgcccgacggcgattttgtcgatctcgcgtggagtgaagaccccgcacaggcgaaacataaaccgcgtttagtggtgtttcacgggctggaaggcagtctcaatagcccttacgcccacggtctggttgaggcggcgcaaaagcgcggctggctgggcgtggtgatgcattttcgcggatgcagcggtgaaccaaaccgtatgcaccgcatttaccattcgggcgaaaccgaagacgccagttggtttttacgctggctgcaacgcgaatttggtcatgcgccaacggctgccgtcggctattcgctcggcggtaatatgctggcctgtttgctggcaaaggaaggcaatgatctcccggttgatgcggcggtgattgtctctgcgccgtttatgctggaagcctgtagctatcatatggaaaagggcttttcccgcgtttatcagcgttacttgctaaacctgttaaaagccaatgccgcacgcaagctggcagcctaccccggaacactgccgattaatctcgcgcagttaaaatcggtacgtcgcatccgtgaatttgacgatctaatcaccgccagaattcacggctacgctgacgctatcgactattatcgtcagtgtagcgccatgccgatgctgaaccggatcgccaaacctacgctgattattcacgccaaagacgatccgtttatggatcatcaggtgatcccgaaaccggaaagtctccccccgcaggttgagtatcaactgactgaacatggcggtcatgttggctttattggcggtacattacttcatccgcaaatgtggctggagtcacgcattcctgactggttaacaacgtatctggaggcgaaatcatgttgattccgtggcaagacctctcccccgaaacgctggaaaatttaattgaaagctttgtgttacgtgaaggcaccgattatggtgaacatgagcgtacacttgaacagaaagtcgccgacgtcaaacgccagctacagtgcggagaagcggtgctggtatggtcggagctgcacgaaacggtcaatattatgccgcgcagtcagtttcgcgaataacctgcaaccgtcggcggacgagataataatgatagctaagtcatggagttactatgtctgccaaacatccggtcattgcggtaacaggatccagcggcgcggggaccaccaccaccagcctcgcgtttcgtaaaatattcgcgcagttaaatctgcatgcagctgaggtggaaggcgacagttttcaccgttacacccgcccggaaatggacatggcgatccgcaaagcgcgcgacgccgggcggcatatcagctacttcggccccgaggctaacgacttcggcctgctggaacaaaccttcattgaatacggtcagagcggcaaagggaaatctcgcaaatatctgcatacctacgacgaagccgtaccgtggaatcaggtaccggggacattcaccccctggcaacctttaccggaacccactgatgtactgttttatgaaggtttacacggcggcgtagtcacgccacagcataacgttgcgcagcatgtggacttactggtcggcgtggtgcctatcgttaaccttgagtggattcaaaaactgatccgcgacaccagcgagcgcgggcactcacgagaagcagtgatggactcggtagtgcgttcaatggaagattatatcaactacatcacaccgcagttttcccgcacccatcttaacttccagcgcgttcccaccgtcgacacttcaaacccgttcgcggcaaaaggtatcccgtcgctcgatgaaagctttgtggtgatccattttcgtaatctggaagggatcgatttcccctggctgctggcgatgttgcaaggctcattcatttcccacatcaatacgttagtggtaccgggcggcaaaatgggtctggcaatggaattaattatgctgccgctggtgcaacgattgatggaaggaaagaaaatcgagtaactctgctattacgccggataaaatactatccggcttcacaacgggatagttaaatcacgcggcaaccacttcatacgagtgagtaatattcaccgctttttccagcatcaacgccactgaacaatatttctcagcagagagatcaaccgcacgcgcaaccgctgcgtctttcaggtcgcgaccggtgacgataaaatgcagattaatgtgcgtaaacaggcgtggtgcctcttcgcggcgttcagaggtcaattttacttcacaatcgaccacatcctgacgccctttttgcaggatagaaaccacatcgatggcactgcaacccccgccgccatcaacaccatttccatcggacttggtgctttatcgcctgagttgccgtccattaaaatctgatgaccagaggcggattcgcccagaaaagttaacccttcgacccacttcactcgcgcttgcatttttgctactccactgcgtcaattttcctgacagagtacgcgtactaaccaaatcgcgcaacggaaggcgacctgggtcatgctgaagcgagacaccaggagacacaaagcgaaagctatgctaaaacagtcaggatgctacagtaatacattgatgtactgcatgtatgcaaaggacgtcacattaccgtgcagtacagttgatagccccttcccaggtagcgggaagcatatttcggcaatccagagacagcggcgttatctggctctggagaaagcttataacagaggataaccgcgcatggtgcttggcaaaccgcaaacagacccgactctcgaatggttcttgtctcattgccacattcataagtacccatccaagagcacgcttattcaccagggtgaaaaagcggaaacgctgtactacatcgttaaaggctctgtggcagtgctgatcaaagacgaagagggtaaagaaatgatcctctcctatctgaatcagggtgattttattggcgaactgggcctgtttgaagagggccaggaacgtagcgcatgggtacgtgcgaaaaccgcctgtgaagtggctgaaatttcgtacaaaaaatttcgccaattgattcaggtaaacccggacattctgatgcgtctgtctgcacagatggcgcgtcgtctgcaagtcacttcagagaaagtgggcaacctggcgttcctcgacgtgacgggccgcattgcacagactctgctgaatctggcaaaacaaccagacgctatgactcacccggacggtatgcaaatcaaaattacccgtcaggaaattggtcagattgtcggctgttctcgtgaaaccgtgggacgcattctgaagatgcttgaagatcagaacctgatctccgcacacggtaaaaccatcgtcgtttacggcactcgttaatcccgtcggagtggcgcgttacctggtagcgcgccattttgtttcccccgatgtggcgcagactgatttatcaccccgatatcaactatgcacttcgacaaacgctggtgctatgtttgcccgtggccgttgggttaatgcttggcgaattacgattcggtctgctcttctcactcgttcctgcctgttgcaatattgcgggccttgatacgcctcataaacgttttttcaaacgcttaatcattggtgcgtcgctgtttgccacctgtagcttgctgacacagctactactggcaaaagatgttcctctgccctttttgctgaccggattaacgctggtacttggcgtcactgctgagctggggccattgcacgctaaattgcttcccgcatcgctgctcgccgccatttttaccctcagtctggcgggatatatgccggtctgggaaccattgctcatctatgcgttgggcactctctggtacggattgtttaactggttttggttctggatctggcgcgaacaaccgctgcgcgagtcactaagtctgctgtaccgtgaactggcagattattgtgaagccaaatacagcctgcttacccagcacaccgaccctgaaaaagcgctgccgccgctgctggtgcgccagcaaaaagcggtcgatctaattacccagtgctatcagcaaatgcatatgctttccgcgcaaaataatactgactacaagcggatgctgcgtattttccaggaggcgctggatttacaggaacatatttcggtcagtttgcatcagccggaagaggtgcaaaaactggtcgagcgtagccatgcggaagaagttatccgctggaatgcgcaaaccgtcgccgctcgcctgcgcgtgctggctgatgacattctttaccatcgcctgccaacgcgttttacgatggaaaagcaaattggcgcactggaaaaaatcgcccgccagcatccggataatccggttgggcaattctgctattggcacttcagccgcattgcccgcgtgctgcgcacccaaaaaccgctctatgcccgtgacttactggccgataaacagcggcgaatgccgttacttccggcgctgaaaagttatctgtcactaaagtctccggcgctacgcaatgccggacgactcagtgtgatgttaagcgttgccagcctgatgggcaccgcgctgcatctgccgaagtcgtactggatcctgatgacggtattgctggtgacgcaaaatggctatggcgcaacccgtttgaggattgtgaatcgctccgtgggaaccgtggtcgggttaatcattgcgggcgtggcgctgcactttaaaattcccgaaggttacaccctgaccttgatgctgattaccaccctcgccagctacctgatattgcgcaaaaactacggctgggcgacggtcggttttaccattaccgcagtgtataccctgcaactgttgtggctgaacggtgagcagtacatccttccacgtcttatcgataccattattggttgtttgattgctttcggtggtaccgtctggctgtggccgcagtggcagagcgggttattgcgtaaaaacgcccatgatgctttagaagcctatcaggaagcgattcgcttgattctgagcgaggacccgcaacctaccccactggcctggcagcgaatgcgggtaaatcaggcgcataacactctgtataactcattgaatcaggcgatgcaggaaccagcgttcaacagccattatctggcagatatgaaactgtgggtaacgcacagccagtttattgttgagcatattaatgccatgaccacgctggcgcgggaacaccgggcattgccacctgaactggcacaagagtatttacagtcttgtgaaatcgccattcagcgttgtcagcagcggctggaatatgacgaaccggggagttctggcgatgccaatatcatggatgcgccggagatgcagccgcacgaaggcgcggcaggtacgctggagcagcatttacagcgggttattggtcatctgaacaccatgcacaccatttcgtcgatggcatggcgtcagcgaccgcatcacgggatttggctgagtcgcaagttgcgggattcgaaggcgtaatgcaggctaaaccatcggataaggcattcacgccgcatccgacatcttttgcctgatgcttcgtatttacgccccaatcaccttagccaccgcgtgggcgaaacgttgcatcccttcatcgatatccgcatcttccaccaccagcgacggtgcaaaacgcatcacatccggtccggcattcagcaccattacgccagcctctgcgcccgcatacaggaaatcacgcgcccgacctttgaactgtggcttaagctccgcgccaatcaacagccccataccgcgaatatcgctaaacacatcgtactgctgatcgatcttctgcaaatggtcaacaaaacgctggcgtttcgcctgaatgccttccagcacttcaggggtattgatgatatcaaacgccgcgcccgctactgcacaggccagaggattaccgccgtaggtggaaccgtgagaaccaggatgaaacgcagaagcaatttccgccgtggtcagcatggcgctaatcgggaagccgccgcctaacgctttcgcagaggtcagaatatccggcgtcacaccgtagtgcatgtaagcaaacaaatcgccagtccgccccatcccgcactgcacttcatcaaacaccaataatgcctgatgttgatcgcacagctcgcgcaagccctgcaaaaactctggcgtcgcagccgtcacaccgccctcgccctggatcggctcaaccaccaccgcacaggtgtgatcatccatcaccgctttcactgcgtggagatcgttaaagggaacgtggatgatgtctgccggttttggcccaaagccgtcggaatattttggctgcccgcccaccgagacggtaaacagcgagcgaccatgaaaagcgttatggaaggcaataattttggttttgaacgggctatgacgcacacaggcataatggcgtgccagtttaaaggcggtttcgttagcttccgtgccggagttcataaacaccacgcgttcggcaaacgtcgcctcaatcagtttgcgcccaagacgcagcgccggttcattggtgaaaacgttactgatatgccacagagtttcgccctgggtttttaacgcattcaccagcgcaggatggcaatggcccaacgccgtaactgcaatgccacccgcgaaatcgacatactccttgccttgctgatcccagattcggctgccctgaccttttaccggaatgaactctgccggagcataaatcggcaggatcacttcatcgaaagtcgcccgtgtaattgctgtttgttcaattgccatctcatgatcaccctgttacgcataaataaatgtgaaattataatcacaaaatatgcataaaaaatcactgaatggcaatcagaaatcagcgatgcagaaaattagccagcagttgatgtccttgttcgctaagaatactttctggatggaattgcacaccttccagatcccactggcgatggcgaatccccataatctcgcgggtttcgctccaggccgtcacgtcaaagcacgctggtaatgagtcaggttccaccaccagcgaatggtagcgtgtcacggtgagtggatttgccagcccccgaaatacgccctcaccgttatgtgtaatcggcgaggttttgccgtgcataacctttgcggcgcgcacaactttaccgccaaatgcctgcgccattgcctgatgaccgaggcagacgccaagaatcggcaagcgcccggcatagtggcgaataacgtcaagggagatcccggcttcatctggcgtacaggggccaggtgagatgacaattttttgtggtttaagggcgtcgatatccgccagcgtcaacgcatcgttgcgcttaaccagcacatccgcccccagttcacaaaagtactggtagaggttccaggtaaaagaatcgtagttatctataagcaggatcatggcggctccggtacgaaagaaccgcgctattttactcagattccccggcttcgcttaccactttgctaaatatcatctgcagcgcggtgagatcccccattgctccactctgatttgcctgattccaggcctctttttcgataccctgccagctcagttgatatccggcatgaatcgccagttgctcgaagaagatccgctgtgccagaccacttcccacccggaagggatgcagcacgttgatttcacaatagtaatgcgccagccgctcgacgaacttcgctttctccaggccaaccagataaccttcttcctccagatcctgcatcagggcattgccctctttttcgatataagcaaagtggcagaacggcgtatcgccctgataaatatcaacttcacgcagttgccctgcccagtcgaaaatatcctggtacagctggcgatggatagtgcgcaaatgcggtaaaccgcgcaccagcggaccaagctcaatggtcgcagcacgcagcgccgtcatttcgtaagcggcctgttccagccgctgctgctggcggatgttcagccggttacgcatgatatcaaggccaggataaagatacggatcgcgcccttcgccgaatttatcgctcatagtgactcctcagctcttcaaggcgcgctaaagcctctgcggcagtaagagtgactaaaggcatctcgacgccttcaagacggcgactggcctgaaaattacgattacgctgaagctcccagagacgggacttttgcttatcggtgagtttcttcacttgatgcctccctgaacgtgtccatttgccacaagtataagcggcaaatccgggttacgccgggagagcaaaagcgcgggcaagattgcccgcgcgagaaatcattacggcaggactttagcggaaaggataactaccggttttgacggcacattctggtacggaccaacgtcatgagtcggcacctgggaaatcttatcggcaacgtccatgcctttcaccactttaccaaataccgcgtaaccgaaatcacgctgaccatggtcaaggaaggcgttatcggcaacgttgataaagaactggctggtggcgctgtctttgtcggcggtacgcgccatcgcgatggtaccacgcgtgttgcgcaggccattatcggcttcatttttgattggcgggtttggttttttctgctgcatctgctcggtgaaaccgccgccctgaatcataaagccaggaatgacgcggtgaaaggtagtgttgttataaaaaccgctgttcacataatcgacaaagttctgcacagacactggcgctttttgtttatccagctccagttcgatgttaccagctgaggttgtcaacaatacgtgcgggtcccctttcgctgccattgctgcgggagaaagagcagaaagagcgaaaacagcagccatcgccgccagggtcgatttgaacatgagatttccttaacaaacagagcagaaaaaaagcaagtgaagagattctaaatagccttcaagaacaaggccatccctttacctaattttacgtatctgaaatatatgtaacctgacgatcactttttattccgtgatcaaaatcacctcttaaaatgcaatttagcaaccgattgcaataaaacatttaaacagatcacaaaatcacctaaaatcgcccgctcgcggcatatcccgctatgccattttatttttgaacgcaggccaatcatgactaacagcaatcgcatcaagctcacatggattagctttctctcctacgcactgactggtgcgttggttattgtcaccgggatggtgatgggaaatatcgccgattatttcaatctgcctgtttccagtatgagtaacaccttcaccttcctcaacgccggcattttaatctctatcttcctcaacgcctggctgatggaaatcgtcccgttgaaaacgcagttacgttttggctttctcctgatggtgctggcggttgccggtttgatgttcagccacagcctggcgctgttctcggcggcgatgttcattctcggggtggtcagcggcatcaccatgtcgattggtacattcctggtaacacaaatgtatgaagggcgtcagcgcggttcccgcctgttatttaccgactccttcttcagtatggctgggatgattttcccaatgatcgccgcgtttctactggcgcgcagcattgagtggtactgggtttatgcctgcatcgggctggtgtatgtcgctatttttattctgaccttcggctgtgagttcccggcgctgggcaaacatgcgccaaaaacggatgctccggtagagaaagaaaagtgggggatcggcgtactgtttctctctgttgcggcgctgtgctacatccttggtcagttaggttttatctcctgggtgcctgagtatgccaaaggcctgggcatgagcctgaacgacgcgggcacgctggtgagtaacttctggatgtcatacatggtcggcatgtgggcgttcagctttattcttcgcttctttgatttgcaacgtattctgaccgtactggctggtctggctgcgattctgatgtacgtctttaacaccggaacaccagcacatatggcgtggtcaattctcgctctgggcttcttctccagcgcgatctataccaccatcatcaccctgggttcacagcagaccaaagtaccgtcgccaaaactggttaactttgtcctgacctgcggaaccatcggtactatgttgacctttgtggttaccggcccgattgttgaacatagcggtccgcaggcggcactgcttacagcaaacggtctgtacgctgtcgtctttgtgatgtgcttcctgttaggtttcgtcagccgtcaccgtcagcataacaccctgacctctcattaattgctaatgccggacggcactatcgtcgtccggccttttcctctcttcccccgctacgtgcatctatttctataaacccgttcattttgtccattttttgcacaaacatgaaatgtcagacaattccgtgacttaagaaaatttatacaaatcagcaatataccccttaaggagtatataaaggtgaatttgatttacatcaataagcggggttgctgaatcgttaaggtaggcggtaatagaaaagaaatcgaggcaaaaatgagcaaagtcagactcgcaattatcggtaacggtatggtcggccatcgctttatcgaagatcttcttgataaatctgatgcggccaactttgatattaccgttttctgtgaagaaccgcgcatcgcttatgaccgcgtacacctctcgtcttacttctctcaccacaccgccgaagagctgtcgctggtgcgcgaaggcttctacgagaaacacggcatcaaagttctggtcggcgaacgtgctatcaccatcaaccgtcaggagaaggtgattcactccagcgccgggcgcaccgttttttatgacaagctgatcatggcgaccggttcctacccgtggatcccgccaatcaaaggttctgatactcaggactgctttgtctatcgcaccattgaagacctcaacgccattgaatcctgtgcccgtcgcagcaaacgcggtgccgttgttggtggcggcctgttaggtctggaagccgctggcgcgctgaaaaacttaggtattgaaacccacgttatcgaatttgcccctatgctgatggcggaacagcttgatcagatgggtggcgagcagctgcgtcgcaaaatcgaaagtatgggcgtgcgcgttcacaccagcaaaaacacccttgagattgtgcaggaaggtgtcgaagcgcgtaaaaccatgcgttttgccgacggcagcgaactggaagtcgactttatcgtcttctctaccggtatccgtccgcgcgataagctggcaacccagtgtggtctggacgtagctccgcgtgggggtattgtcattaatgattcctgccagacttccgatccggatatctacgccatcggtgaatgcgcaagctggaacaaccgtgtatttggtctggtagcaccaggctacaaaatggcgcaggtcgccgttgaccatattctcggtagcgaaaacgcctttgaaggtgctgaccttagcgccaagctgaaactgctgggcgtagacgtaggcggtattggtgatgcgcacggtcgcacgcctggcgcacgtagctacgtttacctcgacgaaagcaaagagatctacaaacgccttattgtcagcgaagacaacaaaaccctgctcggtgcggtactggtgggcgataccagcgactacggcaacctgctgcaactggtgctgaatgctatcgagctgccggaaaacccggattctctgattctgccggcgcactcgggtagcggtaagccgtctatcggtgttgataaactgccggacagcgcgcaaatctgctcctgcttcgacgtcaccaaaggtgatctgattgctgccatcaacaaaggctgccacaccgttgcggcgctgaaagccgaaaccaaagcgggtactggctgcggtggctgtatcccgctggtcactcaggtactgaacgcggaactggcgaaacagggcatcgaagttaacaacaacctgtgcgaacactttgcttattcgcgtcaggaactgttccatttgatccgcgttgaaggcattaaaaccttcgaagaactgctggcgaaacacggcaaaggttacggttgtgaagtttgtaaaccgaccgtcggttcgctgctggcctcctgctggaacgaatacattctgaagccggaacatactccgctgcaggattcaaacgacaacttcctcgctaacatccagaaagacggcacctactcggtgatcccgcgttctccgggcggtgaaatcaccccggaagggctgatggcagtaggtcgtatcgcgcgtgaatttaatctctacaccaaaatcaccggctctcagcgcctggcgatgtttggcgcacagaaagacgatctgccggagatctggcgtcagctgattgaagctggcttcgaaaccggtcatgcctatgcgaaagcactacgtatggcgaaaacctgcgtgggtagcacctggtgccgctacggcgttggcgacagcgtcggcctcggcgtggaactggaaaaccgctacaaaggcatccgtacgccgcacaaaatgaagttcggtgtctccggctgtacccgtgaatgttcagaagctcagggtaaagacgtgggtattatcgccactgaaaaaggctggaacctgtatgtttgcggtaacggcggcatgaaaccgcgtcatgcggatctgctggcggcggatatcgatcgcgaaacgctgatcaaatatctcgaccgcttcatgatgttctacatccgtaccgccgacaaactgacgcgtaccgcaccgtggttagaaaacctcgaaggcggcattgattacctgaaagcggtgatcattgacgacaaactggggctgaacgcacatctggaagaagagatggcgcgcctgcgtgaagcggtagtgtgtgagtggactgaaacggtcaatacgccgtctgcgcagactcgcttcaaacacttcatcaacagcgacaagcgtgacccgaacgtgcagatggtgccagagcgcgaacagcaccgtccggcaacgccgtatgaacgtatcccggtaactctggtggaggacaacgcatgaaccagtggaaagacatctgcaaaatcgatgacatcctgcctgaaaccggcgtctgcgcgctgttaggtgacgagcaggtagcaattttccgcccgtatcacagcgaccaggtgtttgcgatcagcaacattgatccgttcttcgagtccagcgtgctgtcacgcgggctgattgcggaacaccagggcgagctgtgggtcgccagcccgctgaaaaaacagcgttttcgcttaagtgatggcttgtgcatggaagacgaacagttttccgtcaaacattacgaagcacgagtgaaagacggcgtggtgcagctgcgcggttaatgttttaacgggaggcgcaatgcctcccctttttgcatggtcctgtaatgaccttcggtatattgcaggacattttttaaactttttgttttatttttttgtttttattttttaaaggataatcaaatgtttacagacactattaataagtgtgcggctaacgctgcgcgcattgcacgcctgtcggcaaataacccgctcggcttttgggtcagctccgccatggcgggcgcgtatgtgggtcttgggatcatcttgattttcacgctcggtaatttgctcgacccgtccgtacgtccgctggtgatgggcgcgacctttggtatcgccttaacgctggtgattatcgccggttctgaactgttcaccggacacaccatgttcctcacctttggggtaaaagcgggcagcatcagccacgggcaaatgtgggcaatcctgccgcaaacctggctgggtaacctggtcggttccgtcttcgttgccatgctctatagctggggtggcggtagcctgctgccggtagataccagcatcgttcactccgtcgcgctggctaaaaccactgcaccggcaatggtactgttcttcaaaggtgcattgtgtaactggctggtttgtctggcaatctggatggcgctgcgcactgaaggggcggcgaaatttatcgctatctggtggtgtctgctggcatttatcgcgtccggctacgagcactccatcgctaacatgacgctgttcgcgctctcctggttcggcaaccacagcgaagcctacacgctggcgggtattggtcataacctgctgtgggtgacgctgggtaatactttatcaggtgccgtattcatgggattgggttattggtatgctacgccgaaagcgaatcgtccggttgcggacaaatttaatcaaactgaaacggctgccggttaattactaaggggtttttacgtggatcatttgcctatattttgccaattacgcgatcgcgactgtctgattgtcggcggtggtgatgtcgcggaacgcaaagcaaggttgctgttagacgcaggcgctcgcttaacggtgaatgcattagcgtttattccacagttcaccgcatgggcagatgcaggcatgttaaccctcgtcgaagggccatttgatgaaagccttctcgacacctgctggctggcgattgcagcgacggatgatgacgcgcttaaccagcgcgtcagcgaagccgctgaagctcgtcgcatcttctgtaacgtggtcgatgcgccgaaagctgccagcttcattatgccgtcgattattgaccgctcaccgctgatggtggcggtttcctctggcggtacttctccggttctggcgcgcctgttgcgcgaaaaactcgaatcactgctgccgctgcatctgggccaggtagcgaaatacgccgggcagttacgcggtcgggtaaaacaacagttcgccacgatgggtgaacgccgccgcttctgggaaaaactgttcgttaacgaccgtctggcgcagtcgctggcgaacaacgatcagaaagccattactgaaaccaccgaacagttaatcaacgaaccgctcgaccatcgcggtgaagtggtgctggttggtgcaggtccgggcgatgccgggctgctgacactgaaaggtctgcaacaaattcagcaggcagatgtggtggtctacgaccgtctggtttctgacgatattatgaatctggtacgccgcgatgcggatcgtgttttcgtcggcaaacgcgcgggataccactgtgtaccgcaggaagagattaaccagatcctgctgcgggaagcgcaaaaaggcaaacgcgtggtgcggctgaaaggtggcgatccgtttatttttggccgtggtggcgaagagctggaaacactgtgcaacgcgggtattccgttctcggtggttccgggtattaccgcagcttctggttgctctgcctattcgggtattccactcacgcatcgcgattatgcccagagcgtacgcttaattaccggacacttaaaaaccggtggcgagctggactgggaaaacctggcggcagaaaaacagacgctggtgttctatatggggttgaatcaggccgcgactattcagcaaaagctgattgaacacggtatgcctggcgaaatgccggtggcaattgtcgaaaatggaacggcagtcacgcagcgcgtgattgacggtacgctcacgcaactcggtgaacttgctcagcaaatgaacagtccatcgctaattattattggtcgggttgttggcctgcgcgataaactgaactggttctccaaccattaatttaacccgggccagagaattctggccttcttaatgactctttttatatattcagcaaataaaacatagccccttaataaatattatctgctaatgggttatattcaccgttacagcgacttacaaaattaagtcattcgctcactgacgccaattaaatattcctgtatcgttcttaacgagcagtctgcttatattcatataatcaatgaatattaattaatatataatacatagggaatgtaaatgaacaaatttattaaagttgcactggtaggtgcagtactggctacgttaactgcatgtactggtcatattgaaaaccgtgataagaactgctcttacgactacctgctgcacccggcaatttctatttctaaaatcattggcggttgcggtcctactgcacagtaagtctctgacagaaatcggctaacaccggtttaattgcccgacgccctctggattttccgagggcgtatttgtttctatgtccttcttgcccccgcccgtaaaaatattttcactttaaattcaatttgataaatacatccattagccacagcgcgatcctgtgcgaaattttgtgatcttcctccacattacataacatcatatgttgttatattcatcatgcattgtcatgttaccttttaaatgactgcaaactctcccctacaacgtattggacaagaaaaaggtatcgctatgggaagccaggaactccaacgcaagctcggattttgggccgttcttgcaatcgccgtcgggacaaccgtcggctccggtatttttgtatctgtgggtgaagtggcaaaagcagcgggcacgccgtggcttacggtgctcgcgtttgtcattggcgggttaattgtgatcccgcaaatgtgcgtctatgcggaactatccaccgcttatccggaaaatggcgcagattatgtttatctgaaaaatgccggaagccgaccgctggctttcctctccggctgggccagcttctgggccaacgatgcgccgtcattgtcgattatggcgctggcgattgtcagcaatcttggctttttaacgcctatcgatccgttgctcggtaaatttatcgccgccggattaattatcgcctttatgttgctacacctgcgctccgttgaaggcggcgcagcgtttcagacgctaattaccatcgccaaaattatcccgttcactatcgtcattggccttgggatcttctggtttaaagcggagaattttgccgcccctaccaccactgcgattggcgcaacgggcagctttatggcgctgctggcggggatctctgccaccagttggtcgtataccggcatggcctctatctgttatatgaccggcgaaattaaaaaccccggaaaaaccatgccacgagcgctgattggttcctgtctgctggttctggtgctctacaccctgctggcgctggtgatttccggcctgatgcccttcgacaaactcgccaattctgaaacgccgatttccgacgccctgacctggatccccgcactcggcagcaccgctgggatctttgttgccatcacggcgatgatcgtcattcttggttcgctttccagctgcgtgatgtaccagccgcggctggaatacgcgatggcgaaagacaacctgttctttaaatgcttcggccatgtgcatccgaaatacaacacgccggatgtctccatcatcctgcaaggggcgctggggatcttcttcatcttcgtttccgatctcaccagcctgctgggttatttcaccctggtgatgtgtttcaaaaataccctcaccttcggctccatcatctggtgtcgtaaacgcgacgattacaaaccgctgtggcgtactccggctttcgggctgatgaccaccctcgccattgcgtcaagcctcattctggtcgcctcaacctttgtctgggcaccgattcccggccttatctgcgccgtcatcgttattgctactggtctgcctgcttacgccttctgggcgaagcgtagccgccagctcaacgctttgtcgtaatgttatctggagaaaataaaatgttggatattgataaaagcaccgtggactttctggtcaccgaaaatatggttcaggaagtggaaaaagttctcagccatgacgttccgctggtgcacgccatcgtggaagagatggtgaagcgcgacattgatcgtatttatttcgttgcctgcggctcgccactcaacgcggcgcaaacggcgaaacatctggcggatcgcttttccgatcttcaggtctacgccatttccggctgggagttctgcgataacaccccgtatcgcctcgacgatcgttgcgcggtgattggcgtttctgactacggtaaaacggaagaggtaatcaaagcgctggagctgggccgggcctgcggcgcactcactgcggcgttcaccaaacgcgcggacagcccgattacctcggcggcggaatttagcattgattatcaggccgactgtatctgggaaattcacctgctgctctgctacagcgtggtgctggagatgatcacccgcctcgcgccgaacgcggaaatcggcaagatcaaaaacgatctcaagcagttgccgaatgcgctcggtcatctggtacgcacctgggaagaaaaaggccgccagcttggtgaactggccagccagtggccgatgatttataccgttgctgcgggtccgctgcgtccgctgggttacaaagaaggcattgtaacgctgatggaatttacctggacgcacggctgcgtgattgagagcggagagttccgccatggcccgctggagattgtcgaaccgggcgttccgttcctgttcctgctcggcaatgatgaaagtcgccacaccaccgaacgcgccattaactttgttaaacagcgtactgacaacgtgatcgtcatcgattacgccgaaatttcgcaagggctgcacccgtggctagcaccgttcctgatgttcgtgccaatggagtggctctgctactacctgtctatttacaaagatcacaacccggatgaacgccgctattacggtggtctggtggaatattaatccctctcccggcccggcaacgggccgaatttacgcaaggagttacccgatgaaaacaggtatgtttacctgcggccaccagcggctgcctattgaacacgcatttcgtgatgcaagcgagctgggttacgacggcatcgaaatttggggcggtcgcccgcacgcgttcgcgccggacttaaaagcgggcggcatcaaacaaatcaaggcgctggcgcagacgtatcagatgccgattatcggctatacgccagaaaccaacggctatccgtataacatgatgctgggcgatgaacatatgcgtcgcgaaagcctcgacatgatcaagctggcgatggatatggcaaaagagatgaacgcgggttatacgctgatttccgcggcccacgcgggctatctcacgccacctaatgttatctggggacggctggcagagaacctaagcgaactgtgtgagtacgcggaaaacatcggcatggatctaatcctcgaaccgttaacgccgtatgaatcgaacgtcgtgtgtaatgctaatgatgtgcttcatgcgctggcgctggtgccttcgccgcgcctgttcagcatggtcgacatttgcgcgccgtatgtccaggcggaaccggtgatgagttatttcgacaaactgggcgataaattacgtcatctgcatattgtcgacagcgacggggccagcgacacgcattacattcctggagaaggcaaaatgccgctgagggaactgatgcgcgatattatcgaccggggctatgagggttactgtacggtggagctggtgacgatgtatatgaacgagcccagactctatgcccgccaggcgctggaacgctttcgcgcgctgctgccggaggatgagagatgaaaaccctggcgacaatcggcgataactgcgtcgatatctacccgcaactgaataaagcgttttctggcggtaatgcggtcaatgtggcggtgtactgcactcgctacggcatacagccgggatgcattacctgggtgggtgacgatgactacggcacaaagctgaagcaggatctcgcccgcatgggcgtcgatatcagccatgtccatacgaaacacggcgttaccgcacaaactcaggtggaactgcacgacaatgatcgcgtttttggcgactacaccgaaggcgtgatggccgactttgccctgagtgaagaggattacgcctggctggcgcagtatgacattgtgcacgcggcaatctggggacatgcggaagacgcattcccacagctgcacgctgcgggcaaacttaccgctttcgacttctccgacaagtgggacagcccgctctggcagacactggtgccgcatctcgattttgcctttgcctccgcaccgcaagaagacgaaacgctgcgtctgaagatgaaagcgattgttgcccgtggcgcaggaacagtgattatcacgctgggtgaaaacggcagcattgcctgggatggcgcgcagttctggcgtcaggctcctgaaccggtgacggttatcgacaccatgggtgccggagattcgttcattgccggattcctttgcggctggtctgcggggatgacattaccgcaggcgatggcgcagggaacggcgtgcgcggcgaaaaccattcagtaccacggtgcctggtaggtataacgttggcgtgagcatcttcacgcaacgtgctgttacttgccggaaaacgaccctataatccgagtaattcattctttatttcagggtcgattatgtcagctacggaccgctactctcatcaactcctctacgctaccgtccgccagcgactgctggatgatatcgcgcagggggtttaccaggccgggcaacagatccctaccgaaaacgagctttgtacacaatataacgtcagccgcattaccattcgcaaagccatcagcgacttagtggcagacggcgtactgatccgctggcagggaaaaggcacctttgtacaaagccagaaagttgaaaacgccctgcttactgtcagtggttttaccgattttggcgtctcacaaggcaaggcgacgaaagagaaagtgatcgaacaggaacgggtcagcgccgcgccgttttgcgaaaagctgaacatccccggaaacagcgaagtgttccatctctgccgggtgatgtatctcgataaagagccgctgtttattgatagttcatggatcccgctgtcgcgttatcctgactttgatgagatttacgtcgaaggaagctccacctatcagttatttcaggagcgttttgacacgcgagtggtcagcgacaaaaagaccatcgatatctttgccgccacccgcccgcaggcaaaatggctgaaatgcgaactgggcgaaccgttgtttcgcatcagcaaaatcgcctttgatcagaatgacaaaccggtgcacgtctccgaactcttctgccgcgccaatcgcatcaccttaactattgataataaaagacattaaccgtaggccggataagatgcgccagcatcgcatccggcgatgctggcgcgttgaattttacatcccgtacgttcccctcaccctaaccctctccccaaaggggcgaggggaccgttcagtacggaatttagcttgacggtgctatccagcattaaatactggcaatactctcacgcaaaatccgcagcaccgtctcttcaccgctgcgattcgggttaatgcgaatcgcacaatgttctgattgtggattcgcctggcgaaacgttccggaaaggcgataaaagagcggcgggatttcatatttcgactctgcacccaccgggtaaggcaaggcaccgcgcttttgcgcctcttccagcactctggcggcaatcggctgatgaaactcgacaatcaacaccttcgactgcgcattagcaatcaccgcgcttttcacttccggcaccgcaccaccgttaagcaaagccagcaaccgttcagatacccctgcctgcaccgcgtgcatcactggcgcaaacaccagaccacgcaatacttccagcgcctgtgcgccctggatctggctaccgccggagtaaagcgtggcgcgaatacggttgataacatcagcatcgccgaccactgcaccaacaccctctggcccaaatagcttgaagcaggaaaatgtcgagacattcgcgccgcattcacagccgattcgcgccaccttcatcaccgcatagttgtcatcggttaacgctggaacacctgccgcgcgcaacgttgccagcacatctgccagcacgtagctgtcctgcggctgctggcgcgtatgctgcaccagcgccgcatccggttgttgctcgtcgacgacctgcttcagtgccgacaggtcattgaaatcaacagtaataagcgtcagccccatctgctcaataataacccgtgtcgtcgggtaaacaggcgcgtcatgcaccagaagacgctgccccggtttgagcaaagccgccagcccggcgcgaatcgcgccagtccccgcgccctgcaccagcgccgcagcctgtgcgtgaaatgcatcagccagcacctgttccacacgctgggtaacgcgcggttgattcagtcctggcgttaagcctaaatcaccgccagtaagaaactcgctgccggggaaatggcgacaaatgctatccaccagcgcaaactgcttttgctgcgcctcaataatcgtcaggctttgcagaggaaacgtcttcataggtgccttccttaagccggaacgaacaggccaagccagtaaagaacattcagcagaataccggtgatcattactgccacgaccggtgccgccattttctgtaccggacggcccagggattcgttgaggaagtaaatggcaaccgcgatagagaatccggtataacccgccatcttaattgctgcgaaaatcgaaccgaccagcagcgccacttccatcagcatattcatggcgttacggatgttatccgacgcattacgcaccgacgggtagcgtcccagccatttgccgatcgaacgaagcagcaagacttccgccgaaataaccactgcgcctaataccgctgcaaccatcggattcggcgagagatagcccaccgcataaacaaaggtaaagcccgcaactgcatacacacccgttgctaaggcggtggtggcaatcaacggtacaaaacccagcccgcgcataaattctgccagtgccgcctggttgatcagcgtttgcgattgttccggcgttacgcctgcggagtacgctttctccagagtgaagatcgacacttcactgccggcgaaaatcttcatgctggcaacggcggcaatcaatgctcccacgatggcgatatagggtaagtttttgataatccgcgacgtgcgttcttcaaacaccgaaagcccgctggcatcaatatcattttcatcacgatgacgcaggtcgtgagttatcgcgatccccagcagcatcaccatgccaataaagatttcgatggattcagggttaagatgtgggaaatagcgcacgactaccacacgggtcatcagtaccaccacggcggcgatcagactttgcttccagccaaactggtagaaaatcgccaccagcgggaacagtgcaaaagctgaaaccaccggcgagcttaattcccccaggctacctaatacatccaccggcagcgcggtcagcagctggtttactggcaacaggcaagtaaggatcaacacgccccagatagcgccaagaccaaacgccatcaggctgtttatcgccaggacgccgaggatatcggtaggaagaaagagtaaccatgcgttgagcagcccggttttcagggtaaaagagatccccaccgaggccacaaaaccaatgctcagaccaaaagcgatactccccgcctcgcgacggttcatatagccttcaatcagttgcggcaggatcgggcggatgccgtcatgaaaaacagccgccgagcgatgcgccagaagcgatgtcatacccgtcaggcacgccaccacgataatctgaatatacagatccatagtcgtgccttttatttcagatggttaatcaacatcggaatcgcgtgttcgacgtgctcaacggaaaggccaaacgccacttttccttcggcgatcattttggcgatatgctcgtctttcgctttaatgcctggtttggcaatggtgcaacttttgttatagccaatcaccgcgatggcaatcgacaatgccgcgcccgcaccggtattacacgcgccgatgtaataatccagttgcccggatttcactttcattgccgcttccatgtcgttgtgaatgaaaacttcaaaactgccaggagccgtcgcttcaatggtttttttaatctgctcacgctgtaagcctgcaacgccaatctttttcatgagtctgtccttattggaaaaattgagagggagtttcacgtaacatcacatccacatcggcctgactgaatcctgactggcgcaattgcggaataaaggtggtcaataaatagtcatagccataaccaccattggcttttaaatgggagcggcgcgtaatatccatcgacagcatgacgcggttcagcaacccacggtcacgtagcgcatgaagcatcgcaatacgcttttcgtccgggtagtaactgttcttaccaatggtgtcgaactgcacgtacgcgccgagatcgatcatcttcaaaatgttgtcgaggttgtctttcagatcgcagtgaccaacggtgacgcgcgaaagatcaaccccgtgggcttgtagcaacgccagttgctccagccccatcgtgctgaacgacgtatgcgtggagatcgggcgtccggtctggttatgcgccagcgcagcggcaataaataccttctcttccagcggcgtaatctttccttcgctggtgccgatctccgcgatgatcccggctttcagctccgtgccatcgataccctgttcaatttcatcgaccatctcctgcgccagttcctgcacgctgcgggtcgccacatgttccgggaaaaacgcgtcctggtaataaccggtacaggccaccacgttgatccccgtctcgcgcattacatcaagcataaattgcgcattgcgccccatgtaacggttggtcatctcaatcacattacgcacgccccgggtcatcaggtcgttcatctcctggcaaatgaacgcatactgatcaaggcggcagtccacgttgtttttaaagccggagagatcaatatgcagatgctcatgggcgagggtgtaacccgtcggatcaaaactcatagggtgtctcctgcaaaccggagggaggaaagaaaagagcgaccattttgtggcggtggcgcacggaaaaattcacacacggtagcccccacatcagaaagcgtggtgcgaacacctagctgagtagcagccaggccttgctgataaaccagcactggcaccacttcgcgggtatggtggctgtgaccaatggtcggatcgttaccgtgatccgccatgacgatcaggcagtcatctggctgcatcgcctcaacaagccgggcaaggttacggtcaacgacctgcaaacgttcggcataacgtgcgacgtcttctgcatgaccagcgaggtcggtttcctggatattggtgcaaataaacgccgtcggatgcgtgttaaattcgtcgagggtgatatccataatccgctggctatccaccaggttttgccagctcacgccataaggattgctgacgatatctgccaccttacccaccagcacggttggcacgcccgcctcatacagtttttgcggcacctgcactttttcatcaacaccgtagcccatatgcacgacctggaaaccgttgtcataagcgccagaacgcggcgcattaataccaataaagcgcccttctttgctttctgcggcatcgagaatacgctgactgttggttaacaggccgccaaatgtaatgacccgaccgacctgtacctgctcacgcacgatacgaccaattttgattgcgtcgtcaaaagagatcacagagagattggcggtgatgttatagacctggcctaaatccgcctcgagattatcgccaatcgcaaccgcctgattgacccacagaaattgcagatcatcgccacggcgctccacctgccaaccggcggatactaatgcctgctcaacacggtcaatcacatcgcgaaaaggcatccgcagcggcggtaacgggcgcgtgcctaaaatttcctgatgccccataaaggtatcgccaccttcatgttgcagctctgccacgccccaggttgcggagtctgacggctgcatatcgcctggcgcataacccaatgtgttgattagccccagcttctccagcgttggtagctgcaaatgcggcaactggctcaggatgtgaccacaggtattcgccccggcatcctgcgggcgcaccagcgtgacatctttcattgcccctacgccaaagctatcaatcactaacaccacaaatcgcgccattacgcccccagagagtttccaagactgtcataacgaccgacgatttccggttcgccacgatgaataccagacaccagcaccacatcactgcgggtgacaaaaatctgcgtgcgaaaacagagcactactgcactgcttaccggaaactcgcctgccagcggcagggtgtagtcgatactgctgtcatccacagttttgagattggtttcagtaatcttttgattttctggcgtaaacaccagcgcatgttgcgcgtgaccacgacggtagtaaccgccgccgtagcagtagctgtcgccacggaaaaaatgggagatttcacttaaccagagcatcgcgatacgttcaggctgatcgccctgctggtttgccggaatagtgcccgtcagcgcatgaccgggttcggcatgagtcacaccgtattgcgccagcaatggcagcgaagtgcagctggtcgctgaaggcgcgttcagttgctcaatcgcaataccagatttcgccagttgatcccgtgcttgtaccagcgtgtgaagattcggtgtcggcaaaactttcccggcagcctcatcccaaagcaggcaagggaaatgggttagtcccgccaaatgcagccccggcagtttcttaatttcagcaaccacctcgtgcagcgaatgctgtacaaaaccgctctcctgccccggataaagaaaatcatcgtcgctataaactttgagcagcacagactggattcgcccggccttcaccgccgccgcagaaacttcccgcgctttgtcgagagtaaacacggtgatgacgtcggtgccctgttcaacggcgtcagcaacctgatgacaagggatttgtaccagatgcccctgatgcgccaccggcaaaccagcgcggcgcatgactcgcgcctctttgtaatccaccgccacaatgccgctgtagcccaacgccagcagtttttccgccagccatgggttacgaccgaattgtttggtcatcagatacagttcaatgccgtaaagccgcgccgtctcaatcagccgcttaccgttttccagtatctgatccacgtcgatcacccagctgtccggggcgattttgccctgctgccacaaacttagtgcggcggaaatcagcgccgggttctggcgtttcaatgcttctacaaacatcttgttgcctcgtttctgttccttgaattaaatattcatttttttgaatatttaggttgtgcgacgtggatttgtcaggagcttcaaacctcttcgttagcagccatccataatccataaaggttggccagcaaatagccttcttcacacgggttaacttccagtgcgaattccttcaacaacacctgatgcaattgcacaacggcttgccagtggctggattgcgccagctctgccagcaattcgttatccagcggctctatttcttcaccacggcgactgcgcatcagtgcactcgccatatgtgtcatcgccatcgttccttgctcactgcgcaccggcagatggcactctgtttccagtacgttgacgacctgcatcatgcctttgcagatgtccttatcaataacgcctgcctcgcaaagcaggttgagtctggtttccatatcagatgcctttcgtttaataactcggttcctgttccccactcactacccgttgttgatgggcgagcagggcgtgtttatctacaacggcacgcagcagttgttgcattgggtaatcatcgactcgcgtcaggaccacggcttcggtggcctgtaaaaatcgcggatcgtctgtgagcggcgtcgcctctaatcccagcatggtcagttcgttttccgccaccacgttccagatcaccgcatcgacatcgcctttaacaatgcgttgtaaactctcgtgataagagagatcgactcgttccacatcactaccgccaaaaaaacatcggtcatgattttctgatccgccgaacggttatccagccccacgcgcttcacgtttgcggactcgcctttacggcaaatcaactggtgctcgccaacgtaggtgtgcggccccaactccagcgcgaggcataaccctttttgcgtgagataactttccgccgccagtcgggaaaccaccgccatgtcatacacgccgttaagtaaacactccacgcgaatatccgcgccgcgcatatgcgcatagtaaaaaggaatgccatcaaactgagctttcagcccgctcgctaaaccttcgtacaagcgggtatagggcaaaggcatcgcacataccacgttgttgatatccacatgactcagcaatgctttgttatccatctcgaccagataactgccattgcgcccacggcgttcaatccgtatcgctccgcttgattccagcgttttcaacgcggcctgcgtcaggccaaccgatgaacggcattcagttgccagctcatctatggttttcaacctattaccgcatttttcacccaacaaataacgggccagcgtcgtgataacgacgccttcttttttgataaacgttcgacgcataatatattttcaataaaatgaatgtttatatcttcattaaaatgaagataagtggcaactgtgagatgtggaaacggcgaggcgcttcacattttttcggattattgcaaatgaggataaaaaaaccgggtttccccggtttcagagtgatgacgaagtgatttattcgacaatgcgagcaaagggtaattcccactggcgcttgcctgctcccctcaccctaaccctctccccaaaggggcgaggggaccgtccgagcgttttgatattacggcttcgccacaaaaccaatcgcttcgtacaccgctttcagcgtacgggaagcgtgtacactggctttttctgcgccgtctttcatcacctgttgcaggaaggcttcatcgttgcggaaacgatgatagcgttcctgcaattcagtcagcataccggaaacggcatcagccacttcacctttcagatgaccatacatcttgccttcgaactgtttttccagttctgggatgctctggcccgttaccgcagaaaggatatccagcaggttggaaacgcccgctttgttctgcacatcgtagcgaactaccggcggctcgtcggagtcagtgaccgcgcgtttgattttcttcactaccgatttcggatcttccagcaggccgataacgttattgcggttatcgtcagacttggacatcttcttggtcggctccagcagcgacattacgcgcgcgccagatttcggaataaacggctccggcaccttaaagatctcgccatacagcgcgttgaaacgctgggagatatcgcgactcagttccaggtgctgtttctggtcttcacccaccggtaccagattagtttgatacagcaggatgtccgcagccatcagcaccggatagtcaaacagaccagcgttgatgttctcggcataacgcgcagatttatctttaaactgggtcatgcggctcagttcgccgaagtaggtatagcagttcagtgcccagcctaactgcgcatgttctggtacgtgggactgaacaaaaatggtgcttttctcaggatcgataccacaagccagatacaaggccagcgtatccagcgtcgctttacgcagcttctgtgcatcctggcgcacggtgatcgcgtgttggtcaacgatacagtaaatgcaatggtagtcatcctgcatgtttacccactgacgcagcgcacccatgtagttaccaatggtcaattcacctgagggctgtgcgccactaaaaacgatgggcttagtcatttttcgattcctgattttcgctatgcggaagccctaatgcgggcagaaggtcatttatagactgataaattacatcaggctggctgagatcgatagcctcgccgtagttatatccgtaggttaagccaactgatgggcaacctgccgcttttgccgcctgaatatcattgcgtgagtcgccgacaaacagcatctcttgtggggcaattcccatccgctcagccaccagtaacagcgggtccggatgcggttttttgttttgcacatcatcgccgccgataaccacgctaaagtatttggcaatatctaaggcttcgagcagcggcgcgacgaacggcgtcggtttgttggtgaccaggcctagcggcaggcctttagcctgcaacgcgcccaacgtatcggcaacgtgcgggaacaaaaacgtcccctcttcggcaacctcgctatagtagcgatcgaacagtttacgcagaatacgtacctgttcttctgccggaatgtcgtcatcaacgggcggtttacccattgttttacgcagagtcgcacgttcctgacgcgcccaggccaatgcacgctccatcagaacatctgcgccgttaccaatccaggtaataacgcgttcttcacctgcgacgggtaactccaacgcatacagcgccatatctaccgcagcagcaagaccgggagcactgtccaccagcgtaccgtcgagatcaaaagcgacgccgcgaatatcttcaaacttactcatgacttacctttgccagttcactgcgcatttcatcaatgacttttttatagtctggctggtcgaagattgccgaaccggcgacgaacatatccgcgcccgccgcagcgatttcgccaatgttgttcaccttcacgccaccgtccacttccagacgaatgtcaaagccagactcgtcgatacggcgacgtacttcgcgcagtttatccagtgtttgaggaatgaaagactgaccgccgaaaccaggattgacggacatcagcaggatcacatccagcttatccatcacgtaatccagatagctcagaggtgtcgccgggttaaataccagacccgctttacagccattttctttaatcagttgcagcgtgcggtcaacatgctcggaggcttctggatgaaaggtaatgatgctggcaccagcggcagcgaaatcaggcacaatgcgatcgacgggtttcaccatcagatgtacgtcgataggggcggtaatgccatagttacgcaaggatttcagcaccattggcccaatcgtcagattgggaacatagtggttatccatgacgtcaaaatgcacgacatcagcgccagctgccagggcttttgcggtatcttcacccaggcgggcaaaatcagccgacagaattgagggggcaatcaaatactgtttcatccgcttctccttgagaattattttttcgcgggtgaaacgactcctggtttgtacaaagccagcagttcgtccacctttttacgtgtgccgccgttgctgcttatactgcgtcgaactttgacgacatgcaattttgcgcgctgataccactcacgcgttaacatcgtatcgtgattggagatcagcactggaatatggcgctcaaccagaccttcggcgatctccgccagatgcgcttgttgttcaagcgtaaaactgtttgtgtgatacgccgtaaagttggcggtcgcagacagcggtgcataaggcggatcgcaatagacgacggatgcatcatctgcgcgcgccatgctatcggcgtaagactcacaatagaaaaaggcattctgcgctttttcagcgaagtgatacaactctgcttccgggaaatagggttttttgtagcggccaaacggcacattaaactcaccgcgcagattgtaacgacacaggccgttgtaaccgtagcggttcaaatataaaaacagtaccgcccgacggaacggatcctggcttttgttgaactcttcgcggaactgatagtaaacctcggcgcaatttgtttcgggaacaaacagctcgcgtgcggcctgtacgtactcatcagtacgcatcttcacaatgttatagagactgatcaggtcgctattgatatcggcaaggatataacgagaaaagtcggtgttgagaaacaccgacccggcacctacaaaaggctcaaccagacattcgcccttgggcaaatgccgtttaatatcatcaagcaggggatacttgccccctgcccacttcaaaaaagcgcgatttttcttcatgctgactaactaattacaccttctccggctgtggagaaagctccgacagcatccagcgcttcaggcaactcccgcaacgataaaccattgcgggagataaccttgattacttcagatcggcctgtacctgacgcagcggtttcgcccacgggtttttggcctggacatctgctggcaatgtagataccgcttttttcgcctcttctttcgaagcgtacacgccagaaaccaggacataccacggctgaccattacgcgtcgtttcatagacaacgtagtttttcagattctctttcttcgcccaaccgttcaggttgtcgtagttagaggaactgctcagctgcagagtgtaatggctggacggtgccgatttcaacgaaccaacattacctgcggtcttccctccagcggctggtgttgccgtggtttgcgccggggatgccgtctgtactggagccgtagtcgccgtctcttttggtgctggcgtagaagtcgcagccggtgccttcgtgctcgccacaggggcagctggttcagtacgcttcggcgtctgtgctaccggcttcggctccgttttcacggttgcttgcggttttttcggttcaatcactgcctgctggcgagctggacgcgtagtggccggacgttcagcggtttgcgttttcgccgtgtcacgcgatgcattgccattgcgaacaggcgcgacagtcgcgggttcggtcggcaatgtggaattgaccgccacattgttcaactgttgctgattttgtggctgggtcagcgcattgttcaggtcaccctgcacttcaacacgttgttgaccatccgttgccgccggggtttgcccttgagtcggcgtagaagagatcggtggcagagaaacatcctgctgagtattttccgcagacgtggttcccggcgctggctgcacgccattcgcctgatcggtcgcattgcctgcaagatcaatactcttctcgccagacgcggtttgatcgctggaagaggttgagggggcttttagcgcagaaccaataccgatgatcaacagcagtagaaccagaatgccgacacccatcatcatatactgacgagaagcgggtttactggctgcttttttgcgcttacgcggacgacgctctacgcgctcttcatccacggtttcatcttcggattcgtcaatttctgcttcgatttccggttcctcattacgctctttttgcgcacgagtcggacggcgatcgtcagtgtcatcaagttcaatatcatcaaaattgatctgcggttcgccacgttcagtacgctcagaacgttcagaagattgacgagaacgaccagtacgacgatcgctgggatcgggtttcagctcgtcttctggtttgaattcatccatttaacaccccactaaaaggttaatgcttaccacgttgcaattaacctgaagctaatagaccgcttgataagcggcctgacctttcttgttgttacgctgattgacaatcggcaatggcgttaagaacaagctcgtgcgaaacgccgctgcgaacttcactcttaccaattgccaacggaagaattaagcgtatctctcccgcaaggactttcttgtcacgcagcatatgcggtaaatacgcctgcgcggacatttcgcgcggcccattgaccggtaacccagcccgcttgagcagggttataatacgctgcgtttcggcagaactaaactgcccgagacgttccgacgtccgcgccgccatcaccatacccgcagcgaccgcttcaccatgtaaccaattgccataccccatttcagcttcaatggcatgaccaaaggtgtgtcccagattcagtaaagcacgtaacccggtttcgcgctcgtcggcggcgacaacttctgccttcagttcacaacaacggcgaatacagtacgccattgccggaccgtccagacgcaacaacgcatccagattctcttccagccagttaaaaaacgcaccgtcaagaataatgccgtatttgatgacttctgccagccccgacgctaactcacgcgggggaagcgttttcagacagtcgagatccaccaccactgaagcaggctggtagaacgcgccaatcatgtttttaccgaggggatggttgaccgcagttttgccgccaacggaggaatcgacctgcgacagtaacgtcgtcgggacttgaatgaaacgaacaccgcgctgataactcgccgccgcgaagccggtcagatcgcccactacgccgccgccaagcgccaccagcgtagtatcgcgaccatgcggcttttgtaacaacgccgtaaagacggtatcgagtacagccaggcttttatactgctcgccgtcagggaggataacgctatcgacgttaacacccgcctgttcaagtacgccgcggaccttatcgagatacagaggagccagggtttcgttggtgaccaacatgacctgctcgcccgatttcagcggtaagaatgaagctggttcattaaacaaaccagatgcgatggtaattgggtaactacgttccccgagagtaacgacaatcctctccataacgcgacatccaccttaattactgtacccgcagacgagtgtatataaagccagaattagttgctttccagcatgtgaataatctggtttgcaaccactttagcgctttgatcatcagtacgaatggtcacgtcggcaatctcttcatacagcggattgcgttcattggccaacgcttccagaacttcacgcggcggtgtttcaacgtgcagcaacgggcgttttttatcacgctgcgtgcgtgcaagttgcttttcgatggtcgtttcaagataaacgacaacgccacgagcggaaagacggttacgcgtttcacgggatttcacagagccgccgccagtagccagcacaataccctgtttctcggtcaactcattgatgaccttttcttcgcgatcgcggaagccttcttcgccttctaaatcgaaaacccagcccacatcagctccggttcgtttctcaatctcttgatcggaatcgtaaaattccatattgagttgttgagctaactggcgcccaatagtgctttttccggcacccataggcccaaccagaaagatattgcgtttctctgccattttttcggtactactaagactattcgttaatgataaacccgcttcgctcagagagcgccgcaggacatgaactgaaacctcataagatattgcgagagtcagactgaaaattatctcaatactccagcgggtttggcaactgaataaatcacccatccctctgcatatctggtcgctgcaagcgcgctgccttgctaccaccgctctggcgataaatcaccgggtaagattagcgtaaaaaagacagcaaaatgccgcctgaatgataaatcatcatcatggaacgcaggcagcgaagagcaccaactctcaaatcggtactccttgtatgctaaatacctgcgcgcgtcaaatagatgaaacacgttcagcgtaaaaacattaccgcttttacggctgtttactcactggaaaccagtcgtggcgtgataaacaccactaactcgcgtcgttcatcttcttttccgtcatgacgaaataattgcccgaaccagggaatgtcgccaagcaacggcacgctatcctgacccgatttatttttacgggtaaaaatgccgcccagcgccaacgtttctccgcttttgacctcgacctgcgtttcgatctcctgcttatcaatcgccagcacttcgccatcggcctgctgtagcacctgccccggaacgttctggctgatgtgtaatttcagccggatgcgacctttttgtaacaccgtgggcgtgacctccatccccaggacggcctctttaaattccaccgacgtcgcgccactttccccgctggaaacctgatatggaatttcgctcccctgtttaatactggcaggctgaagatgtgaggccagcagacgcggactggcgataatatccagctgctgtttttgttcgagcgcggaaagctcaagatccagcaaacgtccgttgatgcgcccaatgttaaaaccgacatgcgttgtcgccgtcgctacggagaggtcgctaccaagcgtggtgacttgcccaacaccaccagcgtgttgcgcatcggccagcgtccatttcacgcctaactcacgcaaacttttttcattaatggtgacaatatgcgccgacagctcaacctgcccgaccggaagatccatttgcgctacccactgttcaagcgcgcttaacgccgttttgttatctcgtagcaaaaggcgattggtgcgtttatcgacggtcatactccctttggcactcagtagcttctcccccgctttcgccagttctcccgcgtcggcgtattgcagggttatactgcgattttccagcggcagatttgcctgcgcccgcgcctgctccgcctcctggcgggcgatattgtcattctgccaggcaatagaatgcactgagagaatgttgccctcctggcgcgttatcagcccggcgcttttcactacagtttgtagtgcctgcttccagggaacatctgttagatgtaacgacaccgtaccgctgacgtctggcgacacgaccaggttcaacttctcctgttcagccagcgcctgcaacacctgagccaccggaacgtcatccaccatcagcgtcactttttgcggctttgccgcctgtacgccgggtatcagcatcaacagtagtgcggctatccattgcttcatttgtatctccttgccgttgccacaaccattgtggcggttcgcagtttgtcccggtacccagcgttagtacgtctggcgtcagctgtaaaattgtccagccgttttccagcacatcgttttgctgcacccgtcgccatttcttttgcccgtcttttattacaccgatgatgcgctcgcctcgccctaccatcccctgatagcgccactggctaagttcgctaatccggcatagatcttccggcggtttaaaagggtcacgcataccggttaaaaggcacaatgcaatacctgccaacaaccagcgtttaaccctcatgcggcgtctccagttgtagcgtgaacaaaagatcatcaccttccacgcttaacgaaaaacggctcacgctgacgttgcgctctgccagccgtgtaaatgccgacggcactgcttcccacagcgttttcaacgccaactcgcctccctgcgcggatggatgccaggaaaccagttgcgcgccggataactgaaaatccagtggcgaaaagggcagcgttttttcctcgctgaagggagtggtgtctaccaggcgatacagtgcggcccactgctggtgatgacttgcccgtagtcgaattaatgcgtcgcgctcttcatggtgtgtcgatgatagaaaatgagcgtaactaacatcagcaaccagaatgcccagcaaagctggcggaggcggggtgatgtggcgaaccaccagtcaaagaacatgttcatcgctaaccttccttgttaactgatactcaaattgccagcgtccctgcgcatcctgctgcgtggctccccgctgattgagatgaaaagacgcatcctggcggagtgacgtttctagtgcgtttaacgcggtaatgcttgttgtcagccccttgatctccagcgttccctgctgccagcttatcgttgtcagccaggcgtgctcgggtaaaagcgccgccagtgcttccagcgcagattgccagtcgcgggtaaattgtcgctggcgctgccgttgcgaacgctgttcgcgtaactgctgttgctccagcaaacgtggcttcgttatctgtaagctgcgggcgagttgttgttccgcctgaagcaaaactgcgtctatgcgcgcttcggcgctgcctgtcagacgcagtattagcgttatcccgacggccagcagcagaggcgcaacgaacatcagcaaccagaaacgcagaaaagcggtccggcgttgctgtcgccagggcaaaaaattaattggcgggttcatcagtacgccttcccaagcgccagccccagcgcgatggcaaagtctccacctggcggcggtagcggcggctgacgaacagaaacggcctcccagggatcaaatcccccttcgccacatatcgcgacgctttcgggatcaacggataacgctgccgccagctccttcgcgctagtcatccccaccgccagtttgcgcccccagcgacagcgtgtcgcccacagccactgttcgttatcacgccaggccagacattgctgatgagaaggtaaaaaaggcaggaattgctgtaatgcactggcatccggggtgatcgcgctcacatgaacacgcaacctttctgccagagtaagtagcgttgccagctctttgctttgcgcggcagtcacgttataggcggggctgagtgagtcttcgctgtaatcgaagcgcagggagtccggatccatatccagctcgcgggccatcgtccctgacagccaggccgtttgctcccgctcaccaagggacatcgacgggcgcggaaatgaccgctgtaatgtgcgactggcgggaaacgccaacataatgtgatgacgctgcggcagttcgcgactccacggtaacaacgttttagccagctgctgcgcatcaacaatccgcccatctttgataatgtcgttctccagcggcaaccgccaccagcgttgcaaaaagcattcttttgctccccgcacgatcgcaaccgctaccgcttcttgctgttgtaaatgcaaaccaatttgccagatcttaaatgccattgtgatgatctccttatcacccgtcactctgacgggtatatcaatgcgtctggcttgcctttatactaccgcgcgtttgtttataaactgcccaaatgaaactaaatgggaaatttccagtgaagttcgtaaagtattttttgatccttgcagtctgttgcattctgctgggagcaggctcgatttatggcctataccgctacatcgagccacaactgccggatgtggcgacattaaaagatgttcgcctgcaaattccgatgcagatttacagcgccgatggcgagctgattgctcaatacggtgagaaacgtcgtattccggttacgttggatcaaatcccaccggagatggtgaaagcctttatcgcgacggaagacagccgcttctacgagcatcacggcgttgacccggtggggatcttccgtgcggcaagtgtggcgctgttctccggccacgcgtcacaaggggcgagtaccattacccagcagctggcgagaaatttcttcctcagtccagaacgcacgctgatgcgtaagattaaggaagtcttcctcgcgattcgcattgaacagttgctgacgaaagacgagatcctcgagctttatctgaacaagatttacctcggttaccgcgcctatggtgtcggtgctgcggcacaagtctatttcggtaaaacggtcgaccaactgacgctgaacgaaatggctgtgatcgccgggctgccgaaagcgccttccacctttaatccgctctactcaatggatcgtgccgtcgcgcggcgtaacgtcgtactgtcgcggatgctggatgaagggtatatcacccaacaacagttcgatcagacacgcactgaggcgattaacgctaactatcacgcgccggagattgctttctctgcgccgtacctgagcgaaatggtgcgccaggagatgtataaccgttatggcgaaagtgcctatgaagacggttatcgcatttacaccaccatcacccgcaaagtgcagcaggccgcacagcaggcggtacgtaataacgtgctggactacgacatgcgccacggctatcgcggcccggcaaatgtgctgtggaaagtgggcgagtcggcgtgggataacaacaagattaccgatacgctgaaggcgctgccaacctatggtccgctgctgcctgccgcagtcaccagcgccaatcctcagcaagcgacggcgatgctggcggacgggtcgaccgtcgcattgagtatggaaggcgttcgctgggcgcgtccttaccgttcggatactcagcaaggaccgacgccgcgtaaagtgaccgatgttctgcaaacgggtcagcaaatctgggttcgtcaggttggcgatgcatggtggctggcacaagtgccggaagtgaactcggcgctggtgtcgatcaatccgcaaaacggtgccgttatggcgctggtcggtggctttgatttcaatcagagcaagtttaaccgcgccacccaggcactgcgtcaggtgggttccaacatcaaaccgttcctctacaccgcggcgatggataaaggtctgacgctggcaagtatgttgaacgatgtgccaatttctcgctgggatgcaggtgccggttctgactggcagccgaagaactcaccaccgcagtatgctggtccaattcgcttacgtcaggggctgggtcagtcgaaaaacgtggtgatggtacgcgcaatgcgggcgatgggcgtcgactacgctgcagaatatctgcaacgcttcggcttcccggcgcaaaacattgtccacaccgaatcgctggcgctgggttcagcgtccttcaccccaatgcaggtggcgcgcggctacgcggtcatggcgaacggtggcttcctggtggacccgtggtttatcagcaaaattgaaaacgatcagggcggcgtgattttcgaagcgaaaccgaaagtagcctgcccggaatgcgatattccagtgatttacggtgatacgcagaaatcgaacgtgctggaaaataacgatgttgaagatgtcgctatctcccgcgagcagcagaatgtttctgtaccaatgccgcagctggagcaggcaaatcaggcgttagtggcgaagactggcgcgcaggagtacgcaccgcacgtcatcaacactccgctggcattcctgattaagagtgctttgaacaccaatatctttggtgagccaggctggcagggtaccggctggcgtgcaggtcgtgatttgcagcgtcgcgatatcggcgggaaaaccggtaccactaacagttcgaaagatgcgtggttctcgggttacggtccgggcgttgtgacctcggtctggattggctttgatgatcaccgtcgtaatctcggtcatacaacggcttccggagcgattaaagatcagatatcaggttacgaaggcggtgccaagagcgcccagcctgcatgggacgcttatatgaaagccgttcttgaaggtgtgccggagcagccgctgacgccgccgccaggtattgtgacggtgaaaatcgatcgcagcaccgggcagttagctaatggtggcaacagccgcgaagagtatttcatcgaaggtacgcagccgacacaacaagcggtgcacgaggtgggtacgaccattatcgataatggcgaagcacaggaattgttctgattaaaaaggcgcttcggcgcctttttcagtttgctgacaaagtgcactttgtttataccggatacggcgtgaacactttacccgtctagcaacatctagaaaaatcaatatattgcagaaacttcgtaagcctgataagcattatgcatcaggcgaactttacgcatttacactcgcccctgccctttcaaccattcacgcacgaggaacagcgcgctgacattacgcgcttcgttgaagtcagggtcttccagcaaatccatcatatgcgccagcggccagcgcacctgtggtagcggctctggctcatcgccttccagcgattccgggtagagatcttgcgctaccacgatattcattttgctggaaaaataagacggtgccatgctgagcttcttcaaaaaagtcagatcgttcgcaccaaatccaacctcttcttttagctcgcggttagcggcttcgtagacgctttcacccggatcaattaaacctttcgaaaaacctaattcgtaggattcagttcccactgcgtattcgcggatcaggatcaggtgatcgtccacaatcggcacaatcatcactgcttcccggttggttggacgcattcgttcataaacacgccgcacgccattgctgaactccagatccacgctctcgacggtaaacagtcgggaacgggctacagtttcaacattcagaatggtgggtttttgtaatgatttgctcatcgtgggatctatgctgtgaaatcagcggttattgtgcgatatcggacacgctttcggcaatgtgaattgcatgttatttacatttatgtaacttaataaataatcgtcctcaaatcaaattaaaagtcaataggttgaaataactccaggaatttgctgatattccgccttcagagggtttgctatgatcagcggttactgtgatgtgcttaatgatgctcaagttaaactccacgcttgccgatagccaaccgcagaatcatgtattgtgtctggtgcgactgaccacgcctgacagactaagtaagatggggaaagcatgagcaccattgtgatttttttagctgctttgctggcctgctcactacttgcgggatggctgataaaagtgcgatccagacggcgtcagctgccctggaccaacgccttcgcggatgcgcaaacgcgtaaactcacacctgaagaacgtagcgccgttgaaaattatcttgagagcctgacgcaggtattacaggtgcctggcccaacgggagctagcgcggcaccgatctctctggcgctgaatgccgaaagcaacaacgtcatgatgctgacacacgctatcacgcgttacggcatctctaccgacgatccgaataaatggcgttactacctcgattcggtagaagtccacctgccccctttctgggaacaatacatcaacgatgagaataccgttgaactgatttataccgattcgctgccgctggttatttcactcaacggtcatacgctgcaggagtacatgcaggaaacgcgcggctatgccttgcaacctgttccgtccacgcaggcgttgattcgcggggaagagagtgagcaaatcgagctactcaatattcgcaaagaaacgcatgaagaatatgcgctgagtcgtccgcgcgggctgcgtgaagcgttgctgatcgtcgcctccttcctgatgttctttttctgcctgattaccccggatgtatttgttccgtggctggcaggcggcgcattactgctgctgggcgcaggtctgtgggggctattcgcgcccccggcaaaatcctccctgcgagaaattcattgtctgcgcggtacaccccgtcgttggggattgtttggcgaaaacgatcaggaacagatcaacaatatttcactcggtattatcgacctggtctatcccgcacactggcagccatacattgctcaggatctcggtcaacaaaccgatattgatatctatctcgaccgccacgtagtgcgtcaggggcgatatctttcgctgcatgatgaagtaaaaaactttccgttacagcactggctgcgcagtacgattatcgctgcgggctcgctgctggtgctgtttatgctgttattctggatcccgctggatatgccgctgaaattcactctctcatggatgaaaggcgcgcagaccattgaagccaccagcgtaaaacaactggctgacgctggcgtgcgggtaggcgatacattgcgtattagcggtacgggaatgtgtaatattcgcacttccggaacctggagcgcgaaaaccaattcaccttttttaccgtttgactgctcgcagatcatctggaatgacgcccgctcattaccattaccagaatctgaactggtcaacaaagcgacggcattgactgaagcagttaatcgccagctgcaccctaaaccggaagatgaatctcgcgtcagtgcctcattacgttcagcgattcaaaaatccggcatggtattgcttgatgattttggcgacattgtactgaagacagcggatttatgttctgccaaagatgactgtgtgcgactgaaaaatgcgctggtcaatctcggcaacagtaaagactgggacgcgctggtaaaacgcgccaacgccgggaagctcgatggcgtgaatgtgttattacgcccggtgagtgcagaatcgctggataacctggtggcaacctccgccgcgccgtttatcacgcatgaaacggcgcgagcggcacaatcactaaacagtccggcccccggcggattcctgattgtcagcgacgaaggcagcgattttgttgatcagccctggccttcggcatcactttacgactacccgccgcaagaacagtggaacgctttccagaaactggcacaaatgctgatgcatacgccgtttaacgccgaaggtatcgtcacaaaaatcttcactgacgccaatggtacgcagcatattggccttcatccgatcccggatcgttccggcctgtggcgctatctcagcaccacattgctgctactgacgatgctgggtagcgccatttacaatggcgtacaggcctggcgtcgttaccagcgtcatcgcactcgcatgatggagattcaggcctattatgaaagctgcctgaacccgcaactgatcaccccttcagaaagccttatcgaataacacgtttgcgcggcaggttatgctaccctgtcgcgcaaattgcttcactctggagatttccctcatgcatatcaacattgcctggcaggacgtagataccgttctgctggatatggacggcacgttgctcgacctcgccttcgataactatttctggcaaaagctggtgcctgaaacatggggcgcgaaaaacggggttacgccacaggaagcgatggaatatatgcgccagcaatatcacgacgtacagcatacgctaaactggtactgtcttgattactggagtgagcaactgggtctggatatctgtgcgatgaccaccgagatgggaccgcgtgccgtactgcgtgaagataccattccgtttcttgaggcactgaaagccagcggtaagcagcgaattttgctcaccaatgcgcatccgcacaacctggcggtaaaacttgagcataccggtctggacgcacaccttgatttattactttccacccacacatttggttatccgaaagaggatcagcggttatggcatgcggtggccgaagctacgggtctgaaagctgaaagaacgctgtttattgatgacagcgaagcgattctcgatgctgccgcgcaatttggtattcgttactgcctcggcgtgactaatcctgattccgggattgccgagaaacagtatcaacgccatccgtcactgaatgactaccgccgcctgatcccctcgctaatgtgaaggagacgccatgaaagaaaaacctgctgttgaggttcgactggataaatggctatgggctgcccgtttttataaaacccgcgcgctggcccgtgaaatgattgaaggcggtaaggtgcattacaacgggcagcgcagcaagccgagcaaaatcgtcgagctgaatgccacgctcactctgcgccagggaaatgacgaacgcacggtgattgtaaaggcgattactgaacagcgtcgccccgccagcgaggcagccttgctgtatgaagagactgcggaaagtgtagagaaacgcgaaaaaatggcgctggcacgtaaacttaatgccttaaccatgccgcacccggaccgacgcccggacaaaaaagagcgccgcgacctgttacgatttaaacacggcgacagtgaataactgtcacctgcaagagagatgattatgccgcaacatgaccaattacatcgctatctgtttgaaaactttgccgtgcgcggcgaactggtaaccgtttcggaaaccctgcaacagatccttgagaatcacgattatccgcagcccgttaaaaacgtgctggcagaactgctggttgcgaccagcctgttaaccgctacgctgaagtttgatggtgatatcaccgtacagctgcaaggcgacggtccgatgaatctggcggttattaacggtaacaataaccagcaaatgcgcggtgtggcgcgcgtgcagggcgaaattccagaaaatgccgacctgaaaacgctggtcggcaatggttacgtggtgatcaccattaccccgagcgaaggcgaacgctatcagggcgtggttggtctggaaggtgataccctggcggcctgcctggaagattactttatgcgttctgaacagctgccgacgcgcctgtttattcgcaccggcgacgtagacggcaaaccggctgcaggcggtatgttgttgcaggtaatgcctgcgcaaaatgcccagcaggacgactttgaccacctggcgacgctaaccgaaaccatcaaaaccgaagaactgctgaccttaccggcaaacgaagtgttgtggcgtttgtatcacgaagaagaggtgacggtttacgatccgcaggatgtggagttcaaatgcacctgctcgcgtgaacgttgcgccgacgcgctgaaaacgctgcctgatgaagaagtcgatagcatcctggcggaagatggcgaaattgacatgcattgtgattactgcggtaaccactatctgttcaatgcgatggatattgctgaaatccgcaacaacgcgtctccggcagatccgcaagttcattaatgagtatgtccggcagagagggctctgccggattttacgacgtaatggcctgatgtgctgcgcttaccaggcctatgaaataaatcgcaaattattgttggtcagatacagcgtcgtatccgataaaagcgttgtcacttacttaagtttatttccagcgtttcaccatctaccgtcagatcgcgccacgctttaggcttcgtccccagttttccatccttcgcagctgtgagtaatttttctttcgttatttcgttcggaagtaaactcatatcaagcgcgtcccattcttttctgtctgagtcaaagccatagacaatgactctgtcatcattaaaagcaaacaggatccgctccgcctgaccatcactattcagatcttgctcgaccaggacgcaggcgtctttttcaatacaggtcatcacgttatagcgatcctggattaaggccgaccagaatgtcgcatccggtttaacagaaccaggggcaattaacacattatcggctaatactttttccgatacctgttgctgaagatgttgctctccatctaacgccatcagcagatcccgcgcgcgtttcgggtctttcataaacccggcatcgcttttcagcgactcaagcgcagcacgtccatagcgaccgctctgctcgagcatgtagatagttacctggtctgacgtgtttttgccgctctgataacgcgccatatggctgttcacgctaatgcgcatactgtccagcaccggcgaattaagaagcaccagtatcaccaacaccaataacgaaaccgcaaggttcactttgccctgaagaacaacgggattttgccctttacgccagacgatgctgacaaaataccccagcgaccacaccagtaacaccagcaccgccagcacgccctgcaagcggtcgacagtccagccgtactgagcgacccgcagccataacgcccaggcggcgacgaacacatacagcggagcaaccagcaaagcggttttaatcaggcaacgcaacggccctgtccagggaagtgacgctttttgcggatcgcggacaatagccattaagatcaattgcaaaaaggccagcgttaacagcaacccggcggcggagatgtggcgagaaatcgcgctcaggcccgtaaacggcagagtgatgataaacatcagggttagcaatgatactaacggcagcaaccccgtggcgattaacgtgaacaacttttgaatagagtcgattaaacgtgactgtgttcgcgcgaggatcaccgccagcgcggtaaccagacctaacgtgagataaataaaccagtcggttgcaaaaaagagcgtattgaaaaacgtgatgccaacaagtttaaacaactcactccacagtaaaagcaccagccacgtcaagccattggcgagaaaaatcaccagtaatataagtacgttatgccatactgactggtaaaaatagcgatagcggctactgtcattgcggatgcgaaggctttgttgtatccacggtagcaacaacattgccatcaacagcagatagcagccaaaatcccaaatcgccttttcagctctccaggggttcatgccatcagtttgccacttcaaccagcagctcatccccagcgtggcaataaacaccagcgccagccatccccaaaggcgcttctgtttaaaagagatcacggagaagagtaaaacggatgaaaacgcaacggtcgcaggcacgccataaacaatccaactgtgattttttccggcaagccaggcgatcaacaggtagcaaaccagcccctgaagtaatccggtagcaatcatcccccagcgtgttgccggtgaaagttcaacgttatccatgttggttatccagaatcaaaaggtgggttaattatcgcatccgggcagtagtattttgcttttttcagaaaataatcaaaaaaagttagcgtggtgaatcgatactttaccgattgaatttgcatcaatttcattaaggaatgcgattccactcacaatattcccgccatataaaccaagatttaaccttttgagaacattttccacacctaaaatgctatttctgcgataatagcaaccgtttcgtgacaggaatcacggagttttttgtcaaatatgaatttctccagatacgtaaatctatgagccttgtcgcggttaacacccccaaaaagactttactattcaggcaatacatattggctaaggagcagtgaaatgcgcgttaacaatggtttgaccccgcaagaactcgaggcttatggtatcagtgacgtacatgatatcgtttacaacccaagctacgacctgctgtatcaggaagagctcgatccgagcctgacaggttatgagcgcggggtgttaactaatctgggtgccgttgccgtcgataccgggatcttcaccggtcgttcaccaaaagataagtatatcgtccgtgacgataccactcgcgatactttctggtgggcagacaaaggcaaaggtaaaaacgacaacaaacctctctctccggaaacctggcagcatctgaaaggcctggtgaccaggcagctttccggcaaacgtctgttcgttgtcgacgctttctgtggtgcgaacccggatactcgtctttccgtccgtttcatcaccgaagtggcctggcaggcgcattttgtcaaaaacatgtttattcgcccgagcgatgaagagctggcaggtttcaaaccagactttatcgttatgaacggcgcgaagtgcactaacccgcagtggaaagaacagggtctgaactccgaaaacttcgtggcgtttaacctgaccgagcgcatgcagctgattggcggcacctggtacggcggcgaaatgaagaaagggatgttctcgatgatgaactacctgctgccgctgaaaggtatcgcttctatgcactgctccgccaacgttggtgagaaaggcgatgttgcggtgttcttcggcctttccggcaccggtaaaaccaccctttccaccgacccgaaacgtcgcctgattggtgatgacgagcacggctgggacgatgacggcgtgtttaacttcgaaggcggctgctacgcaaaaactatcaagctgtcgaaagaagcggaacctgaaatctacaacgctatccgtcgcgatgcgctgctggaaaacgtcaccgtgcgtgaagatggcactatcgactttgatgatggttcaaaaaccgagaacacccgcgtttcttatccgatctatcacatcgataacattgttaagccggtttccaaagcgggccacgcgactaaggttatcttcctgactgctgatgctttcggcgtgttgccgccggtttctcgcctgactgccgatcaaacccagtatcacttcctctctggcttcaccgccaaactggccggtactgagcgtggcatcaccgaaccgacgccaaccttctccgcttgcttcggcgcggcgttcctgtcgctgcacccgactcagtacgcagaagtgctggtgaaacgtatgcaggcggcgggcgcgcaggcttatctggttaacactggctggaacggcactggcaaacgtatctcgattaaagatacccgcgccattatcgacgccatcctcaacggttcgctggataacgcagaaactttcactctgccgatgtttaacctggcgatcccaaccgaactgccgggcgtagacacgaagatcctcgatccgcgtaacacctacgcttccccggaacagtggcaggaaaaagccgaaaccctggcgaaactgtttatcgacaacttcgataaatacactgacaccccagcgggtgctgcgctggtagcggcaggtccgaagctgtaatcagctgatatctcattgaccccttatccaaacggataaggggtttttttatatctgattagctatcaatatgtacacggtacacttataataatcaatagaccgcaggatgcattatgttcacctttattgaactacaaggatttagcaaacgccgccagttattgttacctgatgatgagttccgggcttttcaggaactactcattcaagatcccactgccggtgacattatcgcaggcacaggtagttttagaaaaattcgctggaaccgttctggaatggggaaacggggtggcattcggataatttattacaacgtaacacgcaatggccgaatttatctggcgttgatttatcctaaaaatgaacaggatgatttaacagaagaacaaagaaaggcattgaaactattgtcagagaagctgctttaatgttgaagctccacaaattccaccatggtcgaaatgccaacggagacattgaaaacagatgaaagatgaattatttgctgatcttcttgccagcgcagaagaaatggtacgcatcgaaaagggtgaagaaacgcctgaaccagagcacgtccatacttttagcgagatcgatgtaaaagcgatccgtgaagcaacgggtttacgtcagcaagattttgctgtcgccgtaggggtaagttatgacctggtcaaaagctgggaaaccaaacgccgtcagcctaccggagcacctcgaaaattgctcctgcttttgcaagcgaatcctttcattatcaatcaattgaaatcaatataaaacaggaggcaccttcgcctccagtttatttacccttcttttatcgtgccctgcgcccgcgttaccggaacaggcagccaggcacgaatggaaagcccgccccgctcgctggtgccaagctccagcatcccgttatggttatccacgatgcgctgcacaattgccagccctagccccgtgccgctaatggtgcgcgcactgtcgccgcggacaaatggctggaacaggtgcttacgctgttccggtgcaattcccggaccgtcatcttccacctggaaccaggcgcgattcggctccgttccgctgctgactttgatccagccattgccataacgggcggcgttgaccaccatattcgccaccgcgcgtttgatcgacagcgggtgcattttcacttcaatgctgccggggtaaagcgcggtttcaatttcccgctcatagccactttcggcagcaatcacctcaccgagtactgcattaagatccgccatttccatcggcatctcctgcccggtgcgcaggtagtcgataaactgctcaatgatggcgttgcactcttcgatatctttattgatcgattctgccagatagccatcctgctcgctcatcatctcagtcgccaggcgaatacgcgtcagcggcgtgcgcaagtcgtgacttacccccgccatcagcagcgtgcggtcatccgccagttgcttaacaccagccgccatatggttaaaggcacgggtaacggaacgcacctccgaagcgccatactcacgcagcggcggcggaataatccctttaccaacctgcaaggctgcgtgttcgagatcgaccaacggtcggttctggatacgaataaacagccacgccccgcctatcgccaatagcataatcgccagcgtatagcggaacagcggagagaaatcgccctgatgaatttcggtcagcggcacgcgtacccagatattgggcgacagccaggttttcagccagacgacaggcgaacttttgttgacctcaacgcgcacttccgtcgggccgcccagttgctgtgccatctgatggcttaagaattcatagtgttgcgcccaacgcagacctgcctcttcggcagcctcgttggagtagagagagatccccagctcacggtagatctcccgacggaaagcgggaggcacaaccaactgcgtgccgtcctccagttgcagtttgtcggtcatcaacatacgcacttcgtacgcgaggactttattaaactgctggaggctcggcaaaatcgcgaagttcagcaccaccagataagtcgtcaccaggctggcgaacagcaaggtgacgatgagcaataacgtacgggcaaatgaacttcgtggcgagaagcgcaatcgcctcatgctttagagccgtccggtacaaagacgtagcccaggccccaaacggtctgaatgtaacgcggatgcgctggatcttcttctaccatgcggcgcagacgcgaaatctgcacgtcgatggagcgttccattgcggaatattcacgaccacgggcaaggttcatcagcttatcgcgggagagcggctcacgcggatggctgaccagtgccttcagtaccgcaaactcaccgctggtgagcggcatcggctcatcttcgcggaacatttcgcgcgtaccgaggttaagtttgaacttaccgaaagcaattaccgcctcttcctgtgacggtgcgcctggcagttcgttcgcctgacgacgcagcaccgcacgaatacgggccagcagttcacgcgggttaaacggttttggaatgtagtcgtcagcgccaatctccaggcctacgatacggtccacttcttcccctttcgccgtcaccataatgatcggcatcgggttgctctgactacgaagacgtcggcaaatcgacaagccatcttcaccaggtaacattaaatccagtaccataagatggaaagattcacgagtcagcaggcgatccatctgttctgcattagcgacgcttcgaacctggaagccttgttcggtgagataacgttccagcagcgcacgcaggcgcatgtcgtcatcgaccaccagaatcttgtagttctcttgcattgtttgtactcccaaaggttcgcaacaatttgtaagcgtgtattcttaaaaaagctcacgttcgtcaccagctaaatctggtatgaatttcagcctaaattgttacaaagcatattaaacagcagcttaagtatacaatttattcggcgaaacattattgattctgttgatatgatcacgttatacccaatgtgcgcattatcaaacagacaaagggaatcaacgagatgaaaacgcccctggttacccgggaagggtatgaaaaactcaaacaagagcttaattatctctggcgtgaagaacgcccggaggtcacaaaaaaggtgacctgggccgcaagtctgggcgaccgcagcgaaaatgctgactatcagtataataaaaagcgtctgcgtgaaatcgaccgtcgcgtgcgctatctcactaaatgcatggaaaatctcaaaatcgtcgattactcccctcagcaggaaggcaaagtcttttttggcgcgtgggtggagattgaaaacgacgatggcgtgactcaccgtttccgtattgtcggctacgatgaaatttttggccgtaaagattacatctctatcgattccccgatggcccgcgcattgctgaaaaagaagtcggcgatctggctgtggtgaatactcctgccggggaagcgagctggtatgttaatgctatcgagtacgtgaaaccgtaaggaagagtcttaacctcctgccgatggctggcatttttgccagccagtccgtataactatcccctgatttttgatccgaaaagatgaactcaaaccatgatgaatgattcgttctgccgcattattgcgggtgaaattcaggcgcgcccggaacaggttgacgctgccgttcgcctgcttgacgaagggaataccgtgccgtttatcgcacgttatcgtaaggaaatcaccggcggtctggatgacacgcagctgcgtaatctggaaacgcgtctgagctatctgcgcgagctggaagagagacgtcaggcgatcctcaagtccatttccgagcaaggcaaactcaccgatgatctggcgaaggccatcaacgccaccctaagcaaaaccgaactcgaagacctctacctgccctacaaacctaaacgccgcacccgcgggcaaatcgccattgaagcagggcttgagccgttggctgacctgctgtggagcgatccgtcacacacgccagaagtcgccgctgcacaatatgttgatgccgataaaggcgtggcagataccaaagccgcgctggacggcgcgcgctatatcctgatggaacgttttgccgaagatgccgcgctgctggcgaaagtgcgtaattatctgtggaagaacgcgcatctggtctcaaccgtggtgagcggtaaagaagaggaaggggcaaaattccgcgactatttcgatcatcacgaaccgttgtccacggtgccttctcaccgcgcgctggcgatgttccgtgggcgtaacgaaggcgtactccagctttcgctgaatgccgatccgcagttcgatgagccgcccaaagagagctattgcgagcaaatcatcatggatcaccttggcctgcgcctgaacaatgccccggcggatagctggcgcaaaggcgtagtgagctggacctggcgcatcaaggtgctgatgcatctggaaaccgaactgatgggtaccgtgcgcgaacgcgcggaagatgaagcaatcaacgtctttgcccgtaacctgcacgatctgctgatggcggcccctgccggactgcgtgcaacgatgggcctcgatccgggtctgcgtactggggtaaaagtggcggtggtcgatgccactggcaaactggtagcgaccgataccatttacccgcacaccggacaagccgcaaaagcagcgatgactgttgctgcgctgtgtgaaaagcataacgttgaactggtggcgatcggcaacggtacagcttcccgcgaaaccgaacgtttctatctcgacgtgcagaagcagttcccgaaagtgaccgcacagaaagtgatcgtcagcgaagctggcgcgtcggtttactcggcttccgagctggcagcgcaggagtttccggatctcgacgtttcgctgcgtggcgcggtgtctatcgcccgccgtttgcaggatccgctggcggagctggtgaaaatcgatccgaaatctatcggcgtaggtcagtatcagcatgacgtcagccagacgcaactggcccgcaaactggacgcagtagtagaagactgcgtaaacgccgttggcgtcgatctcaacactgcttctgttccgctgttaacccgcgtggcgggcctgacgcgcatgatggcgcaaaacatcgtggcctggcgcgatgagaacggtcagttccagaaccgtcagcaactgctgaaagtgagccgtctggggccgaaagccttcgagcagtgcgcgggcttcttgcgcattaaccatggtgataacccgctggacgcgtctaccgtccacccggaagcctatccggtggtggaacgcattctggcagcaacacagcaggcactgaaagatctgatgggtaacagcagcgaactgcgtaacctgaaagcgtctgactttactgatgaaaaattcggtgtgccgacagtaactgacatcatcaaagagctggaaaaaccgggtcgcgatccgcgtccggaatttaaaaccgctcagtttgccgatggcgtcgagacaatgaacgacctgcaaccgggtatgatcctcgaaggtgcggtgaccaacgtcaccaactttggcgcgtttgtcgatatcggcgtgcatcaggacggcctggttcacatctcttcattgtcgaacaagtttgtagaagatccgcataccgtggtgaaagcgggcgacattgtgaaggtgaaagtgctggaagtggatcttcagcgtaaacgtatcgccctgaccatgcgtctggacgagcagcctggcgaaaccaacgcccgtcgcggcggcggtaatgaacgcccgcaaaacaaccgcccggcagccaaaccgcgcggacgtgaagcgcagcctgccggtaacagcgcgatgatggacgcgctggcggcagcaatgggcaaaaaacgttaaacgccctgattgacccctaaacctgcgcgataaggtgtccacgccgcatctggcaacgaacgccttgtctgacataaaagtgccggagaatatctccggcatttttattccacagccaaactcacaatatattccggcaacatttatcacttcattaacaactgaaaccttaattaaacattagccagtcctggtaattcgctattcgaattatattttcgctgcgatataaccttgagccacatcaacattgagtcagattattattcaaaccaacattcgcacacattttaagtattgctgatagaaaccattctcattatcattgtgttgttgattatttaatctctcctttgttggcaaatcatctggtctcatgtcgctgtcaaacgccccatgaggtagttatccagttaatgagaaacaagtaggcacctatgcaatacactccagatactgcgtggaaaatcactggcttttcccgtgaaatcagcccggcatatcgccaaaaactgctttctcttggcatgttacctggctcctcttttaatgtggtgcgcgtcgctccactcggcgaccccattcatatcgaaacccgtcgtgtgagcctggtattacgcaaaaaagatctggccttattagaagtggaagcggtttcctgttaatacggtgataacaacaatgaaaaaattaaccataggcttaattggtaatccaaattctggcaagacaaccttatttaaccagctcactggcgcacgtcagcgtgtaggtaactgggctggcgttaccgtcgaacgtaaagaagggcaattctccaccaccgatcatcaggtcacgctggtggacctgcccggcacctattctctgaccaccatctcatcgcagacctcgctcgatgagcaaatcgcctgtcactacattttgagtggcgacgccgacctgctgattaacgtggtggatgcgtctaaccttgagcgtaacctgtacctgacgctacaactgctggaactcggcattccctgcatcgtggcactgaacatgctcgacattgccgagaagcaaaatattcgtattgaaattgatgctctgtcggcgcgtcttggctgcccagtgatcccgctggtttcaacccgtggtcgcggtattgaagcgctcaagctggcgattgatcgctataaagctaacgagaatgtggaactggtgcattacgcacagccgctactcaacgaagcagattcactggcaaaagtgatgccttccgacatcccgctgaaacaacgtcgctggctgggcctgcaaatgctggaaggcgatatctacagccgcgcctacgccggtgaagcgtcgcagcatctggatgccgccctcgcccgtctgcgtaatgagatggacgatccggcgctgcacattgccgatgcgcgttaccagtgcattgctgccatctgtgatgtggtaagcaacaccctgacggcagaacccagccgtttcaccactgcggtagataaaatcgtgctcaaccgtttcctcggtctgccgattttcctctttgtgatgtacctgatgttcctgctggctatcaacatcggcggggcgttacagccgctgtttgacgtcggctccgtggcgctatttgtgcatggtattcaatggattggctacacgctccacttcccggactggctgactatcttcctcgcccagggcctgggtggcggcattaacaccgtgctgccactggtgccgcagattggcatgatgtacctgttcctctccttccttgaggactccgggtatatggcgcgtgcggcgtttgtgatggaccgtctgatgcaggcgctgggcttgccggggaaatcctttgtgccgctgatcgtcggtttcggttgtaacgtaccgtcggtaatgggtgcacgtacgcttgatgcaccgcgtgaacgtctgatgaccatcatgatggcaccgtttatgtcctgcggcgcgcgtctggctatcttcgcagtattcgcggctgccttcttcgggcagaacggtgcgctggcggtcttctcgctgtatatgctgggtattgtgatggcggtgctgactggcctgatgctcaagtacaccatcatgcgcggtgaagcgacgccgtttgtcatggagttgccggtctatcatgtaccacacgttaaaagcctgattatccagacctggcagcgtctgaaaggcttcgttctgcgtgctggtaaagtgatcatcatcgtcagcattttcctgagcgctttcaacagcttctcgctgagcgggaaaatcgtcgataacatcaacgactcggcgctggcgtccgtcagccgggtgatcaccccagtcttcaagccaattggcgtgcatgaagataactggcaggcaacggttggcctgtttacaggtgccatggcgaaagaagtggtagtgggtacgctcaacaccctctacaccgcagaaaatattcaggacgaagagttcaatccggcagagtttaacctcggtgaagagctgttcagtgcgatagatgaaacctggcagagcctgaaagacaccttcagccttagcgtactgatgaaccccattgaagccagcaaaggcgacggcgaaatgggtaccggggcgatgggcgtgatggatcagaaattcggtagcgcagcagcagcttacagctacctgattttcgtcctgctgtatgtaccatgtatctcggtgatgggagccatcgcccgtgaatcaagccgtggctggatgggcttctccatcctgtgggggctgaatatcgcttactcgctggcaacattgttctatcaggtcgccagctacagtcagcacccaacttacagcctggtgtgcattctggcggttatcctgtttaacatcgtggttatcggtctgctgcgccgcgcgcgtagccgggtggatatcgaactgctggcaacccgcaagtcggtaagcagttgctgcgcagccagcaccaccggtgattgccattaatggcttcacttattcaggtgcgcgatttgctggcgttacggggccgtatggaagcggcccagataagccagacattgaacactccacagccaatgattaacgccatgctgcaacaactggaaagtatgggcaaagccgtgcggattcaggaagaacctgacggctgcctctctggcagttgtaaaagctgcccggaaggaaaagcctgtctgcgcgagtggtgggcgctgcgttaaccttactccatcgcctgttttggaaagcccggtatgcgtctgcatccgggcttttttgcgtgcggctttccataaaaatgcaactcttgcagcacggcgtaagttcctttgaaagcatctcgcagggatgaaaactcgctaatacacaggtgtggagtggcgcgtagagtcgcggcattcaaacaacaggtgaaggaacgccatgagcaaaaagcagagttccaccccacacgatgcgctgttcaaactctttttacgccaaccggacacggctcgtgattttcttgcgtttcatttaccggcacccattcacgcgctttgtgatatgaaaaccctcaagctggagtcgagcagctttattgatgacgatctgcgtgaaagctattccgatgtgctgtggtcggtgaaaacggaacaaggaccaggatacatctattgtctgattgaacatcaaagcacctcaaacaaactgatcgcatttcgcatgatgcgttacgctattgccgcaatgcaaaatcaccttgatgctggatacaaaacgttgccgatggtggtgctattgttgttttaccacggtattgaaagcccctatccctattcgctgtcttggctggattgtttcgccgatcccaaactggcaaggcagctttatgcctccgcatttccgctgattgatgtcaccgtcatgcctgatgatgaaatcatgcagcaccgacgtatggcgctgctggagttaattcaaaaacatattcgtcaacgcgacctgatggggctggtagagcaaatggcctgcttattaagtagtggatacgctaatgacagacaaatcaaagggctgtttaattacatactgcaaaccggcgacgcggtacgttttaacgattttatcgacggcgttgccgaacgttcaccgaaacacaaggagagtttaatgacaattgcggaaagattgcggcaggagggggaacaatccaaagccctgcatatagccaaaataatgcttgaatccggagtccctcttacagacatcatgcgctttactggggtgtcagaagaagagttggctgcggcgagccagtaaatttctgtctcgccatttcaaaagttgcctacaccctctgcttcaacgccaccagcaggtgacaaaactcgaccggatgcgaaataaacggcgcatgggccgctttggcgaagatatatgattcgctgtgaggccaaagtttatccagcatcggcaccactttgcgcggcaccagaccgtcgagatagccatacaatcgcaaaaacggcatggacacgttttgcagcggctgacggagatcgaccgttttcaggatttccagcccgccattaagcacgtcaacctccggcatcggtaacgccagaacggttttcttcaacgcccgcgcatcctggcgcgccgtttcagtccccatggtttgtaacgccaggaaccgctccactgtacgctgaaaatcatcactgagttgctgctgaaatcccgccagcacgtccggttttatccccggccactcgtcacgagcactaaaacaaggtgacgacgccacggtgaccagcgcctgaacacgctcgggatgggttaaaacaatttggcttgccaccagcccgcccagactccagcctaaccaaatggctttatcaggtgcctgttgcagcacggcttcggccatatcagcaagtgacagcgcaccaaatccccggctacgcccgaagccgggcaggtcaacaaggtgcagcgtaaaatgcgagctaagttcctcgtcaatgcaacgccacacttcggcattcagtccccatccgtgcagcagcacaagatgaacattcccctgacctttggtctgccaccagatgttattcatccgctattgttctcttttgacttacaaggatgaacatatgctaacagtaccgggattatgctggctatgccgaatgccactggcgttaggtcattgggggatttgttcggtctgttcacgcgccacccgcacagataaaacgttatgcccacaatgtggattacccgccacacactcccatcttccctgcggtcgctgcctgcaaaaaccgccgccctggcaaagactggtcacggttgccgactatgcgccgccgttaagtccgcttatccaccagcttaaattttcccggcgcagtgaaatcgccagcgccctgtcacgtctgttactattggaagtcttacacgctcgtcgcaccaccgggttgcaattgccggatcgcatcatcagcgttccgttatggcagcggcgtcactggcgtcggggatttaatcagagcgatttgctgtgtcagccgttatcacgctggttgcactgccaatgggatagcgaagccgtcacacgtacacgggccactgcgacccagcattttctcagtgcccggctgcgcaagcgcaacctgaaaaatgcctttcgtcttgaattgcccgtgcaaggtcgccatatggtgattgtggatgatgtcgttaccaccggaagtaccgtcgcagagattgcgcagttgcttttacgcaatggtgcggcgactgtccaggtctggtgcctttgtcgaaccttgtagagcctcgatgatgggcgtattataaccaactaaaatagtcaactattaggccattactatgatccgtatttccgatgctgcacaagcgcactttgccaaactgctggcaaatcaggaagaagggacacaaatccgcgtatttgtgattaaccctggcacgcctaacgctgaatgtggtgtttcttattgtccgccggatgccgtggaagccaccgacactgccctgaaatttgacctgctgaccgcgtatgttgatgagttaagcgctccttacctggaagatgcagagatcgattttgttaccgaccagttgggttctcagctaacactgaaagcgcctaacgccaaaatgcgtaaagtggcagacgatgcaccactgatggagcgcgtggagtatatgctgcagtcgcagatcaacccacagcttgctggtcacggtggccgcgtttcactgatggaaatcaccgaagacggttacgccattctgcaatttggcggcggctgtaacggttgttccatggtcgatgtgacgctgaaagaagggatcgagaagcagttgctaaacgaattcccggagctgaaaggtgtgcgcgatctcaccgaacaccagcgcggcgaacactcctactactaagttatcccctcttttgtagattgcccgatgcgacgctaaagcgtcatttcgggcctacgttgaacatgtgccagacgttggcacagcattgctttggcaaatccctcccttcgtttccccgcgataatatgaccaacctctcataatttaaatttaccccgctctggtgattctcaaacgccagatgttacccgtatcattcacatgggtaccaaacatactcctgacatctgactacaataattagttttagtggggatcagtcgtggtgccgcaatatctctgttcccgattgggataattagagtttgtcgtcagaaaattgacgttacccataacaaatgaaaggccaggtaaatcatgccattagtcattgttgctatcggtgtaatcttgttgttgctcctgatgatccgcttcaaaatgaacggcttcatcgctctcgtcctcgtggcgcttgctgttggattaatgcaaggaatgccgctggataaagttattggctccatcaaagccggtgtcggcgggacgctcggtagccttgccctgatcatgggttttggcgcaatgctgggcaaaatgctggcagactgcggtggcgcacaacgtatcgccaccacgctgattgccaaatttggtaaaaaacacatccagtgggcggtggtactgaccggttttaccgttggttttgccctgttctatgaagtgggctttgtgctgatgctgccgctggtgtttaccatcgcggcttctgcgaatattccactgttgtatgttggtgtaccaatggcagctgcactgtctgtgacccacggcttcctgccaccgcatccgggtccgactgcgattgccaccattttcaatgccgatatgggtaaaaccctgctgtacggtactattctggcaatcccgaccgtgattctcgccggtccggtttacgctcgcgtgttgaaaggtatcgataagccaattccggaaggtctctacagcgcgaaaaccttcagcgaagaagagatgccgagctttggcgtcagcgtctggacctctctggtgccggtagtactgatggcgatgcgtgcgattgccgaaatgatcctgccgaaaggtcacgctttcctgccggtagcggagttcctcggtgacccggtaatggctacgctgattgccgtgctgattgccatgttcacctttggtctgaaccgtggtcgttcaatggatcagattaacgacacgctggtttcttccatcaaaatcattgcgatgatgctgttgatcatcggtggtggcggtgcgttcaagcaggtgctggtagacagcggcgtggacaaatacattgcttccatgatgcacgaaaccaacatttctccgctgctgatggcctggtcgattgctgccgtactgcgtatcgcgctgggttccgcaaccgttgcggcaatcactgcgggtggtatcgcggcaccgctgattgcaacgacgggtgttagcccggagctgatggttattgcggtgggttccggtagtgtgattttctctcatgtgaacgatccgggcttctggctgttcaaagagtactttaacctgactatcggcgagaccatcaaatcctggtcgatgctggaaaccattatctcggtgtgcggtctggtaggctgtctgctgctgaatatggtgatttgataacactgactgccggatgcatcgcatccggcatcaaccgcactctacttcttcttcgctgcagctctgcgccgtctgtccaaatccttcagcaacttgttcacgccatcatcggcaaacatcgactcaagcgttgcggaaagcttgcgtcgccagtttttatactggtaactggtgccaggaatattcaccggttcggccatatccagccagtcttccggctgtagtcctaacagagcactgttactgtcggcaatgtagcgctgcaaaccacggttcagcgtcggcgtcatcgacatcaacgatgccttatgcccggcacgttttggcagacaaccatatttatgcagtgcatccagcagcccttgcttcgccagttcgcgatcctgatacagaccgcgcagtaccacttcatccggatacagccccagggttttgcccaacgttagatccccgctctcccagtaaccgcgcagcgtaggcaggtcatgtgtcgccgcaaccgccatcgactgctccggatacgctttcggtgcacggaacgtcttctcgtggtcgttttcgaaatagagcactttgtaggagtacacaccgctgctgcgcagcttaccgacaatctctaccggtacggtaccgagatcttcaccaatcaccatacagcgatgacgtttactttcgagtgccagaatcgagagcagatcatccaccggatagtgaacatacgcgccctgatctgccgtctcgccatacggtatccaccacaaacgcagcatcgacatcacatggtcaattcgtaatgcgccgcagttttgcatattggcacgcaacagctcgataaacggttcataggcacgcgcggtgatgatatgcgggtccattggcggtaatccccagttctgccccaacgggccgaggatatccggcggcgcgccaaccgacgctttcaggcaatatagttcacggtcacaccaggtttccgccccaccttccgctacgccaaccgccagatcacgatacaagccaatcggcatttcatagccctggcttatctcccagcaggcggcaaactggctgtaagccagccactgcaaccagagataaaaatcgacgtcattacgatgttcttcgcagaactgacgcacttctggtgaatccacgttctgatacatctctggccatgcaggccagccccagcgcatttcgtcctctttcacttgctgggcatgtagcgcatcaaaggctgcctgccagaacaggctgtcgccctgctctgcaacaaactggcgaaacgcggccatctgctcatcatcacgttgcgcgaaacctttccacgccattcgtaatgctgtcatttttagggcggtaaccgtggagtaatcgacccagtcggcatcgcgcgcctgttgcagcgtctgttgcgtggtcggcaactgccaccaggcctgagcctcttcgctaagatggaaatcttcaacggcgttaacgtcgatataaatcacattcagccaacggcgagaagacgggctgtatgggctggcactctccggatttgccggatagagcgcatgaatcgggttcaggccgatgaacgacccgccacgtattgccacatccaccagcatcgctttgagatcgccaaaatccccaataccccagtttttttccgatcgcagcgtataaagctgaacgcaggcaccccacagcttttgtttattcagcaacgcctgcggttcgtaacagcgtttcggggcgacaatcacccggcaatgcgcgcgctggtcgtcctgggtgagtgtcagcgtgtgataaccttccggcagcttcgtcggtagattgaacgctttgccccccgttacatggcctttgtactgtgttccttcttcggtggtcagcagccagctatattcgccgctgccctccaccaccatcggcatttttttgccgctggtataaaccatgacattcgggactggcgttaccgccactttcgtggcggtacgttgatgcatcgcgtcaagcaaacgccgtttggtttcggcgctaatcgactgcggtttaccgtgggcattgatgtaattggggctaatccccgccgccagcgcggcattatccagacgtttgctttccatcgagcttccttagcgttttgcctgccagatacgagcctgataatcgcgaatagagcgatccgagctaaacataccgcagcgggcggtattgaggatcgccgcgcgagtccaggcctcctggtcgcggtacagcacatccacctgcttttgtgcctcaacataggctgcgaaatccgccatcaccagatacggatcgccgccttgtttgccgatactgtgcagcatctggtcgaaggcatgcttatcgccgtcgctgtatttaccgctttccagctctttcaatactgcgtccagcaccttatctttcttccgccatttcaccgggtcgtagcctttggccagaatagccttcacttgttccacggtatgaccaaaaataaagatattttcttcaccgactttctcggcgatttcaacgttcgcaccatccagcgtaccgacagtaagcgcaccattgagcgccagtttcatattgccggtaccggaagcttctttacctgcagtcgaaatttgttcggagatatccgccgccgggatcagtttttccgccgccgaaacgcaataatccggcaggaacaccaccttcaacttatcgccaaccagtggatcgttgttgatcacgtcagccactttgttgatcgcaaagataatattcttcgccaggtagtagcccggtgccgctttcgcgccgaagaggaagacgcgcggtacgcgatcagcctgcgggttttcacgaatttctttgtacaacgccagaatatgcagcagattcaggtgctggcgtttgtactcatgcagacgtttgatctgaatatcgaaaatcgcctgtggattgatctcaataccggtacgaactttcacaaactccgccagacggactttattcgcctgcttgatctcgcgatattgctgacggaatttcgcatcatcagcgaatttttccagattgatcagctgatcgagatcgttagcccactctttttgcagtgatttatccaacagagccgccagtgcagggttgcactgtttgatccagcgacgtggggtaataccgttggtgacgttatggaatttgttcggccatagctggtgatattccgggaacagatctttcaccaccagatccgagtgcagcgccgcaacaccgttcaccgcgaaaccgccaaccacacacaggttcgccatatgcacttgtttatcgtgcaccaccgccagtttggcccacactttttcatcgcccggccaggttttctccaccagcgttttaaagcgagtattaatttcgttaataatctgcatatggcgcggcagtaagcctttcaccagtttcacatcccagcgttccagcgcttctggcatcagggtatggttggtgtaagcgaaagttttgctggtaatggcccaggcgtcatcccagctcatctggtgctcatcgatcagcacgcgcagcagttctggaatcgcgatagttgggtgggtatcgttcagctgaataacttcgtaatccgccagttcgtgcagtttacgccccgccagatgatggcgacgcaaaatatctgctaccgaacaggcacactggaagtactgctgcatcaagcgcagctttttaccggcagtatggttgtcgtttggatagagaactttggtcagtttttccgcattgatgccctgctgttcggcacgcaggaaatcaccgtcgttaaatttagtcagatcaaacggatgcgcgtgcgtcgcctgccacagacgcagcggctgcgccacgccattacgatagccgacaacggggagatcccacgcttgaccggtaatggtaaactccggctcccagcgtccgtctttcgtcactttaccgccaatccctacctgcacatccagtgcttcgttgtggcggaaccacgggtagttactgcgatgccagtcatccggcgcttcaacctgtttgccatcgacaaaagactggcggaacaaaccatattgatagttcagaccgtaacccgtcgcagactgaccgacagttgccattgagtcgaggaagcacgccgccagacgtcccagaccaccgttacccagcgccgggtcgatctcttcttccagcaggtccgtcagattgatgtcataagccttcaacgaatcctgtacatcctgataccagccgagattcaacaggttgttgcccgtcaggcgaccaatcaaaaactccattgagatgtagttaacatgtcgctgattcgccaccggcttggcgaatggctgagcacgcagcatttcggccagtgcttcactcactgctagccaccactggcgaggagtcatttcagccgcagaatttaagccataacgctgccactgacgtgaaagcgcttcctgaaattgcttatcgttaaaaataggttgtgacataggagttccacttttcttagattttcaacacaacgttatcgctagtttgccaggctcgatgttgaccttcctcatcctgcgggggattaggcagggaggagttgcggggatgagcaaggaaatgtgatctcaaccacttaaagctagtgcaaaccacaggattagcagcaaatcaatgcaatacagcgcagaaaatctgtatctaagtgcaaaaaatggccgttgcgtattttcaaaaagcggaaggtaactctataaattaagtaaaggagtgaaacagtttcataagtaaaatatccagtgtgctccatctcattcttaatagatttattaagatcatctttttagatggcactttcatcaggaatgaagaagaaacccttgcttaaatgaatctgatgaacataagggaaaccagtattcacgctggatcagcgtcgttttaggtgagttgttaataaagatttggaattgtgacacagtgcaaattcagacacataaaaaaacgtcatcgcttgcattagaaaggtttctggccgaccttataactattaattacgaagcgcaaaaaaaataatatttcctcattttccacagtgaagtgattaactatgctgattccgtcaaaactaagtcgtccggttcgactcgaccataccgtggttcgtgagcgcctgctggctaaactttccggcgcgaacaacttccggctggcgctgatcacgagtcctgcgggctacggaaagaccaccctcatttcccagtgggcggcaggcaaaaacgatatcggctggtactcgctggatgaaggtgataaccagcaagagcgtttcgccagctatctcattgccgccgtgcagcaggcaaccaacggtcactgtgcgatatgtgagacgatggcgcaaaaacggcaatatgccagcctgacgtcactcttcgcccagcttttcattgagctggcggaatggcatagcccactttatctggtcatcgatgactatcatctgatcactaatccagtgatccacgagtcaatgcgcttctttattcgccatcaaccagaaaatctcaccctggtggtgttgtcacgcaaccttccgcaactgggcattgccaatctgcgtgttcgtgatcaactgctggaaattggcagtcagcaactggcatttacccatcaggaagcgaagcagttttttgattgccgtctgtcatcgccgattgaagctgcagaaagcagtcggatttgcgatgacgtttccggttgggcgacggcactacagctaatcgccctctccgcccggcagaatacccactcagcccataagtcggcacgccgcctggcgggaatcaatgccagccatctttcggattatctggtcgatgaggttttggataacgtcgatctcgcaacgcgccattttctgttgaaaagcgccattttgcgctcaatgaacgatgccctcatcacccgtgtgaccggcgaagaaaacgggcaaatgcgtctcgaagagattgagcgtcaggggctgtttttacagcggatggatgataccggcgagtggttctgctatcaccccgctgtttggcaacttcctgcgccagcgctgccagtgggaactggcggcggagctgccggaaatccaccgtgccgccgcagaaagctggatggcccagggatttcccagcgaagcgattcatcatgcgctggcggcaggcgatgcgctgatgctgcgcgatattctgcttaatcacgcctggagtttgttcaaccatagcgaactgtcgctgctggaagagtcgcttaaggccctgccgtgggacagtttgctggaaaatccgcagttagtgttattgcaggcgtggctaatgcaaagccaacatcgctatggcgaagttaacaccctgctagcccgtgctgaacatgaaatcaaggacatcagagaaggcaccatgcacgcagaatttaacgctctgcgcgcccaggtggcgattaacgatggtaatccggatgaagcggaacggctggcaaaactggcactggaagagctgccgccgggctggttctatagccgcattgtggcaacctcggtgctgggtgaagtgctgcactgcaaaggcgaattgacccgctcactggcgctaatgcagcaaaccgaacagatggcacgccagcacgacgtctggcactacgccttatggagtttaatccagcaaagtgaaattctgtttgcccaagggttcctgcaaaccgcgtgggaaacacaggaaaaagcgttccagctgatcaacgagcagcatctggaacagctgccgatgcatgagtttctggtgcgcatccgagcacaactgttatgggcctgggcacggctggatgaagccgaagcgtcggcgcgtagcgggattgaagtcttgtcgtcttatcagccacagcaacagcttcagtgcctggcaatgttgattcaatgctcgctggcccgtggtgatttagataacgcccgtagccagctgaaccgtctggaaaacctgctggggaatggcaaatatcacagcgactggatctctaacgccaacaaagtccgggtgatttactggcaaatgaccggcgataaagccgccgctgccaactggttgcgtcatacggctaaaccggagtttgcgaacaaccacttcctgcaaggtcaatggcgcaacattgcccgcgcacaaatcttgctgggcgagtttgaacctgcggaaattgttctcgaagaactcaatgaaaatgcccgcagtctgcggttgatgagcgatctcaaccgtaacctgttgctgcttaatcaactgtactggcaggccggacgtaaaagtgacgcccagcgcgtgttgctggacgcattaaaactggcgaatcgcaccggatttatcagccattttgtcatcgaaggcgaagcgatggcgcaacaactgcgccagctgattcaactcaatacgctgccggaactggaacagcatcgcgcacagcgtattctgcgagaaatcaatcaacatcatcggcataaattcgcccatttcgatgagaatttcgttgaacgtctgctaaatcatccggaagtgccagaactgatccgcaccagcccgttgacccaacgtgaatggcaggtcctggggctgatttactccggttacagcaatgaacaaattgcgggcgaactggaagtggcggcaaccaccatcaagacgcatatccgcaatctgtaccaaaaactcggcgtcgcccaccgtcaggctgccgtgcagcacgcgcagaaactgctgaagatgatgggttatggggtgtgagtttagccggataatgcattggatccggtttacatctttacatcattcaatactcacccgcgttacgccatctgtttctatcaaaccaaaccgcaccggcaagaaacgctccaccaccgcgatattggtcagcagatggcatgaaggatgggcgaccttaaattctcccgcgcccgccagcgccatcggcagtaccagctggtcggcgagatattcccccactgccgccgggcttgccaggtagcgtttcacctctttcactaactgcgcggctaccacctcggcactgacgcgcttttcaccgacgacaaaaaagcgttcggtgatattttcactttcgacttcaagcgagacggtattacccggcccctggtcacgcggcaggttatgaatattctgctcatgcagggaaaaactacccgccagcgtagcgatttcacgctcagcgacatggcgcggcacgccagctaataacacctctccacgcatctgcacaatgttcccgcgctcgccaagttgcaaggtgttaaacgatgccaccggcgagacttccgttgccaccacgccgcctccggcaggataaaaaccgtgacgtaacagcgtggtttgctgatgaattcctattttcgccagcagcggctccagcacccggcggataaaatccgcaggcggggccgacgggttatcggtgcctccgctcacttcaacacgcgaaggtccatcggcaaaccacagcgcgggcagcaccgtttgcagcaccagcgtacagcttccggcactaccgatagcaaagcggtactcgccgccgcgcacggtgccaggccggaagagcagacgctgcgaccccagctccgcgccttccacggttgctccgcaaatttccgtcgccgcctttaccgcggtcagatgctggcgcaacagccccggtttcgcccgcccggcacgaatgctggtgatggtaaatggctggccggttatcatcgacaggctcagcgccgagcgcaggatctgcccgccaccttcgccctgtgcgccatccagcgcaatcatccttttcatcatttatccttttacgcacaccacctgacgcagggtatagataacttccaccagatcgctttgtgccgccatcaccgcatcaatatctttatacgccatcgggatttcgtcgatcacttcggcaactttacggcattccacatgcgcggtggcacgaatttgatcttccacgctgaacagttttttcgctttagttcggctcattacccgcccggcaccgtggctgcacgaacagaacgactcttcatttcccagcccacggacgataaagctttttgctcccatcgaaccgggaataattccatattgaccagcacgcgcagacaccgcgcctttacgcgtcacgtagatctcttcaccaaagtgctgttctttttgcacatagttgtggtgacagttgatctcttccatcgccagcgtttgtggctgtctgaccgttttctgcgtaatgctctgcaatgccgttaccacgttttccatcatcgcatcgcggttaaggctggcaaaaagctgcgcccaggccacggctttcaggtaatcatcaaagtattccgtaccttccataaagtacgccagatcacgcgacggcaacgtctcaagcgtttcctgcatctctttttgtgccagatcgataaagtaagtcccgatggcgttaccaattccgcgtgaaccggagtgcagcataatccacacctggtccgactcatcaaggcagatttcaataaagtggttaccggttcccagcgttcccaggtgtttatagttattggtattcaggaaacggggatatttttgcgttaaccactgataaccggcttcaagctcagcccatttagcatcgacgttaacaggtggattttcccaggcacctttatcacgtttacaacggccagtggtacgcccgtgcggcacggccgtttcaatcgcctgacgcagctctgccaggttttcaggcaggtcttccgccgttaacgcggtacgcagcgcgttcattccacagccaatatccacgcccaccgccgccggaataatcgcccctttggtcgggatcacgctaccaatggtggaacctttacccaggtgtacatcaggcattaccgcaatatgtttgaaaataaacggcatcttcgccgtattaataagttgctgacgcgcatcggcctctaccggcacgcctttggtccacatttttaccggggcattttcagtggtcagtaattcgtaattcattttgtttttctcttttcgttgtttgctgtcctgataattgcaaccgtcgtgccagaaaattaaataagcagcttaattttttaattcattgttttaaaaaagattatatctttacgtccgtaaacggagattttccacaaaaccaattcaccgataatgaaatatcgtcttttataaggatatctaagatgcgtaaaacagtggcttttggctttgtcggtaccgtgctggattatgccggacgcggcagtcagcgctggtcgaaatggcgtccgacgctttgtttatgccagcaagaatcgttagtcatcgatcggctggaattgttgcacgacacccgctcgcgctcgctattcgaaacgcttaaacgcgatatcgccagcgtttcgccagaaacagaagtcgtgggcgttgagattgaactgcataacccgtgggatttcgaagaggtttacgcctgcctgcatgatttcgcccgtggttacgagtttcagccagaaaaagaagactatttaattcacatcaccaccggcacccacgtcgcgcagatttgctggtttctgctggcggaagcgcgttacctgcccgcccggctgatacaatcttcacctccgcgcaaaaaagaacagccgcgcggcgcaggtgaagtgacgattatcgatctcgatttaagccgttataacgccatcgccagccgctttgccgaggaacgccagcaaacgcttgattttcttaagtccggcattgccacgcgtaacccccacttcaaccgcatgattgagcagatcgaaaaagtggcgatcaaatcccgcgcgccgattctgcttaacggtccaaccggcgcgggcaagtcatttctggcgcgacgcatcttcgagttaaaacaggcgcggcatcagtttagcggcgcgtttgtggaagtaaactgcgccaccctgcgcggcgataccgccatgtcgacgctgtttggtcatgtaaaaggcgcgtttaccggggcgcgggaatctcgtgaaggtttattacgcagcgccaacggcggaatgttgtttcttgatgagattggcgaactgggcgcagacgaacaggcaatgctgctaaaagccattgaagagaaaaccttttacccgtttggcagcgatcgccaggtgagcagtgattttcagcttatcgccggaacggtgcgcgatttgcgccagctggttgccgaaggcaaatttcgcgaagatctgtacgcgcggatcaatctctggaccttcaccctgccgggtctacgccagcgccaggaagatattgaaccgaaccttgattatgaagtggagcgccacgccacactcactggcgacagcgtgcgttttaacaccgaagcgcggcgcgcctggttggcttttgcgacctctccccaggcaacatggcgcggtaactttcgcgaactttctgccagcgtcacgcggatggccacctttgccactagcggacgcatcactctggacgtggttgaagatgagataaaccgtctgcgctataactggcaggagagccgcccctccgcgcttacggcgttgctgggcgcagaggcagaaaacatcgacctttttgacaggctgcaactggaacacgtgatagctctctgtcgccaggcaaagtcgctttccgctgccggacgcctgctttttgatgtttcgcgccagggcaaagccagcgtcaatgacgcggatcggctacgcaaatacctggcgcgttttggtctgacgtgggaagccgtgcaggatcagcacagctccagttgaatatgatggtccgtcagcacctgcattacgcttactggcggcggggcgtcggtgtagacggcatctaccatgctgatgctgcccatattgaccatcgcgttacggccaaatttcgagtgatcgacaaccagcataacgtggcgcgagttctcaataatggcgcgcttggtgcgaacttcgtggtaatcgaactccagcagcgagccgtcgctatcgatgccgcttatccccagaatgccgaaatcaaggcggaactgggagataaaatcgagcgtcgcttcgccaatgatcccgccatcgcggctgcgtaattcgccaccggcgagaataatgcggaaatcttcttttaccatcaacgtgttagcaacattgagattgttggtgacaatacgcaaattgctgtgattaagcagcgcgtgcgccaccgcttccggcgtggtgccgatatcgataaacagtgtcgagccgttggggatttgctccgccactttgcgggcaatcctctctttttcttcggtctgggtggctttgcgatcgtgccacggcgtgttaaccgaactggaaggcagcgccgcaccgccatggtgacgcaggatcaggttttgctccgccagctcattgaggtcgcggcgaatagtctgcgggctgacggagaaatgctctaccagctcttcagtactgacataaccctgctgtttaaccagttcgataataccgttgtgacgttgtgtttgtttcatttataaatccctggaattattttcgttttcgcgcattgagcgaatcaacaaaagccatcgctaaacccacggctaacccggcgatgtgtgctccgttcgccatcgacatcccaaacaaatcaaaccatccggcgacaatccagatcagcgcaaagataattaacccacgttgcaggtaaatgccactttgcggatcgcgttcaccacgtagccagacgtagcccatcagcgcatacaccacgccagaaagcccgccaaaccacggcccgctgaatttttgctgcacatagccgcttaacagggcgctaatgagagtaataacaattagcttaccgctaccgaggcgtttttccaccgcaccgccgagataccaccaccagagcaggttaaagaggatatgcatcagcgagaagtgcattaacgcgtgggtgaagtaacgccagaactcaaatttcagtgttggatcgaatggccaggccagccataacatcacttcctgatcgccgagaatttgcatggcgataaacaccaccacgcaggcgatcatcaccacccaggttaccggacctgcgcgttcacgcaaggcggcaaagaaaggataacggcgataatgcaggccactgccggtatggcctgcctgccagctggccgccagataacgcggatctgccgggttttcgagaaaacgcgccagctccgcccgtacgcgctcggcctgggactcatccgccagccagacatcgctttggttatgttgttgaatcgtgaggataacaccctgcgtcgccatgtaatcaacaaacgcctgcgccacgcgggggttagcaaaagaggtaatcatcaacattgttgctgtcgcttattccacacaaaaggggacagtataaagcgttacgcgccgtacgccacctctgcgggaaactgacgttgccaggcttcaaagccgccgtcaatgctatagaccacatcgtagccctgttgcagcagatactgcgccgcgcctttgctgctattgccgtgataacacatcaccatcaccggagtgtcaaagtcgttatcacgcataaacgcgcccagcgtgtcgttggttaaatggaaagcctgcaccgcatgccccatagcgaaactctgtggatcgcgaatatcgaccagcaccgcctctttttcctgcaacttctggtgcgcgtcggcaacgttaatacattcgaactgatccatgcgtctctctttctttacaaacaagtgggcaaatttaccgcacagtttacgtcgaagcggcagataaacgccataatgttatacatatcactctaaaatgttttttcaatgttacctaaagcgcgattctttgctaatatgttcgataacgaacatttatgagctttaacgaaagtgaatgagggcagcatggaaaccaaagatctgattgtgataggtggcggcatcaatggtgctggtatcgcggcagacgccgctggacgcggtttatccgtgctgatgctggaggcgcaggatctcgcttgcgcgacctcttccgccagttcaaaactcattcacggtggcctgcgctaccttgagcactatgaattccgcctggtcagcgaggcgctggctgaacgtgaagtgctgctgaaaatggctccgcatatcgccttcccgatgcgttttcgcctgccacatcgtccgcatctgcgcccggcgtggatgattcggattggtctgtttatgtacgatcatctgggtaaacgcaccagcctgccgggatcaaccggtttgcgttttggcgcaaactcagtgttaaaaccggaaattaagcgcggattcgaatattctgactgttgggtagacgacgcccgtctggtactcgccaacgcccagatggtggtgcgtaaaggcggcgaagtgcttactcggactcgcgccacctctgctcgccgcgaaaacggcctgtggattgtggaagcggaagatatcgataccggcaaaaaatatagctggcaagcgcgcggcctggttaacgccaccggcccgtgggtgaaacagttcttcgacgaggggatgcatctgccttcgccttatggcattcgcctgatcaaaggcagccatattgtggtgccgcgtgtgcatacccagaagcaggcctacattctgcaaaacgaagataaacgtattgtgttcgtgatcccgtggatggacgaattttccatcatcggcaccaccgacgtagagtataaaggcgatccgaaagcggtgaagattgaagagagtgaaatcaactatctgctgaaagtgtataacgcgcactttaaaaaacagcttagccgtgacgatatcgtctggacctactccggtgtgcgtccgctgtgtgatgatgagtccgactcgccgcaggctattacccgtgattacacccttgatatccatgatgaaaacggcaaagcaccgctgctgtcggtattcggcggtaagctgaccacctaccgaaaactggcagaacatgcgctggaaaaactgacgccgtattatcagggtattggcccggcgtggacgaaagagagcgtgctgccgggtggtgccattgaaggcgaccgcgacgattacgcagctcgtctgcgccgtcgctatccattcctgactgaatcgctggcgcgtcattacgcacgcacttacggcagcaacagcgagctgctgctcggcaatgcgggggcgataagcgacctcggggaggatttcggtcatgagttctacgaagcggaactgaaatacctggtggatcacgaatgggtccgccgcaccgacgatgccctttggcgtcgcacaaaacaaggcatgtggctgaatgcggatcaacaatctcgtgtgagtcagtggctggtggaatatacgcagcagaagttgtcgctggcgtcgtaaggatgatgcccggttgaagtgcaaccgggctatttggattccttagactattcattgtaaataattgaataacggcccctgagctaaaatcgccaaacttaagcacgttacccaatcgccccacttcttcctctggtttctattttttctgcaccaatggcaataatatcccaatgcaaaaccaagctgtgcactaatcgggccgacaaaatcagtccaaggctgcggccaaaaaggggaaaaattcaggggaggccagacaaacgtcagaaagaaatttcggatattttccagcaacgctgatttctctggagaaatataaagaatgaaattcgagagaattaaccagaaatagaccggcgaaaagaccagccagcaatgcagtctgttttttaattcaggaggcgttctgcgggagaattgccaaccgatgccagccattacactgaaaaaagtgcatattcaacaattaactcaagttgtaattcctgaagagaaatacgcacaaccaggagcggaaaggagaatattatttctgccagaaaagttaacgtgaatataagtacggctaagacaataaccgtcggccataccaataatggcacgataacaaaaccgagaattacagggggaatataaagccggaatttaatcatttttattttcctggtgattcggatgatgcgtcatacatcgcgcataaacactcatcaattatccagtcatcttcccagacctgatattctgtcattggttcgggctgttttagcgggttctcaatcgcttgccgcgctctttctttcagtaaaggatgattatttctagcccaggcattgatttgggtggtaatgacgttatcgatatcgtcctggttatctctgatataatcctcacaatatctgttcaataaacaggcaagagaaacggtcgaccaaaagccgggaactgaattaatggcatccagcaatggcgcaagagcgatatcggcacggaaaaacatttccagcatatactgtaattcgacagcttcatcgccggatacccaatcagtcatatactggcaggcaaatcgctgtaaaattgcccgttcatccgcacgccagttttctttgttggcaaggttgatacggcgctgagaaaaaactacgtgaatattgtcaaaatgcccctgtgcaacaaattccagtaaacgcggcagaaaatagcggacctcatcgctattttgcggatcaggccctgggctactattccaggcattgattaaggaatacgggatcgctcgtaacgatgtactccgtaatgccttttgttcctgctgactcaggcaatattcacaacaaaccacaaatttctgcggcacccgataacgacgaaaggtgtgataaatctgctcaattaatgcctgcatggcagggctgggttgcatagttaccccctcgcccgctgatcgcgtgtaaacggttgatagacaaaacgagcattcgccgcgttcaggcgaataagggcgctacgcgaaagggaaaagctggggcgaatgcaactattgcagtctcgacagctttcctctgcgcaattttccactgagtaatgaagcgtgtagaatttcagttcggcctgcttatcgcgaaatccgcgtaaactgttattgttatgaaatttccaggcatcttttaagacctgaaagatatagacatcctcaatccaggagtcacattttttaagcgggcgctttgctattatcacccgctcatccggatttagcatcgccgtaaattgtacggtgacgtcatttgtcgtgttcaggtcacattgaacatctggtacatcactgatataggggtcaaatccaaaatcagcaccacaggcacaaagacggctaatggtggcggtatcgagggaaaatcccggccataccttgctggaggttaagccaatatttaatgtgacattatatcgaagcaatccctcaagaccgtcagcaccgacgaacttttccccttcatccagggcctggttaatgagttgctgaacaatgccttcatcccagtatgccgatttgcagttggcaatcgtaatatccacgcctgtgaagggatcagtaccggcaaggcttgcaaataatgtattaactaattccatttttattatccagcttggagtcattaccttatacatcgggacataacctacatcttccaccaaactctgtccctgcggcgttaaaaaccactccaacaatttttgtgtctctgacgtcgtattttcccgcgttaccataaaggcatcgacgatatagggatatttgccgttgcgaatgttttcggcagtcggtgcaataccgttaatcgctagcagttttatatttttatcgtcgttcatttgtgttgcgtaataacggaaggtgtaacctattgcgttgtttgtattacggtattcggcaacgactttaatcattccctccatcatacttgccacttctgtttcctgcggcgagatcatgcggacatttttcatgacctgggattgcatcaccgtctggctaccagagtcttccgggcgttgccaggtctggatctcctgatcgttaccgccaaccgtgcgccagttggtaattgcaccactgaagatgtcacgcacttgttgttcggtcagggaattaaccgggttatctgcattgacgatgaaaacaaacgcttcacgggcaaaaggcgtgtaaatcaaagtgacgcccgattcctccgcgcgttttttctgcccaccggaaggttgagccacaaagataatatcggcattacctttaacaatcttgttatatgcttcgggagtacgagagttcgccagatattcccattcgtgaaaatcttccggcaaaacgcttagtgcataaaaggcagaggcataaatggggtacgccgccgttgcgccatcaagtcgcggccagttttgcgtgaactgaatttgcggtttaccacgcagtggtgtcagttgattattgagtttatcgggtcgccaggcccaggtatcaatattttcacgcacaccgacgccgggattaagctgtttatataaataagcctggtaaccggcgacaaaaccaagcatgagaaggataaacaagagagaattacggcaacgtaacccggacgtgcccgttaaaggatatctggtcggccagccgtaccccagcgaaaaactgatatgcgcgccaacaggtataatgactaaccaccagtactcaccaccgactaatgaggctaacaaaacgcccagccaggggagcataagatcagccaaccaacccgctcccatctggtgaaattgataatctgccagatgcagcgcgattatccagacccccagggttaataatgcgggtactaaaaaaagacattgtcgccagacggctatttctcttttttctggtgcactatcgtccgcccacactcgccccgagaaaaatagcattaatgcgcccagcgccagcataaaaatgttgagcagaaggtaaattgttggcgtgataaagatattacaaacttcaataataccggcaagtccaacacccagcatggcaataaccgccgccaaaaactgcgccagaatggggatgccgaaaaaagtcattaccagcgaggtcaaaatccattttctgttttgcattattctttccattctttctgaatggcgaaattatactccccgagtccccttgccccttctggacacttttccgaaatgatggcgaaaaaaacgggaccctttggccccgttctatttattagtgaaattacaatctcaccggatcaatatgccagatatgatcggcgtactctttgatagtacggtcagaagagaagtagcccatattggcaatgttcagcatcgcttttgcggtccactcttcctgaagctcgtagagttcgtcgactttatcctgacaatcgacatagctgcgataatccgccagaacctgatagtgatcgccgaagttgatcagcgaatcaaccagatcgcgatagcgacccggatcttccggactgaatacaccgctgccgatttgcgtcagcacctgatgcagctcctcatctttctcgtagtattcacgcggtttgtagccctgacgacgcagttcttccacttcttccgcagtgttaccaaagataaagatattgtcagcaccgacatgatccagcatctcgacgttcgcaccgtccagcgtaccgatagtcagcgcgccgttaagcgcaaacttcatgttactggtgccggaagcttccgtccctgccagcgaaatctgttcagacagatctgccgccggaatgatcaactgcgccaggctaacgctgtagttcgggatgaacacgactttcagcttatcgccaatctgcggatcgttgttgatcactttcgctacgtcattgatcaaatgaataatgtgcttcgccatgtaataggccgaagccgccttaccgccaaaaatattcacgcgcggtacccacttcgcatccgggtcggccttgatgcggttatagcgggtaatcacatgcaacacattcatcaattgacgtttgtattcgtgaatacgtttgatttgtacatcgaacaacgcctttggattcaccaccacattcagctgctgggcgatatactctgccagacgctttttgttctccagcttcgcctgatgcacagcgtgattaaccattgggaaatcacagtgttgttgcagctcattaagcaggctaaggtcggtgcgccagttacggcccaggtgttcgtccagcacggctgaaagcgatgggttcgctaccgctagccagcgacgcggcgtcacaccgttggtgacgttggtgaaacgacccgggaagattttcgcaaagtcggcaaacaacgattgcaccatcagattagagtgcagttccgatacaccgttaactttgtggctcacaacaaccgccagccaggccatacgcacgcgacgaccgttggattcatcaatgatcgacgcccgtcccagcagatcggtatcgttcggatactgttcctgcaaggttttcaggaaatagtcgttgatttcaaagatgatctgcaggtgacgcggcagaattttacccagcatatcaaccggccaggtttccagcgcctcgctcatcagcgtgtggttagtgtaggagaagacctgacaacacacctcaaacgcgtcgtcccagctaaattggtgctcatcgatcagcagacgcatcatctcaggaatcgacagtaccggatgggtatcattgagatgaatcgcgattttatccgccaggttatcgtaggttttatgcaactgataatggcggcttaaaatgtcctgaatggtcgaggaaaccaggaagtattcctgacgcaggcgcagctcacgcccggagtaggtggagtcatccggatacagtacgcgagatacgttctcggagtggtttttatcttccactgccgcgaagtagtcaccctggttgaatttaccgaggttaatttcgctactggcttgcgcactccacaaacgcaacgtgttggtcgcgtcggtgtcgtaaccagggattatctgatcgtaagcgactcccagaatctcttcggtttcaatccagcgcgtttttttaccttcctgctgaatgcgaccaccaaaacggactttatagcgcgtgttgtggcgtttgaattcccacgggttaccgtattccagccagtagtctggcgactctttctggctaccgttaacgatgttctgcttgaacataccgtagtcatagcggatgccgtaaccgcgccccggcaaccctaacgtcgccagagaatcaaggaagcaagccgccagacgtcccaggccaccgttaccgaggcctgggtcattttcttcatcaatcagctcttcgagatttaaccccatcgcttccagtgcgccctgtacatcttcgtaaattcctagcgacaacatggcgttggagagcgtacggccaatcaaaaactccatcgacaggtagtaaacctgacgagtttcttgcgacaactgggcacggtttgaacgtaaccagcgctccacgagacgatcgcgcacagcaaataacgttgcgttcagccattcatgtttattggcgacgaccgggtcctttccaatcgtaaacatcagcttgtaagcgatagagtgcttaagagcttctacgctaagcgtgggcgatgaatatgtaaacggagcattcatataggcgtttcctgaaaactatttcaagcgatagtaaagctcacggtacgacttcgccgcgacctgccagctaaaatccattgccatagcctgacgttgcacaaaccgccacagtgaaggacgggaccacagtacaaaagcacgtcgaatagcccgtaacagcgaccaggcattactatcttcaaagacaaacccactggcgacgccatctgcaaggttctcaagagaacagtcagaaaccgtatcagcaagcccaccggtgcgccgcactaacggcagcgtaccgtacttcaatccataaagttgcgttaagccgcacggttcaaaacggctgggcaccagaatgacgtccgcgccgcccataatgcgatgcgaaaatgcttcgtgatagccaatctgaacgcccacctggccggggtattccgctgccgccgcaaggaaaccttcctgcagcaccggatcgcccgcgccgagtagcgccagctgcccgccctgctccagaagacccggtaaggcttccagcaccaggtcgagacctttctggctggtcagacggctcaccactgcaaaaagcggcactttatcgtcaaccttaagccccattgcgatttgtaactggcgcttattttccgctttatcttccaacgtatcgcgggtgtaacgcgaggccaacagtaagtccgtctctggactccagattttctcgtccacgccgttcagtacgccggaaagacgcccttcacggtgacgctgttgcaacagaccttccataccgtaggcaaactgcggttcggtgatctcgcgagcgtaggttggactgaccgccgtaatgtgatcggcatagtacagaccggccttcaggaaagagatttgtccgttgaattccagcccatgaatattaaagaatgaccatggcaattggatgtcattcatatgatgtgcataaaacatgccttgataggccaggttgtgcacagtaaacaccgacttcgccggacgcccgcgcgccgccagatacgcaggcgcaaggcctgcatgccagtcgtgcgcatgcaccacatcaggacgccagaatgggtcaagcccgctggccatttctgccccaacccaccccagcagcgcaaaacgcaatacgttgtcggtataggcaaataagttggtatcgtgatacgggcttcccggacgatcatagagatgcggcgcgtcaatcaggtatatgccaaccccgttgtaatgaccgaacaacagcgtgatatgtccggcgaaggtatcacgacgggatactacctgcgcatcggtaacgccacggcgaatatcgggaaatgcaggcaacagtacgcgagcgtcaacgccgtctgcgatttgtgctgcgggtaatgccccaataacatcagccagaccgccggttttaagcagcgggaacatctctgaacatacatgtaaaacctgcattatcgctcctgtttatgccctaacttccgtagcatttcgcgcgttaccagcacgatgccttcttctgaacgatagaaacgacgtgcatcttcctctgcgttttcaccaatcaccatgccttccggaataacacaagcacgatcgatgacgcagcggcgcagacggcacgagcgacctacccatacttccggtaacaatacggcggaatcaatgttgcagaatgaattcacgcgaacgcgcgagaacagaacggactgcaccaccaccgaaccggagatcacacaaccgccggataccagtgagttaagggtcatcccgtggctaccggagcgatcctgcacgaatttcgctggcggtaatgattcattgtaggtgcgaattggccaattgcgatcgtacatatccagttccggcaccacagaggccagatcgaggttcgctttccagtaagcttccagcgtacccacatcgcgccagtacggctcggcatccgggtcggattgtacgcaagagagcgggaacgggtgcgcataggccagaccggcttcggtgatcttgggaatcaaatctttgccaaagtcgtggctggagttctcatcacgatcgtcttcttccagcagttcatacagatagtcggcgtcaaagacgtagatacccatactcgccagagatttgctcggatcgttcggcattgacggtgggttagcaggtttttcaacgaattcgataattttatcgttctcatcaaccgccataacgccaaatgcggaggcttcttcaatcggtactggcatacaagcaacggtgcaacgtgcgcctttttcgacgtgatcgataagcatacgcgagtagtcttgcttgtagatatggtcgcccgccaggatcaccacgtattccgctttataacggcggataatatcgaggttttgggtgaccgcatctgcggtgccgcgataccagttttcccctttcattctctgctgtgctggcagcagatcgacaaactcgttcatttcttcattgaagaatgaccagccgcgctgaatgtgctgcaccagagtgtgggactggtactgggtgatcacgcccatacgacggatcccggagttgatgcagttagacagcgcaaagtcgataatgcggaacttaccgccgaagtgtacggccggttttgctcgcttattggttaaatccttcaggcgggtaccacgtcctcccgccagtatcagggcaacagatttcaatggcagctggcgcgccaacattaagtgatcgttcttctctaaactaaccatgactaactccttttttatcatctctggaacacacacaatccgtgtgcaggtccctgccagacagccgtaatcactgggttatcctctccagcgaatgggggaatggcgtgccactccccagcaggtaaaacaatctctgttacctcaagcgtggcgttaattgcgatcaaaaagcgatccgagagcagaatttgcagctgtttcggcccgttttgccactcatccgtgcttaaaggttgagcatatcgatttagccaacggacattgccgtcgccttcttcccaccagcgattctccaccaaagcgggaatgcgcttgcgcagatggattaacgcggcggtaaatgcggtcaaaccactgcttgcctgcgaccagtccaaccaggttaattggttatcctgacagtaggcattgttattgccatgctggctgtgaccatgttcgtcaccggccagtaacatcggcgtaccctgggagagcaacaacgttgttaacagggcgtgaatgctgtcgcgccgccgttcaaccaggtcaagagaaccgcctaacccttctttaccatgattgttactgtaattgttgttggtcccgtcgcgattttcttctccgtttgcttcattgtgtttatggttgaagcaaacgcagtcgcgaagcgtaaaaccgtcatgcgcggtgacgagattaatcgcggcactcggcagacgaccattacgtttaaaaacatcgctggaggcagcaaaacgcccggcaaacgcccccagaggcaaatcataatgtagccagaaacgacgggcagcatcgcggaaatgatcgttccactcggcaaacagcggcgggaaatttcccacctgataaccaccaggagcgatatcccacggttcagcaattaacttcacctgtgagagcaccgggcagttctggatagcggtaaacaacggcgcatcctgacggaactctggcgtacggcccatgactgccgccagatcaaagcggaaaccatcgacgtggcaggtttctacccaataacgcaggcaggcgctggcataatccaccaccgccggatgactcaaattgagcgtgttgccgcaaccggtccagttgtgataatcgccgtcttctcttatccaataatagctacggttatcgatcccacgcagcgagaataacgggccgtcgaggtccagttccgcactatggttgagcacgatatcaagaatgacttcgatacccgctttatgcagtgctttgattgcatcgcgaaactcatccagcgccgtttctggcgagcaggcatacgccggatgcagcgcaaacatcgccaccgggttgtaaccccagtagttacttagccccatgcgttgcagacgtggttcactggcaaactgcgccactggcagcagttccagcgcggtaatgcccaattgtttcaaatagttgatcatcaccggatgcccgagggctttataagtgccacggatctcgaccgggatctccgggtgcaagtacgttaatcctttgacatgggcttcataaatgatggtgctgccccacggcgtgcgcggcggggcatcatcttcccagtcatagtgatcaaccaccactacgcatttcggcgcaatggcggcgttgtcgcgatagtcaggttcattatgaccggcgtgcagcagcgggttatctttaaactccccctcaatttgccgcgcgcaaggatcaatcaacaacttcgccgggttaaagcgatgcccctcggcgggttgccaggggccatgaacgcgataaccataacgcaaacccgggcgcgcatccggcagataaccgtgccaaatgtcgccactgtgccctggcaagtcatagcgatgttcctggccattggcgtcaaagacacacagttctacccgctcggcatgagcggagaaaagtgtgaagttgacgccctgaccgtcgtaatgcgcgccgaggggagcgggtttgccaatggcgagttgtgtcattctgcctcccgaaccagccagatagtggccagcggtggtagcgtcaggcttagtgaatgctgacgaccgtggctggcaatctcatcgctgtgtaccgtgccgccattgcctgcattactgccgtgatagtgcatggaatcggtattgaggatttcacgccatttgcccggctggtttatgccgaagcgataatcatgacgcggcaccggcgtaaagttactggcaacgatgatttcgttaccctctttatcgcgacgcacaaagatcagcaccgagcgttctttgtcatccaccaccagccattcaaagccgtacgggtcaaaatccagttcatgcattgctttatggtggcggtaggtgaggttcagatcgcgcaccagacgctggacaccgtggtgccagttatcgccgccttccaacagatgccagtcgaggctggcgtcatggttccactcgcggccctgggcaaattcgttacccatgaacagtagtttcttgcccgggaatgcccacatccagccatagtaggcgcgcaggttcgcgaatttctgccatgcgtcgcccggcatgcggtcgagaatcgattttttaccgtggaccacttcatcatgcgacaacggcaggacgaagttttcagtgtagttgtagagaatcccgaaggtcagtttatcgtgatgatactgacgataaaccgggtcgagcttcatgtagtccagggtgtcatgcatccagccgaggttccacttgtaccagaagcccagaccgcccatatcctgcggacgagaaacgccagggaaatcggtagactcctcagccattgtcaccgcaccggaaacctgctcaccaagaatacggttggtattacgcaagaattcaatcgcttcaagattctcgcgcccgccaaattcgttcgggatccactccccctctttacggctgtagtcgcgataaatcattgacgccaccgcatcgacgcgcagcgcatcaataccaaaacgttcaatccagtaaagcgcgttaccgacgaggaagttactgacttcacggcgaccatagttgtagatcagcgtgttccagtcctgatgatagccttcacgcggatcgctgtgttcatacaagttcgtgccatcaaattcggcaagcgcaaagtcatcagtcgggaagtggcctggcacccagtcgagaatcacgttcagaccagctgcgtgtgcggcatcaatgaaataacggaagtcgtcgcgagtaccaaaacggcgggttggtgcatacaggccggttggctgataaccccaactgccatcgaagggatgctcgttaatgggcagtagttcgaggtgggtaaagcccatccatttagcataaggcaccagttgatcggccagctcgcggtagctcaaccagaaattgttgtcggtgtggcgacgccaggaacccaggtgaacttcataaatagagattggcgcatcaaactgattcgcttttttgcgctcttcagtctgtacaaccttttccggcagcccgcaaataagagacgcggtttccgggcgcatttgcgcttcgaaggcataagggtcggacttcagacgcaagttgccattggcatcaatcatctcgtatttatagagctgaccgttatgcgccccagggataaacagttcccagatgccgctctctttacgcaggcgcatcgggtgacggcgaccgtcccagtagttgaattgcccaaccaccgagacccgacgggcgtttggagcccagacagagaaacgcgtacctgtgacgccatccatagtatctgcatgcgcgcctaaggtttcatacgggcgcaggtgagtaccttcagataatagccaagcatccatttcctggattagcggaccaaaacggtaaggatcatcaatcaggttttgctgaccatgccagacaacagccaactgatagcggaaaaaattcttacgtcgcggaatgacaccgctaaagaatccccgtgagtcgagacactccagttttgcgagtttgcgcccggttttcggttcaatcacccacacatcggtagcgtcgggtaaaagggcacggacttccagtcccgcggtggttttatgcattcccagtacggaaaaaggatccgcaaaatggcctgcaattagcgcgttaatcacgtctctatcgatacgatcggacatgcttgtcttcctgttttattgtgtcaccccatccaattggattttgacttctggttgtgacatttttttgacctgaacggcgcagcactctgtgcatcctctctgcgtcgtcctcacttcaggtaaggctgtgaatactcatgtattcagccacccttaaagaatagccaatgctctatttaactcccggtaaatcatgaaacatctgcgcttactcctgtattacgcactaacaggggcggcatcgcgccccagatttaatgaataaagattacgccagttgacgaagcatccgacgcagcggctccgcggccccccacagcagctggtcgcccactgtaaaggctgacaggaactctggtcccatattcagcttacgcaggcggcctaccggcgtggtcagcgtgccggtaacggcagctggggttagctcacgcatagtgatttcccgatcgttcggaacgactttcgcccacggattgtgcgcagccagcagttcttccacggtcggaatagacacatcttttttcaatttaatagtgaatgcctggctgtggcagcgcaatgccccgacacgcacacataaaccatctaccggaattacggaagatgtgttgaggatcttgttggtttccgcctgccctttccactcttcgcggctctgaccgttatcgagctgtttgtcgatccacggaatcaggctacccgccaacggcacgccaaagttatccaccggcagctcaccgctacgggttaaggttgtgactttgcgttcgatatcgagaatagcagaggacggggtcgcgagttcatctgccacatggccatacagatggcccatctgggttaataactcacgcatatgtcgcgcaccaccgccggaagcggcttggtaggttgcaacggacacccaatcaacaagatcattggcgaataaaccacccaacgacatcaacatcaggcttacggtacagttaccgccaacaaaagtcctgatgccattatttaatccgtcggtaatgacgtcctgattgacggggtcaagaatgatgatggcgtcatctttcatgcgcagagacgatgctgcgtcaatccagtaaccttgccatccgctttcacgaagctttggatagatttcgttggtataatcgccgccctgacaggtcacaatgatatcgagggcctttagcgcctccagatcaaaggcatcctgaagtgtgccagtggttccgccaaaagacggcgcagcctggccaagctgagaagtagaaaagaagacagggcgaatggcgtcgaagtcgcgctcttcaaccatgcgttgcatgagaacggagccgaccataccgcgccagccgataaaaccaacatttttcataagcgtttttttcctgcaaagatgtgtgctgtataaatgtgccggtctcctcttggcacatctttcaccatacaaaaagcagccaaagtcgcaagtgaaattaatcaatgatagcgaagccatcagtaatgcgacttatcctgctttgttagcacgcagaaagtccgcggcaattatcagggaatttgagttatgaatgaaatcatttctgcagcagttttattgatcctgattatggatccgctcggaaacctacctattttcatgtccgtactgaaacatactgaaccgaaaagacggcgggcaatcatggtgcgagagttgcttattgctctcctggtgatgctggtgttcctgtttgcgggtgagaaaattctggcatttcttagcctacgagcagaaaccgtctccatttctggcggcatcattctgtttctgatcgccattaaaatgattttccccagcgcttcaggaaatagcagcgggcttccggcaggtgaagagccatttatcgtgccgttggcaattccgttagtcgccgggccgactattctcgccacgctgatgttgttgtctcatcagtacccgaatcagatggggcatctggtgattgctctgctgctggcctggggcggcacctttgtcatcctgctacagtcttcgctatttttacgtctgctgggcgagaaaggggtgaacgcacttgaacgcctgatgggattgattctggtgatgatggcaacccagatgttcctcgacggcattcgaatgtggatgaaggggtaacgaggagagtttttcgaaaagaacccggtagcgtcacaactaccgggcgaacaaacttaactcaacagctggaacgcaatcatcccaacgatggcaccgacagtgccgaggatggtttccatcatggtccaggttttcagcgtttcggcttcggtcgcgccggtaaatttaccgaacaaccagaaaccggcgtcgttaacgtggctgacaacaatcgaaccaccagcgatacaaatcgacagcgccgccatttgcgcaccggagtagttcagttgttcaataaccggcatcaccagtcctaccgccgttaaacaggctacggtggcagaaccctgaatgatgcgcactgcagcggccagcacgaagcaggtgatggctatcggcaggcccatgccagttaacgcttcgcccagtgccggacctacgccagagtcaaccagcacctgtttgaacacgccacctgcaccaatcaccagcagaatgatccccgccggttgcagcgcgtgaccgcaaatctccatcactttgtcttttggcatgccctgacgcattgccaggccataaatcgctaccagacaagcaaccagaatcgcggtaaacggatgaccaataaactcgaaccattcgtaagcggtagagccttctggcacaaaacgcgcggcaatggttttcagccccaccagcaccagcggcaacaggatcagcgacaggctgaatccgaaagatggcattttgccttcgccgagatgcggttcgctgatgtcgtcaggaatatgcaactccacgtagcggctgatgaaattaccccacagcggcccggcaataatcattcccggaattgccgcacacaggccaatcaggatcatccagccaaaatcggcgttcatctgcgatgccagcagcattggcgctggccctggcaccaggaacgccgccgctgccgccacgcctgcgaataatgggattaccagcttcaccaggttcgtaccggtgtggcgcgccattgagaaagcaacgctaatcagcagaacaatcgccacttcaaagaacagcggtagcgcacagaccagccccgcaaggccgatggcataatgcgcgcggctgtgaccgaaggatttaagcattttgacggcaatctgatcgactgcgccggtttcatgtaagatcttgccaaacatagctcccagggcgacaaccaccgccaggaagccgagggtgcctcccatccctttttccatcgtcgctgcgattttatcgagcggcataccggaaaaaggccagcccccatggacaccaccatcaaagccaggaaagcgtgcatacgcgccttcatgactaaaaacagcagcagtaaaacagaccctactgctgttaaaacaagcgttaatgtagtcactacttatttgccttttttaataacctcaatggtgcttgccacaacaccttccagcggttgatcgatatccaccaccagtacatcagtttcgtccgcacccggctcctgcagcgtttcaaactgcgtcaccaacatttgggttttaaagaaatggcctttgcgcgctttcaggcggctttcaatcacgtcaaaatcgcctttcaggtagatgaaagagagattcggattaccttcacgcagcaagtcgcgatagtgttttttcaatgcagaacagacgatcagtgacactttattagtgcgctgcatagcaaacgcggcgtcgttcagcgcctgcaaccacggtttgcgatcgtcgtcattcagcggttcgccagacgccattttttcgatattgcgccgtggatggaggaaatcgccatcaagaaacgcggcatgaagttgatgcgccacttcactggcgaccgcagatttgccgctgcccgatacgcccatcaagacgtaaatgtggtgatcatggttagtcgtgctcaaagtggtgcccccacaatacaagaattaaaaatgttacgggtaactgttatcggtaacattgtccagccggacaatatcagaagcaatatccatccgtgccttaagtgtataagtgtgagctacttcaaatttgtaggcttaaatagatccgcccggtgacaaggtgaaacctaaatctaacattttcggtgtcacagattcgccacgaatacgcgccagcaggcgttcagcgccaatactgcccatccgctcacgcggcgtcagcacgctcgctaaccgcggctccatcacctggccaatgtcatgaccgtggaaaccggcaatcgccatatcgtcaggaaccttcaatcccagacgctgacattcaaacgccgcgccgaccgccaggtcatcgttggtacagaacacgccatccagctgcggatattcccgccgcgcctggcgaatcagttcaataccggaagagtaagaagaagattgctcaaccatcacgctatacggcaccagacctgcatccagcatcgcctgttcgtatcccttctgtttgatgatagtacgttcgtcgagacgcgcgccgagataggcaatgtggcaatgcccgcgagcaataatggcggtggtcatctggcgtgccgcttcaaagttatcaaaaccgacggcgatatcgaggcacggcgactggctgtccatgagttccaccaccgggatccccgccacttcaatcatctttaaggtgcgcggcgtgtgggtacgttcggtgaggatcagtccgtcgatattccatgagagcatggattcgagacgttcttgctccatttccggtttataaccgtagtgcgccagcatggtctgataaccgtgcgcgtcggtgacgctttcgattccgcgtaatacttccgcgaaaacctggttggtgagagaaggtaacaggacgccaatcgcccggctggtggcgttagagaggatatcgggcgcacgattgggaatatagcccagttcatcaagagcggcggcaatcttgccgcgtagagcgacggaaacctgctccgggttgcgtaaaaacggctgaccgtcattttggtcacgcctacacggtcagccacatcctgaagtacgggtcttttctttttcatcgtcctgaaggtacaaaagagatagattctcttagtttaacacggacgcatcagaaccttcccggggaaaacagtgcttgtttacaattattagatatacactaaatcaattgcatcgcattgtgctaacgacgcggcaaaaccccggaagcgtgcatcagcacgcgaccggagcgagcgaggaagcctgcaaaaaggcaggcttcaaagatgccgttgagttttaaaccggcggcagatcgaacagtaacacttcgctgtcgctatccgcatggatggagattgcctgctcatcccagattgccagaccatcgctggtcgaggctttcacgccgttaatggtgacattgcctttcaccacctggatccagacgcggcgttcagcggcaatctgatgcaccgactgctcatctttcagcaacgcccaacgatacagttccatatcctgatgcactttcagcgaaccatctcgcgcatccggcgagagcaccagctgtttgccctgcacggcatcgaagcgacgctgttcataacgcggcgtaatgccattttcttcaggcatgatccagatctgatacagatgcagacgctcggtgctgtttgggttgtactctgagtgacgaatacccgtacccgcactcataatctggaactcacccgccggaacctgctctttattgcccatgctgtcctgatgctcaacagtaccttccagcacgtaggtcaaaatttccatatctttatgcgggtgagtgccgaagccctgccctgcttcaatcacgtcgtcgttaatcacgcgcagcgcggagaagcccataaagttcggatcgtaatagttggcaaaagagaaagtatgccaggagtccagccagccatgatttgcatgaccacgttcatttgctttgcggaagtagatcatttgtattcgccccctgaatgatttcgatgagcttagtgtggacccgatctgcctgggatgatagagggtgaaaattgacccctctgttcaaaaaaattgaactattcgaggggccatcaaacttacttagcgagagttactgtggagggagaggcttgctcaaatccgcgttcaaggatttccagattggtaagaacttcagattccttgacgtaatttggcgcaccgtgggtgatggtttgatacaacgcatcataaacgcgcccgtaatcgcccatctccggcttcatctcttctctgaccgtcacgccctcgtcattgacatactccagcacaccgaccgaatcatccgctgcgaatcccggttcgcccggcataatattagccttcaggctggtttcctgctggtcgataccgtatttaataaacgaacctttcttaccgtgaacgataaatttcggataatcgattttcaccagatggctggttttgacgatggctttcaggtcgccataaaacagttgcgcttcaaaggtgtcgtcaggattggctttattacgcaggctgcggatgtcataagcgacgtgatccgggcgaccgaacagagaaataatctggtccatcgtatgcacaccaaggccataaaacgcgccatcctgcggcagcccaggtttggtctctgccaccgggcggtaatagtcaaaatggctttccacttcaacaatctctcccaacttgccactttcaatcgcttttttcgctgtcaggaagcaggagtcaaagcgacgattctgatacggcgtgacggtcagccctttgcttttcgccaacgcaaacagctccttcgcctgggcaagcgtcggggtgaacggtttttcgaccagcacatttttcccggcttccagcgcgcgtttcgcgtactcgaaatggctgtccgcgtgggtgcagacaacaaccagcttaacatcgggatcgtttagtacttcgtcgagatcgctggtgaaatggatatgggaataaatgggagcctgttcttccggcttcgcatggcgacgaaaaatatgcgcgacatgccagctatccttgcggttaagtacatacggcagatggtaacgggtggtgcttttgccgaagccaataaaggcgcagttgatgaccatgatttcgtcctttttaaggtggttatttacaccttagcgcaaagcggacgtggttcctactggagtgcgcataacgaacacaagcactcccgtggataaattgagaacgaaagatcaaaaaaaagccagcacccggctggctaagtaatactggaagcaatgtgagcaatgtcgtgctttcaggttctccgcgagggtcttcctgatcgcgagacaataataatcattctcattcgcacttgtccaacactttttgcaaaaaaatgcatttgactcgcatttgaaagtcaatgatgttgaaagggacatttaccccaaagaggacaaaggaatgagtgagatagtaatacgccacgcagaaacacgggattacgaggccatcaggcagattcacgcccagccggaggtgtattgcaacacactacaggtgcctcatccttccgatcatatgtggcaggagcgactcgccgatcgtcccggcatcaagcaactcgtcgcctgtattgatggagacgtcgtgggccatctcaccattgacgtgcaacagcgcccacgccgcagtcatgttgccgattttggtatctgtgtcgactctcgttggaagaaccgcggcgtcgccagcgccctgatgcgagagatgattgaaatgtgcgacaactggttgcgggtagatcgcattgaactaaccgtgtttgtcgataacgccccggcaattaaggtctataaaaaatacggctttgaaattgaagggactggtaagaagtacgcattgcgtaatggtgaatatgtcgatgcatattatatggcgcgggtgaagtaagatagtgccctttttctgagatggaaaaagggtgtcattcaaaatcgacataccttcctttaaggtatttatttgcccaatacatatattgagatttaactcataattacttcctaaagtgtaatattttattttttaatatatacgcctacaatttcctggagtaaataaataacaattaacaagcataatattgccattgataaaatagcatgccataaaaggacttttcagggatgagtaatattgtttacctgacagtaacgggagaacaacaaggaagcatctccgcaggttgtgggacttctgagtctacaggtaatcgttggcagagcgggcatgaggatgaaatatttacattctcactcttaaataatattaataatacggggcttggttcacagttccatggtataacattttgtaaattaattgataaaagcactccattatttattaattccattaacaataatgaacaattatttatgggatttgacttctatcgaataaatagatttggtagattggaaaagtattattatatacaactaagaggcgcttttttatcggctattcatcaccagatcattgaaaaccaactggatacagaaacaataactattagttatgaatttatcctctgtcaacatcttatcgcaaataccgagttcagctatttggcactccctgaaaattataaccgtttgtttttaccaaattcaaaaaaccaaacaaataatcgtttcaaaacgttaaacagcaaagctattggcaggctacttgctgctggtggcgtatacaatgggaacattgaaggattcagagatactgcggaaaaactgggtggagatgcaataaaaggctatgatcaaatactaaatgaaaaaacagcgggcatagcgatagcaacagcatctattcttttaacaaagcgttctaatgttgatacatatacagaaataaatagttacttaggcaaacttagaggtcaacaaaaacttcttgatggtatagacataatagaaataatatacattaagagaccttcaaaagacttagctaacttacgaaaggagtttaataaaactgtaagaaaaaattttcttatcaaacttgcaaaaacctccgaaacatctggaagattcaacgccgaagaccttttaagaatgagaaagggcaatgttcctctaaattataatgttcaccataaactatctctagatgatggtggtactaatgatttcgaaaatttagtattaatcgaaaacgaaccatatcataaagtttttactaacatgcaatcacgaatagctaagggaatattagtaggtgaaagcaaaatcactccctgggccattccatctggctcaatttatcctcccatgaaaaatattatggaccacacaaaatgatgactaaaacccaaataaataaattaataaaaatgatgaataatttagactatccatttgaagcaccgctcaaggaatcatttattgaaagtataatccaaatagaatttaattctaattcaactaattgcctggagaagttatgtaatgaagttagtattctttttaagaatcaacctgattatcttacttttttaagagcaatggatggattcgaagttaatggattacgattatttagcctctcgattccagaaccttcagttaaaaacctttttgccgtaaatgaattttatagaaataatgatgatttcataaaccctgatctacaagaacggttagtgatcggggatgatagcatttcaatatttacttatgacattaaaagtaacttttttgaaattagagataatattggcacagaaaatatattcagttcgtttagtgatttctcttcattcttaaacgaaatcatggacagttgttcataataatcaaaaggaaacaaaaatcattgtaaaccatgccatctttttagagattaccagcagaaaattccttgttcgaaatttagcagtgcaagctatggaaaaacttacaacggaactacactccttaagtgagatggaccgaagacatgtagtctctattttagccgaaatagctaatggctatgatgattttaatgacatgttgatttatttagaattttacccgaatcataagattctgatatcttaaataagaaaatcccgttcgacgttctgaaaaagaaatcataaaatattagcagatacttatttcgtgactatatcttatccgatgaacttttttcaaaaccagcatttaataatatctttgacgaagatgaacgcgtctttgctcaatgtatcacacaggaataataatataacactcaacaataatatttattataattatgattacttatcacgacgcattcgcgaaagcgaaccattaccttgatgatgcagatctcccggtcgtcattactctacatggacgctttagccagggctggtatttctgtttcgaagcacgagaatttctcgaaactggagatgaggccgcgcgcttagctggtaacgcaccttttattattgataaagacagtggtgaaattcattctctgggaacggcaaagccgctggaagaatatctacaggattacgaaataaagaaggctaccttcggcttgccctgacaaaatagccctcttcccacgaagagggccgctaaccttagtaccccgccgttaaatcatccaccgagcgcgggtcggatgcgccgtacaactcaccgtccggcccaaccataatgctttgtgtactgcccatcgcctctttcagcgccactttctgaccttttgcttccagcagcttgagcgtatccgggctaaaccctttttcgacacgcagctcgtccggcaaccactgatggtggaaacgcggcgcattggtcgcttcggcgacgttcatgccataatcgatgctattcaccaccatttgcagcactgtagtgatgatccggctaccgcctgggctaccggtaaccagccaggttttaccgtctttcaccacaatggtcggcgacatcgacgacagcgggcgtttgttcggcccgacggcgttggcatcaccgcccaccagcccgtaaacgttcggtacgcccggtttggcggagaaatcatccatctggttattaagcagaataccgctctcgcccgcgacaatacccgtaccgaaggtggtgttcagcgtataggtcaccgccaccgcgttaccgtctttatccactacagagtaatgggtagtttgattactctcataaggcgcaagcttgccagggcgaatctcactggacggcttcgctttgttgatatcaatttgatcggcaatggatttggcataggctttattggtcagtgcctgccacgggactttgacaaaatccgggtcgccaagatattccgagcggtcggcgtaggcgtatttctccgcttctgccatgatttgcatcacatcggcgctgccaaagccgtatttcttcatatcgaagttttccagaatattgaggatttgtacgatatggatcccgccggaggatggcggtggcatggagtaaacctgatacccgcgataatcgccgcttatcggagtgcgttcgaccgctttataggccgctaaatcttctttagtgatcaagccaccgtttttctgcatctcctgggcgatctgttccgcaatcgtgcctttatagaattcgtccgggccgttttcagcaatcatctccaggctctttgccaggttcgcctgcaccagcgtgtcgccctttttcagcggttcgccctctttccagaagatagctttgctgttttcgtgattcggcaacacttcgctaccgtaggttttgagatcgtctgccaaagcatcgttaacgataaaaccatcgcgtgccagtttgaacgcgggctgcaccactttgttcaacggcatagtgccgtacttatccaacgccagcgagaaaccagcgaccgtacctggtgtgccggaagccagatgcgaagtgagtgattttttgctgtccgggttgccctggtcatcaaggaacatatcgcgggtcgctttagcgggtgccatttcgcggaaatcgatagcggtggtattgccatttttcgagcggatcagcataaaaccaccaccgcccagattccctgcctgcggatgcgttaccgccagcgcgtagcccaccgccacggcggcatcaacggcattcccgccctccttgagaatatccacccccacctgagtggcagtggcgtccacagacgctaccattccctgtttcgcgcgtaccgggtggaagacatcttcctccacaccatacgagacgggcggcgcaggaggcgcggcggcggcgctaaaacaacttcctgagagcagagcagcaatggccacccggcgtaaaaacgtcggttttatcatcgttattctccagagattaaggggcaaccccagctaagcctggtatataactctgaattaatcatcgttttgtcgggaagcgagtaaacttaaaggatatcttcagaggaggatacgcgatgaaacgacttctgattcttacggcactcctgccgtttgtcggctttgcacagcccattaatactctgaacaaccctaaccagccggggtatcagatacccagccagcagcggatgcaaacccagatgcagactcagcaaatccagcaaaaagggatgctgaatcagcaactgaaaacgcaaactcagttgcaacagcagcatttagaaaaccagataaacaataattctcagcgggtgttgcagtcacagccgggggagcgaaatcccgcccggcagcaaatgctgcccaacaccaacggcgggatgttaaacagcaaccgtaatccggatagttcgttgaatcagcagcatatgctgccggagaggagaaacggcgacatgctgaatcagcccagcacgccgcagcctgacattccgttgaaaactattgggccgtaaagttcggaccaatcacgtcaatcgcatcggtacagatgcaatccacgccccagcgcagcaactctgccgcgcgctggggtttattgacggtataaaccagaatccgcagtccggcgtctttcaactgcatcactcgcactttatcgagtaacttatgattgagatgaatagagacgcagcccagccgcgcggtcagttcgcgccagtcgtcgcgccactcatcaagcaataaaccacgcggcagttccggtgccgccagctgtgcagcttctaaagcatcaatctcaaacgatgacagcagcggcggcgtcataccggcccacagttggcgtgccgccagcgccaccattttgcccgttaatggtccagtgccagtggtgggtttgatttcgatattcgccatcatcccgtgttcgcgacagcgttccgccacctgcgaaagcaacggcagcgactcacctttaaacgctttgctgtaccaactgcccgcatccacgcgcagtaaatcctgccagttcagttcacccgcgacgccccagccgttgctggtgcgttcgagattgtcgtcatggagcaggaagatctcgccatctttcgataacttcgcgtcaaattcgatcatcttatgaccgtattttgccccgacgtcgattgccgccagggtgttttccggggccagcttaccgccgccacgatgagcgacgatgcggggataaggccagttactcatactcgttgtcctgtttcaccatcaaaaagatgcagctgattttccgccagatgcagccacagcgtgctgcctgccgtcgggcgctcctgatgcgccagtcgcaccaccagcttctgctcgccccagcgtccgtgcgccaggttatctgcgccgaggatctccagcgtgtccatcaccagcggtacgccgccttctgcctgcgagcttagcgcaatatgttccgggcgaatgccgagagtcattttacgcccggcatactgacggtagccaccgtttagcggcagctcaataccgccgtccagttcgaaatgcgtgccttcgttattcacgcggcctgtcagcaggttcatcgccggactgccgataaaactcgctacaaacaggctggcgggcttttcgtagacttcaactggtgtgccaatctgttcggcaacgccgccgttcatcaccattactcgctgggcgagcgtcatcgcttcaacctgatcgtgagtaacgtagagtgaagtcgttttcaggcgacggtgcagctgttgcagctcaaggcgcatctgcacgcgcagcttggcatcgaggttagagagcggctcatcaaacaggaacaccgccggatcgcgcacaatcgcgcgacccatcgccacacgctgacgctgaccgccggatagctcgcgcgggcggcgcttaagcaggccatccagctccagaatgcgcgccgcttctttaacgcgctcggctatttgctgcttgcccatgccgcgaattttcagcccccacgccatgttttcttcgacgctcatatgcggataaagcgcgtagttctggaacaccatcgcaatcccgcgatctttcggctccatttcggtcacgcgctggtcgttgatccagatatcgccttccgtcacccgctccagcccggcaaccatgcgcagcagcgtcgattttccgcagccagacggcccgaccatcacgataaattcgccatccgccacatcaagggtcagtggtttaatcacctgggttttgccatcccagcttttggttactgcctgtaatttcagtcctgccatcttatttctcactatcgaccaggccgcgcacgaaggcacgctgcatcactaaaacaatcaccaccggagggataagcgttaacaacatcgccgccattaccgagttccattccgtggtgccttcgccagtggcgatcatccctttgatccctgccacggtggtgccgagatcaacgtcggtaataatcaacaacggccacaaatactgattccagccgtagataaaggtgatcacaaacagcgccgccagattagttttggagagcggaaaaacgatgtcgcaaaagaagcgcattggcgatgcgccgtcgatccgcgcggcttccaccagctcatccggcagcgtcataaagaactggcggaacaggaaagtagcggtcgccgaggccatcagcggcagcgttaaaccggcgtagctgtcgagcatctgcaggttggcgatgacttccaccgtcgggaagatacgtacttcaaccggcagcatcagggtgataaaaatcatccagaagaagaggttacgtagcggaaaacgaaaccagacaatggcaaatgccgagagcatcgagacggtaattttgccgagcgtaatgctgaacgccatcacaaagctgttaagcaacatccgccagaacggcgcgctattcgtgcctaccccgttcacccagatgttgtggatgttttccagcagatgtgtgccggggatgagcgtcatcggcgcggcatagacggcctgtttatccagcgtcgccgcgacaaacgccacgtacagcgggaagaggatcaccgcgatcccgaggatcagcatggtatggctgaatatcgtcagccacggacggttctcaatcattggtaacgcaccttgctttcaacatagcggaactgcaccaccgtcagcacgatgacgaggaacatcaacaccaccgactgtgcggcagacgaagccagatccagtccggtaaaaccttcgcggtagatcttataaatcagcgtcgtggtggcctgaaccggcccgccggacgtggcggcgtcgatcaccgggaaggtgtcgaagaaggcatacaccaggttcactaccagcaggaagaaactcaccggggcgataagcggcagcgcaatcttaaagaagcggcgaatcggccctgcaccgtcgatggctgcggcttcgatcaacgaacggggaatggattgcagcgcggcatagaagaacaggaagttgtagctgatttgcttccatactgaggcaaacaccaccagaaacattgcctgaccgctgttttgcgcgtggttccagtcgtagccgaactccgcgagaaaatgggtgatcagcccgcgaccggggttaaacaggaagatccacaatacggcggcaacggcgggagccacggcgtaaggcagcaacattaaggtttgatagaaacggctgccgcgcacgatgtactccaccagcgccgcgaagaacagcgacaccagcaaaccgctgacggtgacaaaggtgctgaattttatcgtcgtccagaaggagtcgagatagtagctgtcatgaaacagcgcgacgaagttatccaggccgacaaactggctggagaaaccaaacggatcgacgctttgtagcgagtaccacaacgcttcgcccgcaggccagataaaaaagataacggtgatgatgagctgcggcgcgaccagcagataaggcagccagcgcgagcggaacaccggacgggatgatgacattacggttaattcctgaactgtgccggatgcgcttcgcttatccggcctacacgcgatgccaggtcagataagcgaaacgcatccgacattacactgattaagacttcgtcgatttctcaaagcggcgcagcaactgatttccacgctcaacggcggtatccagtgcctgctgtggtgtcttcttaccggtccacacgctctccagctcttcatccacaatcacgcggatctgcggcatgttgcccagacgcagccctttggtgaacggcaacggcggcttattcagcatctgacgcgtcgcggtatccgcccctgggtttttctcataaaagccctgctcacgggtcaggtcatacgctgctttggtgattggcagataaccggttttctgatgccactcggcagcgttttctggcttcgcgaggaagtcgaggaacttcgccacgccggtatacgtttctttatttttgccctgcatcacccacaggctggccccgccgataatggcgttttgcggtgcatctttcgcatcggcgtcgtaaggcatcatgcctacgccatagttaaatttggcgtactcacgaatattagcgagagaaccggaagaggcggtggtcatcgcgcaatcaccgttatagaacttctcggtggattcatccttacgaccgacgtagctgaagtcgcccttcttgttcatctcctcgagcatggcgatgtgtttcacctgctccggcttgttgaactccagcaccgcgtccgtgccgtcaaagccgttgtttttgctggcaaacggcagaccgttccaggcgctaaagttttccagttggatccagccctgccagccgctggcgtagccgcacttcataccggaggctttcagtttcgcggcatagtccgccagatcctgccaggttttcggcggttgttccgggtctaatcctgctttcttgaaggcgtctttgttgtaatagagaacgggggtcgagctgttgaatggctgggagagtaagtggcccgttttgctgtcggagtagtaaccggaaaccgtcggcacaaactgcgactcatcgaattgaatccccgcctctttaaacacgtcatataccggtttaatggctttcgatgccatcatggtggcggtgccaacttcataaacctgcaaaatagccggagcgttgccggtacgaaatgcggcaatccccgcgcttaaattctgttcgtagttgcctttataggtcggtacaattttgtaatccggattttcggcgttaaaacgttgggccagagaatccacctctttacccagttccccttccatagaatgccagaacggaatggtcgtcactgcctgtgcattccccattaacgccagtccgagcgccagtgctgaagctgtataatgtaacggtttcatcgtttatctctcttgttgtaccgaatgcgcgaattcacgcgttttatgctcgcggggtaacatgacatgctcgaattacagaaaaataacttttttgttacatttgtaagatagtaaggtgtcagaaagatgacaaggcggtgacggcgtgggtgagggaaaatgggagatggggcacggataagcggaaaatagaaggtctgaatcaaactctacagattactcatcgtttcatgccggatgcggcgtaaacgccttatccggcctacaagatcgtgcaaattcaatatattgcaactcacccagtaggcctgataagcgcagcgcatcaggcaattttacatttgtcacctgtctcaaaggagtcttttgactcctcatcaatcaacgtgttattacccgcctaaatacgcacttctcactgcttcgttcgccagcagcgcgtcgccggtatcggagagcaccacatggccgttttccagcacgtagccgcgatccgccagctttagcgcctggttggcgttctgctcgacgaggaagatagtcatcccctgctcgcgcagctgctcgatggtgtcgaaaatttgctggatgataatcggcgcaagaccgagcgatggctcatcaagtagcagcaaacgcgggttgctcatcagcgcgcgaccaatcgccagcatttgttgctcaccgccggacatggtgcctgcccgctgaacacggcgctcatgcagacgtggaaacagttcatacacccactttatgcgctcctggaactggtcgcgttcggcaaaaaagccgcccatcgccaggttctcttccaccgtcatccgcgagaagacgcgacgcccttccgggacaatcgctaccgcttcgcgcatgattttcgccgtctgccagtcggtaatgtctttatcatcaaacacaattcgcccgctggtggcgcgcgggtcgccgcataatgtgccgagcaaggtggttttccccgcgccattcgcgccaataagggtgacaatttcgccctgattgatatgcaggctcacctcatgcagcgcctggattttgccgtagtgggcgctgactttgtcaaaggacaacatgactttttccatcttatgcctcacctaaataggcacggatcacgtccgggttattacggatctgctccggcgtaccgtttgccagtggcgtcccctgattgaccacataaattcggtctgaaatccccatcaccagcttcatatcgtgttcaatcaacaagatagtggtgttgtgatgattgcgcagttcggcaatcagctcatccagctctttggtttcttttgggttaagacctgccgccggttcgtcgagcattaaaatctccggctgcgtcaccatgcagcgggcaatctccagacggcgttggtcaccataggccaggttactcgcctgacggttggcgtgttccagcaaaccaatgcgctcaagccaggtggcggcgcggtcgagcgcttcgctctgggcgcgacggaaagaaggcgttttcaacaggccagagaacagcccggttttcagttgttgatgctgcgccaccagcaggttttcaatcaccgtcatttcacggaacagacgcacatgctggaaggtacgcaccacgcccatgcgggcaatttgctgccccggtaaaccttccagatgctgatcacgcagtaaaatagtgccgccggtgggtttgtagaatccggtcaggcagttaaaaaccgtggtttttccggcaccgttagggccgattaacgagacgatctcctgcgggtacagttcaagattgacgttgttcaccgccagcaagccgccgaagcgcatcatcagaccgttaacagataataatggctgactcatgcctgctctcctttcgctgcgccgttttcagcttcagttgcgggcgcgtcatgggcagcaagccctgcggacgccagatcatcatcagcaccatcaaaccaccgagcattaacatgctgtattcgttgaaatcacgcatcaattcgcgcgataccaccagcaaaattgccgccagaatcaccgcaaactgcgatcccataccgccgagcaccactatcgccagtacaaacgccgattcagcaaaggtgaaggattccgggctgacaaagccctggcgcgcagcaaacagcgttccggcaaaaccggcaaacgcggcacttatggtaaaggcagtcagcttgatacgacgcgggcttaagcccagcgaacggcaggcgatctcgtcttcacgcaacgcttcccacgcacgccccagcggcatccgcagcaggcggttaatgacaaacaggcttagcaccaccagcagcaacgccaccaggtagaggaagatgacacgatcggagggatcgtatttcaggccaaagaaattactgaacgtgtcccagccgccttcacgagcggtacggctgaactcgagtccgaagagtgtcggtttcgggatctgactgattccgttcgggccgccggtaatttcggtgttattgagcagcaatatgcgcacaatttcgccgaaaccgagggtaacgatcgccagatagtcgccgcgcaagcgaagcaccgggaagccgagcaggaagccggccgccgctgccattaacccggcaatcggcagacaggtccagaagcccaggccgtaatagtgattgagcagcgcaaaagtgtaagcgccgatggcgtaaaagccgccgtaccccagcaccagcagaccagaaagaccaacaaccacgttcagcccgaggccgaggataatgtagatcatggtcagggtggcgatatccaccgtcccacgcgacaccataaacggccacgccaccgcaagcaccagcagcgccacgaggaatagtttctgcttcaccgtggagccatcaatcgcgggcagaataaacttcggtccggaaacgctttttagccctttctggaaagccggtcgcaaaagctggaagaaaaagaccaccgccgtgccgataaacacccactgccaacggacatccgaagcgctgtcgaccaccagtttggtgccatccagctccagttgcacgcccataaagacgcccgccaggacaaaaaacatcgcggcagagagcagcgccattgcaatatgcatcggtttcatactttctctacctccgggcgacccagaataccggtcggcatcaccagcagcaccagaatcagcagggcaaatgaaaccacatccttatattccgtactcagataggcagaagagagcgcctccgcaatccccaggatcagcccaccaatcatcgcccctggaatgctgccaatcccaccgagcaccgcagcggtaaaggctttcatcccggccataaagccgatgtaggggttaattacgccgtagaactgaccgagcagcacacccgccaccgccgccatcgccgcgccaatcacaaaggtcagcgcaatcacccggtcggtgttaatgccaagcagactcgccattttcagatcttccgcgcaggcacgacaggcgcgccccatacgggaatagcgaatgaaaatcgtcagcgccagcatggcgaggaaggtgacaatccagatcaccgcctgcatggtggtaatagaggcagagaagttttcgctatggcccaccacccactgaccgttaaacaggctgggcagcgccacatcgcgcgaaccttcggtcaggctgacgtagttttgcaggaagatggacataccgattgcggaaataagcgcaatcaggcgcttagaattacgcaccgggcggtaagccacccgttcgatactccagccgtaggcgctggcaatgacgattgcgccgacgaatcccgccgccaccagcagccagccggtatcaatgcccatcatcatcagcgcggcgatgatcataaatgagacgtagctgccaatcatataaacctcgccgtgggcgaagttgatcatgccgataatgccgtaaaccatggtgtagccgatggctatcagcgcgtaggtactgcccagcgtgacgccgttaaacatctgctgcaagaaatacaaaaactgctcagacataaggtaacctttctaaacccgcccgcattttacgggcggtgggatgatcacttggctgccgtggatgaaccgtcggcgtgccactggaagacaccaaaatcaaatcccttaagatcgcctttttcatcccagttcagcggcccaatcacggtgtttgcaccgttagcttttaaatctttcaccagcgccagcggctcatcgctgccagtacgctcaagggcagtcgccagagattgcaccgccgcgtaggtgatccagacataaggcccggacggatctttcttgtctgctttcagcgcatcaacgatgccctggtttgccggatcctggtcatagcgttttggcatagtgaccaacatgccttcggcagcatcaccggcaatattcgacaatgatgcgttacccacaccttccggccccataaactgagttttcaggccaacggaacgggcctggcgcagcatctgccccatttccgggtagtaaccgccgtagtaaacgaagtcgatgttttcttttttcaggcgggcgatcagcgcggagaaatctttctccccggcggtaataccgtcgaagaagacgacgttggcgttagccgctttcagcccgtcctgcaccgaacgcgccagcccttcgccatactgttgtttgtcgtgaatgatggcgatgcgctggggcttcaccgtctcaagaatgtattttgccgccgttggcccctgggaagagtccagcccggcagtacgcataatgtgttgataaccgcgttgggtcagctccgggttggtcgctcccggcgagatcatcagaataccttcgtcttcgtagatatctgatgcaggttgggtagaagaagaacacagatgaccaataacgtatttaatgccgtcgttaacgattttgttggcgaccgcaacggcttgtttcgggtcgcaggcgtcgtcatattccacgcccaccagcttatcgcctttaattccccctttggcattaatgtctttaatcgcctgacgcgcgccgttaaattccatatcgccccactgggcaatcgggccggacatcgcgccgacaacggcgactttaatatcgtcagccatagcggtgtgtgaaattgccagtgcaatcatccctgcgatgatagttttcgcattccgtttcatagtcaaaaatccccattcgtgatgttgtgttgctttgtttttatgtgttaacaaatcagactgttctttttttatactgcactgtttttgcctgtctgattaagggtttagcgcagtattttgtgataatagtgattaaaatccctatttttcagtcgattaagaacagataatattctgaatttattgatagataaacagaaaaaagtgcctttgtcagcataaaataacggcacaaagggcggaataattcactatcattcaggggattatgctgggtatttttcattctataatgttttaactttgtaattattgctgttaaaaaattaatcacctgccaaaagaaataaaaaagagaaagcctccgattaaattatttcgctacactggttccacttttgtgatttacacgggttacccatgaagctgaccatcattcgattagaaaactttagcgaccaggaccggattgacctgcaaaagatctggccggagtattccccttcctctttacaggttgacgataaccaccgcatctacgccgcgcgttttaacgagcgcctgctagcggccgtgcgggtaaccttaagcggcaccgagggagcactggattccctgcgcgtgcgggaagtcacccgccgtcgcggtgtggggcaatatctgctggaagaggttttgcgtaacaatcctgccgtttcatgctggtggatggcggatgcaggcgtggaagatcgcggtgtgatgacggcgtttatgcaggcgctggggtttacggcgcaacagggcggctgggagaagcgttaatcgtcaagttgatttcaaaagtgatgaccaacgagaaattgcctgatgcgctacgcttatcaggcctacaatgtgtgttgcaatttactgatttctttggatcttgtaggccggataaggcgtttacgccgcatccggcatgaagcaacgtactcgatattagcaatttggcggcaacccaaagttgccgattaatgattacttcgcatcggtcgccgtgccgttggcgtgccagtcaaatacgccgaactcaaagcctttcagatcacctttctcatcccacgtcagcggacccatcacggtatccacggagttcgctttcaggtatttggcgatctcagccggatcgtcagactgattcaggcccgcctgcaaagattgcagcgcggcgtaggtggtccaaacgaatgcgccgcttgggtcctgttttttcgctttgatggcgtcaacaatgggtttgttcgccggaacctgatcgtagttcttcggcttggtcaccagcagcccttccgctgattcgcccgcaatgttagacagcgaaacgttagccacaccttccggccccataaactgagttttcagccctgccgcgcgtgcctgacgcaggatttgccccatttccgggtgataaccgccgtagtaaacgaagtcgatattctcttttttcagacgggccaccagcgttgagaaatctttttccccggcggtgataccatcaaagaacaccacgttagcattgcctttcttcaggccgtcctgcaccgctcgcgccagaccttcgccgtattgctgtttgtcgtgaacgatagcaatacgctgcggtttcactttctcaagaatatatttcgccgccgtcggcccctggtcggagtccaggccggtggtgcgcaggatcagctgatagccacgggcggtcagctccggcgcggttgccgctggggtgatcattaaaatgccttcgtcttcgtagatgtcagacgcaggctgcgttgatgaagaacagaggtgaccaatcacatatttaatgccgtcgttaacgactttgttcgccaccgcaaccgcctgtttcgggtcacaggcatcgtcatattttacgatttgcagtttgttgcctttaatgccgcctttagcgttgatatccgcaaccgcctgctctgcgccggtaaactcctggtcaccgtactgcgcaaccggaccggacattgcgcccacgaccgcgactttaatatcttctgccagagccatattgctgaatgccagcgcgatacatcctgccagtaacgctttaccctttatgttcatcctgagaatccccattcttctggttattacgtgtgttgtggtgttgtgattcagcactttatttcgttttatgcatgactacccgtgctttagcagcatactctgctaaaacataccccatttttatgatattggaatagctattttgacagtttattaacaatctgcgtggggattgacgttttgccggagggggaattgattattgtagaggcccaaaaaacaaaaaccccggactctcatccagggttctctgcttaatagcggaaattacgcttcaatagcggcgcgaagttttttcatcgcgttcttttccagttggcgcacacgttcagcggaaacaccgtaacggtcagccagttcctgcaacgtggacttgttgtcttcgtccagccagcgcgcgcggatgatgtcctggctgcgttcgtccagaccttgcatcgcgtcggtcagacggtttgccgcctgctcttcccagttatcatcttcgatgccgtcggcaaagttagatgatttatcctgcagatagagcaccggtgccatcggctggctgtcggaatcgtcgtcggaagacaggtcaaaggtcatgtcctgtgccgccatacgtgattccatctcacgaacgtctttgctggttacgcccagttcacgggccaccatttcgacttcatcctggttaaaccagcccagacgctgcttagttttacgcaggttgaagaacagtttgcgctgcgctttggtggtcgcaactttgacgatacgccagttacgcagaacgtattcgtggatctctgctttgatccagtgaacggcgaaggagaccaggcgcacacccacttccgggttgaaacggcgcactgctttcatcaggccgatgttaccttcctgaatcaaatccgcctgtggcaggccatagcccgcataattacgagcaatatgaacaacaaaccgcaggtgagacaggatcagcgttttagctgcttccagatcgccatggtaatgcagcttttcagccagcgcccgctcctcgtcagccgacaacatcggccacgcgttagctgcccggatgtaggaatccaggttgccaactggggctaaagctaaactttgcattttgtcagtcattcaaatcctctcaatcgatatcttctggcgcttcagtggtagcaacaactgtgccagagcttaagagcaacgaggttatcattcactgttttatcagaccgtgattttatccacaagttcaatgcaagcttgtgaataaattacgcacaaaatgtgacatagagatgaaataccgggaagagacaacgggatctctttccctgctacggaacccattgcagggaaagagtataacacgcttttattattcaggcgtaaagtggcgtaaatgttgtaccgtggcaagccacgctgccacccagccaatcatcgagcataccagcagcaatagcaggcattcatcgaacgataaaccattgatatcaaacttcgttccgaaaacctgtgccacttctgcaaccgccgatgacaaacgcagtaccagaatttctgacaaaattaatgacagcaatgcgccagaaaatcccagcaatgcgcctccgtacaggaacgggcgcaggatgaaaccatccgtcgcaccaatcagtttctgcacgttaatggagtcacggcgagcaaagatgctcagacgcacactgttgccgatgacgaggaacactgctgccaccatcaacacgccgatcatcgcggaaacgcgcccgaccagcccggtcaacgccgccagacgggcaaaccagctgtcatccatccgcacttcgtcaatgccgttaatctgggtgatacgatcacgcagcgtattcagtgattccgtcccctgaaaatcgagtttcgggatcaccaccgccactgccggaagcgggttttcttccagcatatccagcgcaccaccaaaaccagaccagttacggaactcgcccagtgcgtcttcacgagaaagatagttcactttctccacgccctgctcggcctgtagctgtgctaccacgcctgctgcggcgtcatcgtccagcgttttttgcaagtaaacagtgatttgcggtgacggataatattgcgtcgccgcctggttaacgtttttgtacaccatataacagacgctgggcagcgtcagggagatggcgataaccatcaccgttaaaaacgtggcgaacggtttgcttttcagatcctgcaatgcgccgtggaaggcatagcgcacctgttcgttgaaaacgttggttttgcgatttaccggttttggcgaggatttcgcgcgttttggcgcgttacgaccgccgtcgccagagccgccgaccgatttacggaagcgatccagacgcccgccaaactgccgaatatgattgattgcatcgcgcttattcatggcccacgcctccatgcaagtgaccatcgctcagggtgagcatgcgataggaacgccgcgagatcaggttgatgtcgtgcgttgccatcaatacggttaccccaacgcggttaaactcttcaaacagacgtagaatcccttccgacaacgcgtcgtccaggttaccagtcggttcgtccgccagcagtaccgcgggcttgttcaccaccgcgcgggcaatgccaacacgctgttgttcaccgccagaaagctgaatagggaagttcttcgctttgtccagtagcccgactttatccagtgccgccgacacccggcgacgaatatcgtcaccgctggcaccggcgataatcagcgggattgccacgttatcgtagacagtacggtccatcagtagatggtgatcctggaaaatcatgccaatctggcggcgcagaaacggaacttcacggtttttcagacgcgtgatgtcatggccgctaaaccagattttcccggcgctgggccgctcaatcccacagatcagcttcaggagggtacttttccctgcgccggaatgaccggtcagaaacgccatctcacccggctgcatatggaacgtaacgccctgcagcgcctgtctcccaccgagataagccttgctgacatgttcaaagcgaatcattgttaatcctctcgggcaaaaagtgcctctataaagtcgtccgccttaaacggacgcaaatcctcaatacgttcgccgacaccaatgtagcggatagggataccaaactggtcagccaccgagaaaattaccccgcctttcgccgtgccgtccagtttcgttagcgtgatgccggttaagccaacagcttcatggaacagtttggcctggcttaccgcgttctgcccggtgctggcatcgatagtcagcataacttcatgcggcgcttcaacgtcgagtttcttcatcacgcggacgattttcttcaactcttccatcaggtgcgatttgttctgcaggcgtccggcggtatcggcaatcagtacgtcaacattacgcgccttcgcagcctgaatggcgtcgaagataaccgaagcggaatccgcaccagtatgctgggcaatcaccgggatattgttacgctgaccccagacctgaagctgttcaaccgcagctgcacggaaagtatcgcccgccgccagcatcaccgatttaccctgctgctcaaactgacgcgccagcttaccaatcgtcgtggttttacccacaccgttgacgcccaccatcaggatcacgaacggcgttttaccttcaacattcagcggctcatcgactttcgccagaatctcgcccatctcttctttcagcaggccatagagcgcctcggcatcacgaagctgcttgcgggatgcgccttccgtcagattggtgataattttacgtgtggtttccacgcccacatcggcgatcaacagctgttcttccagctcctcaaacagatcatcgtcgatttttttaccgcggaacaggctgataaatccggaaccgagattttctttggtttttaacaggctgcgtttcaggcgcgcgaagaaaccttctttggtcggtttttcctgctcctgagcgatttcttccaccggctgctcttctaccggaggaaccaccatcaccgcctcttctgccgcttcggcagccagcgcctgtgcttccagctcttcgtcggtgatttcttctttagccgcttcttcttccgccgcttcgacaatctctacggtttccgcttcagcctgccactcttctggcgaaacctcttcggcgttgacgtcttccggcaacggcagctcttcacgttcgatagccactggctccgccgtttcttctacgaccggttccggctgtgcaacgacttccgcttcaggctgcgctttttcactttcagcaacctgttcagtgacttccacaacgtcggcagcaaaagtttccgcctcggcttcagtatgcgcctgcggttgctcttcgacggcttgttcagaagccttcgcaggctcttgcgcctgaacgatttcttctacaaccggttgttcattctgaacttctgtctctttttccggggtctgctctttttgaccaaagcccagccaggaaaaaaagccacgttttttttctttcgccatttgcgactacactcctcgctgttgcttcatggcacagcgttaacgctatgtacatagcagctaaaaaaatgatgaaatagtctatcacttaacttaattcacatcaccgcctgcaagtatgtgttatctggcggattgagcaatttatcatgaaaaaaccgaatcattccggcagcggccaaatccgcattattggcgggcagtggcgaggccgtaaactcccggttcctgatagcccaggtctgcgccccaccaccgaccgcgtacgcgaaacgttgtttaactggctggctccggtcattgttgacgcccaatgtctggattgcttcgccgggagcggcgcgctggggctggaagcgttatcgcgctacgctgcgggggccacgttgattgagatggatcgcgcagtttctcagcagttaattaagaatctggcgacactaaaagcaggcaatgcacgcgtggtgaacagcaacgcaatgtcattcctggcgcaaaaaggcacaccgcataatatcgtgtttgtcgatccaccgttccgccgtggcttgttagaagagacgataaatttactggaagataacggctggctggctgacgaagccctgatttatgtcgaaagcgaagtcgaaaacggtctgcccactgttccggcaaactggtcattacatcgggaaaaagtggcgggtcaggtggcttatcggctgtatcaacgcgaagcacaaggagaaagtgatgctgattaatattggtcgtttgttaatgctctgcgtttggggatttttaatcctcaatctggtgcatcccttcccgcgcccgctgaatattttcgttaacgtggcgctgatttttaccgtgctgatgcatggtatgcaactggcgctattgaaatccactttaccgaaagatggcccgcagatgaccaccgccgaaaaggtgcggattttccttttcggcgtgtttgaactgctggtctggcagaagaaatttaaagttaaaaaataaccttattgttcgcctacaaagctgacaaagcgcgttcctttatagctcagcgtacctttatcgcccactgtcagggcgtggtactgctgggcgtcgaggcgaaacgtctgctccattcctccgctttgcggtttgaagcttgcctcatagcgcatactggtgcctgccggagtcacttcctgctggcgcgaacggcgatcgttaatcggtttttcccgcttgttgctcaccaccaccagcttttgctggagcggagccatatcattatcagctttttcccgtcgctgttgcataaaacgaaacgatgcggcgacgacaattaagccaatgataacaataaagaaaagaggtggtttgctcatctttatccctcatcggaaaatgcggaaataagcataccctgccagttatggtgttgtcatccgtccaccctcgccactaaactggaagcaagaccgtaggcattccgcttacgaaaaaataacgaattcaaggaactaagatgctttggtcgtttatcgctgtctgtctttccgcatggctatctgtggatgcatcgtatcgtgggccaacctggcaacgctgggtgtttaaaccgttaacccttcttctcctgctgttactggcctggcaagcgccgatgttcgacgccattagctatctggtgctggcagggctgtgcgcctcactgctgggcgatgcgctaaccctgttgccacgtcaacgtctgatgtacgccatcggcgcgtttttcctctcgcacctgctgtacaccatctatttcgccagtcagatgacgctctctttcttctggcctctgccactggtgttgctggttctgggcgcgctgttactggcgattatctggacgcggctggaagagtatcgttggcctatctgcacgtttatcggcatgacgctggtgatggtgtggctggcaggtgaactgtggttcttccgtccgaccgctccggcactctctgcgtttgttggcgcttcattgctgtttatcagtaactttgtctggctgggtagccactatcgccgccgcttccgggcagataacgcgattgctgcggcctgctactttgccggtcatttcctcatcgtccgctcgctgtatctctgataaaacttgactctggagtcgactcagagtgtatccttcggttaatgagaaaaaacttaaccggaggatgccatgtcgactcctgacaatcacggcaagaaagcccctcaatttgctgcgttcaaaccgctaaccacggtacagaacgccaacgactgttgctgcgacggcgcatgttccagctcgccaacgctctctgaaaacgtctccggcacccgctatagctggaaagtcagcggcatggactgcgccgcctgtgcgcgcaaggtagaaaatgccgtgcgccagcttgcaggtgtgaatcaggtgcaggtactgttcgccaccgaaaaactggtggtcgatgccgacaatgacatccgtgcccaggttgaatctgcggtgcaaaaagcgggctattccctgcgcgatgagcaggccgccgacgagccacaagcatcgcgcctgaaagagaatctgccgctgattacgctaatcgtgatgatggcaatcagctggggtctggagcaatttaatcatccgtttgggcaactggcgtttatcgcgaccacgctggttgggctgtacccgattgctcgtcaggcattacggctgatcaaatccggcagctacttcgccattgaaaccttaatgagcgtagccgctattggtgcactgtttattggcgcaacggctgaagctgcgatggtgttgctgctgtttttgattggtgaacgactggaaggctgggccgccagccgcgcgcgtcagggcgttagcgcgttaatggcgctgaaaccagaaaccgccacgcgcctgcgtaacggtgagcgggaagaggtggcgattaacagcctgcggcctggcgatgtgattgaagtcgccgcaggtgggcgtttgcctgccgacggtaaactgctctcaccgtttgccagttttgatgaaagcgccctgaccggagaatccattccggtggagcgcgcgacgggcgataaagttcctgcaggagccaccagcgtagaccgtctggtaacgctggaagtgctgtcagaaccgggtgccagcgccattgaccggattctgaaactgatcgaagaagccgaagagcgccgcgcccccattgagcggtttatcgaccgtttcagccgtatttatacgccagcgattatggccgtcgccctgctggtgacgctggtgccaccgctgctgtttgccgccagctggcaggagtggatttataaagggctgacgctgctgctgattggctgcccgtgtgcgttagttatctccacgcctgcggcgattacctccgggctggcggcggcagcgcgtcgtggggcgttgattaaaggcggagcggcgctggaacagctgggtcgtgttactcaggtggcgtttgataaaaccggtacgctgaccgtcggtaaaccgcgcgttaccgcgattcatccggcaacgggtattagtgaatctgaactgctgacactggcggcggcggtcgagcaaggcgcgacgcatccactggcgcaggccatcgtacgcgaagcacaggttgctgaactcgccattcccaccgccgaatcacagcgggcgctggtcgggtctggcattgaagcgcaggttaacggtgagcgcgtattgatttgcgctgccgggaaacatcccgctgatgcatttgctggtttgattaatgaactggaaagcgccgggcaaacggttgtgctggtagtacgtaatgatgacgtgctgggtatcattgcattgcaggataccctgcgcgccgacgcagcaactgccatcagtgaactgaacgcgctgggggttaaaggagtgatcctcaccggcgataatccacgcgcagcggcggcaattgccggggagctggggctggagtttaaagcgggcctattgccggaagataaagtcaaagcggtgaccaagctgaatcaacatgcgcccctggcgatggtcggtgatggtattaacgacgcgccagcgatgaaagctgccgccattgggattgcaatgggcagtggcacagacgtggcgctggaaaccgccgacgcagcattaacccataaccacctgcgcggcctggtgcaaatgattgaactggcacgcgccactcacgccaatatccgccagaacatcactattgcgctggggctgaaagggatcttcctcgtcaccacgctgctagggatgaccggactatggctggcggtgctggcagataccggtgcgaccgtgctggtaacagcgaatgcgttaagattgttgcgcaggagataaggcaaaccgatcgcaacattgagcgcgatcggtcccctcgctcctctggggagagggttagggtgaggggaaaaggcggcatcgaagccaatctttccccatcaaccgcctttacgaatcaaataacgataaggcagtccatccgtctctttcgcaaccagttcgtgttccataaaggtacaaaacccaggaatatcgcgggtcgtcgccggatcgtcggcgataatcagtaaagtttcgccaggctgcatattgcgcacggttttgcgcaccatcatcaccggttccgggcagcgcaggccaagcgcgtcgagtgtgtggtcagggctggaaaagagatcggtcattttcttctcatcacttaaaaaaacggcgctagtttacgccctgtgagtccgtaagcaaaccaggttaacgattgcgtgaaaattaaccattgcattgtcaacgtaaagcagtatcatgcggcggctcgaaaaaagggtaagcacgttattatgttaagataacagacgtgtcgtacgtattgggttccctcaccccaatggttaatcaaaaaggtacaatatgaacgttttctcgcaaactcaacgctataaggcgttgttctggttatcgttatttcatctgctggtgatcacctccagtaactatctggtccagcttccggtctccatttttggttttcataccacctggggcgcgtttagttttccgtttatctttctcgcgaccgacctgaccgtgcgtatttttggcgcaccgctggcccgacgcattatcttcgcggtaatgatccctgcgttattaatctcctatgtcatctcgtcgctgttctatatgggttcatggcagggattcggcgcactcgcccacttcaacctgtttgtcgcccgtatcgccaccgccagtttcatggcctacgcgctggggcaaatcctcgacgtgcacgtttttaaccgcctgcgtcaaagtcgccgctggtggctggcaccgacagcatccacactgttcggtaacgtcagtgacacgctggcctttttcttcattgccttctggcgtagcccggatgcctttatggctgaacactggatggaaatcgcgctggtcgattactgtttcaaagtgttaatcagtatcgttttcttcctgccaatgtatggcgtattactcaatatgctgttgaaaagactggcagataaatccgaaatcaacgctttgcaggcgagttaaaggttcgttatcagagttgtgataagatggatgaatgagccgttatggccgtttatcgaaaggaagaagtcaatgcgcaatctggttaaatatgtcggaattggcctgctggttatggggcttgcggcctgtgatgataaagacactaacgctacggcgcagggttcggtcgcggaaagtaacgctaccgggaatcccgtcaacctgcttgatggcaagttaagtttctcgctgccagcggatatgaccgaccagagcggtaagctgggaacgcaggccaataacatgcatgtctggtccgacgccaccgggcagaaagcagtcatcgtcatcatgggcgatgatccgaaagaagatctggcggtgctggcgaagcgtctggaagatcagcaacgtagccgcgatccgcagctgcaagtggtaaccaataaagccattgagctgaaaggtcacaaaatgcagcagttagacagtattatctccgcgaaaggccagacggcgtactcttccgttattctgggtaacgtgggtaatcaactgctgaccatgcaaattacgctgcccgctgacgatcagcaaaaagcgcagaccaccgcagaaaacatcattaatacgctggttattcagtaagttttaagatgatgaggcggcctcagggacgtgttccggaggccgttttttaatcgccacgtcagtaataacgcgattgcgaccagtcccgccgccgccagataaatcaccggtacgcccgcccagctcatcaccagcccagccagtggtccagtcacgccaagcgataaatccataaatacggtgtaagttgccagcgccgccccctgattttgctgcggaaccgcttttaccgccactacacccaatgccgggaacaccagcgaaaaccctgcccccgccagtaagacgccgattttcgccatccacggcatagtcgccacgccaaccagtagcaggccgattatctcaacgctaaagcaaatcatcgctacgtttaagccgccgatacggttaatgccgttagggaataacaaacgcgtaccgacaaacgcacagctaaacagcgtcagcgcgaaagccgcaccgtcccaacctttagcgtcataaaacagcgtgataaaggtggcgatgacgccaaatccggcggaagccagtgccagtgccataccgtacagccagacgcgcccaagcaccgcgcgaaacggcagcggtttgcctttactggcttttaccgtcggacgcgggatcgccaacaaaatggccaccagcgccacgcccataatgattaacgctaacgcctgcaagccgccccagtgataaaacacgacgcctaacggcgcacccatcgccatcgccccgtaagtgacaatgccgttccacgaaatcactcgcccgatatgcagcgagccaaccacgccaacgccccacagggtcgatcccgttccggcaaaactttgcccaatcccaaggatcacgcgtcccaggcaaagtaataacaggctgatgacgggcagactggcggttaatcctgccgtcagatatcccagaccgctcaaaaagcagccgcataaaccgaagacgacaatctttttggggcccagcaaatcggcgtaacgtccggcatgaggacggctcagcaaggtggcgaaatattgcaggctgataaccaatcctgcccagaaagcgctaaagcccatcacatcatggacatagcccggtaatacagcgagcggcaacccgatggtgaggtagctggcgaagttaaacatgacaatggagacaatgcgcaaattcaggcgcaatccgtttagcgcgggttcggctacgggttcgggcatgaggatcaccacatttttacaacagtgtttcatttttaccacgtgctgacgtgaaaatcagcagtaagaatcagaatattgctggcgtgactcccgctacacttaatacaaaaagtcacaaggaagccccaatggaaacccctcaacccgataaaacgggcatgcacattctgctcaagctggcctcgctggtagtgatcctcgcgggcattcacgcagcggcagatatcattgtgcagctgttactggcgctgttttttgccatcgtcctcaacccgctcgttacctggtttattcgtcggggagtacaacgccccgttgccattacgattgtagtggtggtgatgctgatcgcactaaccgcgctggtcggcgtactggcggcatcgtttaacgaatttatctctatgctgccgaagtttaataaggagctgacgcgcaaactttttaaattgcaggagatgttgccttttcttaatttgcatatgtcgccggagcgaatgctgcagcggatggactcggaaaaagtggttaccttcaccacagcgctaatgaccgggctttccggggcaatggcgagcgtgcttttgctggtgatgaccgtagtttttatgctgtttgaagtgcgccacgtcccttacaaaatgcgttttgcgctgaataatccacagattcacatcgcgggattacaccgcgcacttaaaggcgtttcgcactatcttgcattgaagacgctactcagtttatggacaggtgtcatcgtctggctggggctggagctgatgggggtacagtttgcgctgatgtgggcagtactggcgtttttgcttaactacgtgcccaatatcggcgcggtaatttccgccgtaccgccaatgattcaggtgctgctgtttaatggtatttacgaatgtattctggtcggcgcattgtttttagttgtccatatggtcatcggcaatattttagagccacggatgatgggccatcgcctggggatgtccaccatggtggtatttctttcattgttaatctggggatggctgctcggcccggtagggatgctactttcggtgccattaaccagcgtgtgtaaaatctggatggaaaccaccaaaggcggtagcaaactggcgattttactggggccaggcagaccgaaaagtcggttaccgggatgaggcgacaagtgatacgatacgcactttcattttccattaaacgttggccctgatatgtatcggatagttctggggaaagtttcgaccttaagcgcagctccactgccaccgggtttacgcgagcaagcaccgcaaggtccacgacgcgaacgctggctggcggggcgtgcattgctttcgcacacgctttccccgctaccggagatcatctatggcgaacaaggcaaacctgcatttgcgccggaaacgccgctatggttcaacttaagccatagcggtgacgatatcgccctgctgttgagtgatgaaggcgaagtcggctgcgatatcgaagtgattcgcccgcgcgccaactggcgctggctggcgaacgccgtattcagcctcggggaacacgctgagatggacgccgtgcatcctgatcagcaactggaaatgttctggcgcatctggacgcgcaaagaagccatcgttaaacagcgtggcggcagcgcctggcaaatcgtcagcgtagacagcacctatcactcctcgctgtcagtcagccattgtcagcttgaaaatttaagcctggcgatctgcacccctactccctttacgctcaccgccgacagtgtgcaatggatcgattcagttaactgatccgcccacccgactgcccatctattgatccagaacaggtaatcagtatgacgaatacttaaaatcgtcatacttatttccgccatctattttaatccattggggttaccatgctctccacactccgccgcactctatttgcgctgctggcttgtgcgtcttttatcgtccatgccgctgcaccagatgaaatcaccaccgcctggccggtgaatgtcgggccactaaacccgcacctttacacgcctaaccagatgttcgcccagagcatggtttatgaaccattggtgaaatatcaggcagacggttcggtgatcccgtggctggcaaaaagctggactcattcagaagatggtaaaacctggaccttcaccctgcgtgatgacgtgaaattctccaacggtgaaccgttcgatgccgaggcggcggcagaaaacttccgcgcagtgctcgataaccgtcaacgtcacgcctggctggagctggcaaaccagattgttgatgttaaagcactcagtaaaacagagctgcaaattaccctgaaaagcgcctactatcctttcctgcaagaactggccctgccccgtcctttccgttttatcgctccctcgcagtttaaaaaccatgaaaccatgaacggaattaaagcgccgattggcaccggaccgtggattttgcaggaatcgaaactgaatcagtacgatgtcttcgtccgtaacgaaaactactggggcgaaaagccagcgattaaaaagatcacctttaacgtcatcccggacccgactacccgcgcggtggcgtttgaaactggcgatatcgacctgctgtacggaaacgaagggttattaccgctcgataccttcgcccgctttagccagaatccggcttaccacacccaactgtcacagccgatcgaaaccgtgatgctggcgctcaataccgccaaagctcccaccaacgagctggcagtacgtgaagctcttaattacgcggtaaacaaaaaatcgctgattgataacgcgttgtatggcacccagcaggtcgccgacaccctgtttgccccttctgtgccctacgctaatctcggcctgaaaccgcgccagtacgatccgcagaaagcgaaagcgttgctggaaaaagccggttggacgctgcctgcgggcaaagacatccgcgagaaaaatggtcagccgctgcgcattgaactgtcgttcatcggcaccgatgcgttaagcaaatcgatggcggaaatcattcaggctgatatgcgccagattggcgcagatgtctcgctgattggcgaagaagagagcagtatctatgctcgtcagcgcgacggtcgttttggcatgattttccaccgcacctggggcgcgccatatgatccacacgccttcctcagttcaatgcgcgtaccgtcacacgctgacttccaggcacagcaaggattagccgacaaaccgctgattgataaagagatcggcgaagtgctggcgacccatgacgaaacgcaacgtcaggcgctgtatcgcgacattctgacccgtctgcatgacgaggcggtttatctgcctatcagttacatctcaatgatggtggtatcaaaaccggagctgggtaacatcccctacgcgccgatcgccaccgaaattccgttcgaacagattaaaccggtgaaaccttaatgttgcgttacgtattacgccgctttctgctgctgatcccgatggtgctcgccgcctcggtgatcatttttctgatgctgcgcctcggtaccggcgacccggcgctcgattatctgcgtttatctaacctgccgccgacgccggagatgctggcctctacccgcaccatgctcgggctggatcagccgctgtacgtccagtacggtacctggttgtggaaggcgctgcatcttgactttggtatctcattcgccagccaacgcccggtactggacgatatgctgaacttcctgcccgccacgctggaacttgcaggtgcggcgctggtattaattctgctcacttccgtaccgctcggtatctgggcggcgcgccatcgcgaccgtctgccggatttcgccgtacgtttcatcgcgtttcttggcgtgtcgatgcctaacttctggctggcgtttttactggtgatggcgttttcggtgtatctgcaatggctacccgcgatgggttacggcggctggcagcacatcattttgcctgcggtttccattgcctttatgtcgctggcgattaacgcgcgtttactgcgcgccagtatgctggacgtcgccggtcagcgtcacgtcacctgggcgcgtctgcgcggcctgaacgacaaacagaccgaacgtcgccacatcctgcgcaatgcctcgctgccgatgatcaccgccgtggggatgcatatcggcgaactgattggcgggacgatgattatcgaaaacatctttgcctggccgggcgtcgggcgctatgcggtgtcggcgatttttaaccgtgactatccggtgatccagtgctttacgctgatgatggtggtggtttttgtggtctgtaatttgattgtcgatttgctcaacgccgcgctggacccgcgcattcgtcgtcatgaaggagcgcacgcgtgaactttttcctctcttcccgctggtcggtacgcctggcgctgatcattatcgccctgctggcgctgattgcgctcaccagccagtggtggctgccgtatgacccccaggcgattgatttgccgtcgcgcctgctttcgccggatgcgcagcactggctgggcaccgatcacttaggtcgcgatattttctcgcggctgatggcggcgacccgcgtgtcgctcggttcggtaatggcctgcctgctgctggtgctgacattagggctggttattggcggcagcgccgggttgattggcgggcgcgttgatcaggccaccatgcgcgtcgccgatatgtttatgaccttcccgacctcgattctgtcgttctttatggttggcgtgctcggcaccgggctgaccaacgtaattatcgccatcgccctgtcgcactgggcgtggtatgcacgcatggtgcgcagcctggtgatttcactacgccaacgcgagtttgtgctggcgtcacggctttccggtgcgggccatgtgcgggtgtttgtcgatcatctggcaggcgcggtgatcccttcgctgctggtgctggcaacgctggatatcggccatatgatgctgcacgtcgcggggatgtctttccttggcctcggtgtgaccgcgccgaccgccgaatggggcgtgatgattaacgacgcgcgccagtatatctggacccagccgctgcaaatgttctggccggggctggcgctgtttatcagcgtgatggcctttaacctggtgggtgacgcactgcgcgatcatctggaccctcatctggtgacggagcacgcacactaatgccgcaacagattgaactacgtaatatcgcgctacaggccgcgcagccgctggtacacggtgtatcgttaaccctgcaacgcgggcgcgtgctggcgttagtcggcggtagcggcagcgggaaatcattaacctgcgccgcgacgctgggcattttgcccgctggcgttcgccagacggcgggggaaattttagccgatggcaaaccggtttcgccttgcgccctgcgcggcatcaaaattgccaccatcatgcagaacccgcgcagcgcctttaatccactgcacaccatgcacacccacgcgcgggaaacctgcctggcgttagggaaacccgccgatgacgctacgcttaccgctgccatagaagcggtggggctggaaaacgccgcgcgcgtgctgaagctgtacccgttcgagatgagcggcggcatgttgcagcgcatgatgattgcgatggcggtgctgtgtgaatcaccgtttatcatcgccgatgaaccgaccaccgacctcgacgtggtagcacaggcgcgcatcctcgatctgctggaaagcattatgcaaaaacaagcgccgggaatgctgctggtgacccatgatatgggcgttgtggcgcgtctggcggatgacgtggcggtgatgtctgacggtaagattgtcgaacagggcgatgtagaaacgctgtttaacgcccccaaacatacagtgacgcgcagcctggtttccgctcatctcgccctctacggtatggagctggcatcatgactttacttaacatctccggcctttcccatcactatgcgcacggtggatttaacggaaaacatcaacatcaggcggtgctgaataacgtttccctgaccctgaaaagcggcgaaaccgtcgccctgctgggacgcagcggctgcgggaaaagtaccctcgcgcggttgctggtgggtttagaatcgcccgcgcaggggaatattagctggcgtggcgaaccgctggcgaaactcaatcgcgcccagcgtaaagcgttccgccgcgatattcagatggtatttcaggactccatcagcgccgtgaatccgcgcaaaaccgtgcgcgagatcctgcgtgaaccgatgcgccacctgctatcactgaaaaatccgaacaactggcgcgcgccagcgaaatgctgaaggcggtcgatctcgatgacagcgttctcgacaaacgcccaccgcagttaagcggcggccagctccagcgcgtctgcctggctcgcgcgctggcggtcgaaccgaaactactgattctggatgaagccgtttctaaccttgatctcgtgttacaggcgggcgtcattcgcctgctgaaaaagctacaacaacagtttggcaccgcctgcctgttcatcacccacgacttacgcctggtggaacgcttctgtcagcgggtgatggtgatggacaacggacaaatcgtcgaaacccaggtggtgggagataaattaaccttttcctctgacgccggacgtgtgctacaaaacgcggtattacccgcattccccgtgcgccgtcgcaccacagaaaaggtttaacgcaaatgcaacgagtcaccatcacgcttgatgacgatttactggagacgctggacagcctgagccagcgtcgtggttataacaatcgttccgaagctatccgcgatattctgcgtagcgctctggcccaggaggccactcagcagcacggcacgcaaggtttcgcggtgctctcctatgtgtatgaacacgaaaaacgcgacttagccagccgcattgtctccacccagcaccatcaccacgatctctccgtcgccacgctgcatgtgcatatcaatcacgacgactgtctggaaatcgccgtgctgaaaggtgatatgggcgacgtgcagcattttgccgatgacgttatcgcccagcgcggcgtgcggcacgggcatttgcagtgcttgccgaaggaagattgagttatttctgaaacgaggaaagaaaagatattaactgaacttaatttataaaattaagttcagttgcatagatagatcctgtaaaggcagatattctgcgtaatgtacgccgctaaaatttataaatgattcaaacgctcattcagtgtttcaataatataggtattaacagagacttgttgctgcgcagccgcattattaaggcgttcactcagcgattctggatagcgtaacgtaaaggtcttaatcttttctgtacgcgcatacggctcaatacccgcagctttacaatcctcaagatactctcgcagggaaagttccccttctttttgcagcccctgaatgctgtcagagacaaaatcacaataacctgacaagcccaggaatttgccacgaaatgcattcagttctggcacgtaagtgataacagcaggttgcccggcaatctccatagagtttggcgtcttcagtttgatcatggttttacccctatacttagtaaccagtcacgcacgctttctacagcgcctttatcggtatctggcgacggatgaggccgatggaaacacgcaacgctcatatttagtatgaacttacagcgcgaccccctaccttccttaatttctccgcctaacgctttaaccagagattctatatcagtccatttgattccttgaggtaaaggtgatttaaatagctgatccagtgtgtttttttgtttctttcgtaaagcctgtacctgtgtttacatgacattcccttatgacttcactttatgacatcacagtatgaagtcaagtttcccttccttacgccattgtcccaatcgtcttcctgaatcgcagcagcgcgatggtgaaaaacgcgccgccaattgccatcagcgtcaggaactgcggccagacgatttcgaatccggcaccccggtagagaatggcctgcgcgaggctaacaaagtgtgtcgtcggcatggtcagcataatgtcctgcaccatctgcggcatactttcgcgcggcgtggaaccaccggaaagcatttgcagcggcagcagcaccagaatcaccagcagccccagttgcggcattgaacgcgctatcgtccccataaaaatgccgattgacgtggtggcaaacagactgagcgccacgcccagcataaacagcgggatcgagccttcaatcggtacgcccagcacgccttttaccatcagcaccagcgataatcccgataccaccagcaccaccagccccatcgaccagatcttcgccatcatgatctcaaacggcgttatcggcatcaccagtaaatgttccaccgtgccgtgttcacgctcgcggatcagcgccgatccggtcaatacaatcgccagcatggtaatgttgttgatgatcgccatcaccccgccaaaccacgcgggatcaaggttcgggttaaagcgcatccgggtttccagcgataccaacggttcgctgttatcacggtagcgcgcgacaaagctgttcacttcaccgttgataatattctggatatacccattgccggtaaatgcctggctcatgcgcgtggcatcgacgttcacctgaatatctggctggcgtccggcgaggacatcacgctgaaaattaggcggaatatttatcgcgaaggtatagcgtccggcgtccagtccggcatccatctcatcggcggtgatcatctccggtggcaaaaaccacgggcgatagaagctgttaacgatccggttcgataactgcgattgatccatatcggcaatggcgatcggcgcgaggttcaacgatcctggcgtaacggtcgctgacgaatacaccgacaccgtaaacgagaagacaatcagcgtcagcatcgctttatcaccgagcagactgcgcaactctttgatacccagattaaaaatattgcgtaaatggcgcatcatccctcctgttttttcagcagcaggatacttaagcccatcaccagcgggatggctatcagcaacgggataaaaagttgccacaaatcagtcagatccagcgctttcgagaacgttccgcgggcgatagtcagaaaatgactggtcgggtaaacctcgccgatccaacgtccaggcccttccagcgaagctaccggatcgatcatcccggaaaactgtgtcgccgggatcaacgtgataatcgccgttccgaaaatggcggcaatctggcttttcataaaggtggagatcagcagccccattccggtggcgatgatgatatacagcagcgccgccagggtgagcgtcaggaaactgcctttatgcggtacgccaaacacaaacaccgacaggccgcagagcaggaaaaagttcagcatccccagcgcgatgtacggcagctgtttgccaagcaaaaattcgctacgggtggtgggggtcacgtaaaggttgataatcgaccctagctctttttcccgcaccacgctaagggcgcttagcattgacgggatcatcatcagcagaagcgggatcaccgccggaacaatcgctggcaggctttttacgtccggattatagcgatagcgcgtctcaatgttcatcagcccgctttggctggcgggtgtcgattgtcggctcgccacatcctgaagccaactctggtgcattgcctgcacgtaaccttttaccgtttcggcacgactgggcatcgctccgtcgatccagacgccgagttccacaggcgtaccacgcgcgatatcgcgcccgaaattgggagggatctcaatcgccaccgtgatatcgcccgcacgcatccgacgatcaagctcgtcataactggtgagcggcggctgttcgataaagtaacgggaaccggagagattgagcgtccacgcctggctactgacggtctggtcgcgatcgagcaccgcaaagcgcaggttttccacatccatactgatgccgtaacccattatcagcatcaggatcaccgttcccatcagcgccagcgtcgaacgtaccggatcgcgtcgcagttccagcgcttcgcggcggctgtagctaaacagacggcgcaggctaaatccctgacgcggcgcgtgggtggtgtcgtgtaccacgggcggcgcttcggcttcgttgctctgccctgccgcttcctgcaaataggcgataaatgcctcttccagactggcggctccgcgtttctcaaccagttcctgcggtgtaccgctggcaagcacttttccggcgtgcatcagtgagatgcggtcgcaacgttccgcttcgttcataaagtgggtggagataaaaatggttactttgtcctggcgcgagagatcgaccatcaactgccagaacatatccctagccaccggatcgacaccagaagtaggctcatcgaggattaacatttccgggcgatgaatcaccgccaccgccagcgaaagccgctggcgaatgccgagcggcaatgactccggcagaacatcttcaacgtcgttgagcttaaaacgctcgctcatttcagccactcgcgcgggaatttccgcttccgggatgtgaaacaaacgggcatgtaactcaaggttttgccgcacggtgagttcgttatagagcgaaaacgcctgcgacatatagcccacccgacggcgggtatcgatatcttttggatcaaccggttgcccaaacagccacgcctcaccttcgctggcgggcagcagtccggtaagcattttcatggtggtggatttaccacagccgttcgaaccaagaaaaccaaaaatctccccgcgtggaatgcggaaattgacgtgatcaacggcaacgaaggaaccaaaacgcatggtcagatcgcgcgcttcgatggcaatctctgcattttcaggttgatacggtgggatcactaccgcctgatgcgcctggcgttgcgcttgcggtaacagatttataaatgcttcttccagcgtagcgctttgcgtttgctgccgtagctcttcggcgctgccagttgccagcacttctccggcattcatcgctaccagccagtcgaagcgttcggcctcttccatataggcggtggcgaccagcacgctcatattgctctgccgctggcgaatactgtcgatcagatcccagaactgggagcgggagagcgggtcaacccccgttgttggctcatcaaggatcaacagttccgggtcgtggattaacgcgcagcacagcccaagtttttgcttcatcccgccggagagtttacctgccggacgatcgcgaaacggtgctaacccggtgctggtcagcaactcattaattcgcacttcccgctccgctttgtcgtgaccgaacaggcgggcgaaaaaatcgacgttttcatacaccgacaaggtgtggtagagatttttgcccagcccctgcggcatccaggcaatgcgcgggcagacgtcgcggcgatgcttcgggtcgcgcatatcgccgcccagcaccatcacattgccctgctcaatgacgcgggcaccggaaatcaacgacaacaagctcgacttcccgacgccgtccgggccaatcagcccgaccatgcaacgggccggaatatcgagtgtgatattgttcagcgcaacggtttttccataatgctggctcacgcccgccagttgcgcgacaggcaggacgggaaccagttccagatgtgtcattgcggcaacctcaccacgaggtcgtcaggccacggaagttcttcattcacccgcacccacgctacgcccggtaaaccggttttgacatattccagatgctgctggagtaattccggtgggatacgcgctttgacgcggaacatcagtttcagccgttcatcgctggtttcgacggtttttggcgtgaactgggcgacgctggcgacaaaactgatggtcgccggaatacgcagatctggcacggcatcgaggatcagccgggcttcaccgcccagtttcagcgtgcccgcttgttcggttggcaggaagaaggtcatatagacgtcgctgagatcgaccatattcagtacccgaccgcctgccgccagcacttcccctggctcagcaacccgatactgcacgcgtccgtcacgcggggctttcagttcgctgtcatcgatatctgcggcaatgcgccgttcagtggcttgtgcggcttcgacgcgggtttgcgcctgaatgatattggtacgggccgcttctatagccgctttagaagccgaaacctgagcttttgccgattccagcgccgctctggcgctctcagcggcggcgcggtcgtcatccagctgttgcgcagaaatagcccctcgttgggccagtgaacgggaacgcgtatgacgttttgctacggagtccagttctgcctggcgttgattaaccagcgactgtgcggcacgagtttcgctttggcgttgctccagcaaagcctgcgcggcggcaacggcgctttgtgcctctttgatttgcgcgatggcttccagtcgctgttcctgcaacacgcgagtatccatcttcgccagcacttcaccttcgcgaacaaactggccttctttcaccagaatggtgtcgatacgcccggcaattttgctggcgatatccacttccgtcgcttcaatgcgaccattgctgacggcaaagccttccggcacacccgccgggcgcaacagccaccacgccacgatagccgccaccgccagtaacccgacaacccaccacgccagatggcgcttactcttatccataatcgacccgccataatccctgtaagcaaacgacgcgtgttacaactgccgccgaacgacgttcagcggattcttccatccgggataagaaggaaacgacaaatacgaccagcgcgcagagcattgagcgccaacggggaaggcttagtgaaaacgggtagtaatgttgtcatcatcagcattcctggccgtaaatgaaacacgcatactcataagtgtgatctataaaactggctgacaaaacggtatccatcctgttggatagcgtttcacgcctgttcagttgcaggaacagagcattcctttttacgttttatcaacagtctcaaccagatagtaacattaatattcatgttgtctatggttcagagctgtaacattgtgcgccttctaatcaaaggcataagtccatttctgtttttttcatgctggtaagacttccagggagtggttatctcaggccctgcaccagggttaatttggcaattatgcatgctgaacattcttccagcatgtttactgtcacgggcgttaagacctaaaactgtccccgtttcacctatgcgttctctcccaccatttccgttatgtgcaacaacttgatttatacctaacatttgtgagcatgctaatagtgcttcaagtttaggtctgtaatctgtcgaaacagaaaaataacgattaaaggatcgacaagagatagcccggctagttttaaactttttgccattaattatagcatgatgttttttattgataattgccgctaattcgaccggagcgagagcattggtcatttcatcaatagagactgttatcggtcctataatgtaacgttttcgctgctcatcaaaagttatcccatgatgatttgccattattttgtatttggggtcatagaaacatacaggataatcttttatcccagcgtaggtatcctcatcaagtggtttcatacgcgtgaagttctgcatatagttaccattgcaattcgtttcatgatttccagctaatacatgaacattttcattgatactcattatgcgttttaacaaatcgatgataaattgatcgccacagatattactaaatcgatcgccggtttggtcgccaagaaacgtacatggcgtcacagcgtctttattaataactaaataaggctgaagactttctaaaactatatctcttctgttcagaatactgattattgtattaacattagtgtcaagttgctcattaaagttctcccttagcaatacgttgagaacttcatcttctatattaagcaactggctaaggaaattttctccttcagccatgattctcaaatgtcccgttgcaaaaagcgcgtacaaaactgcaccgactgagccatcggtatcgccaaaataggttggtctggtacttgtgggatcaacaggtgaacaattggagaaataggttctgtcagcgaactggggttttatcattgtctcgaatttaatatcagatacatcgaattgcgatattttccagttccagatgggtttgtacgactcagtaactgcaaaatcattagcatcatcatttactgtcatattattaagtaaataaacaatgctgcaccaattaatatcggtatcatcaagagggcaaccgtaatttttactattaattgtcacaataaactgataacagttattcctacgtagaatatgagcgcgcatgcccgatagcatactatatttttctgaatgatccgtttgtatggtaaatgatattttgtcatctcgaatagattgttggaaacgttctatttgccaatcatcaatttttccacaacttcaccgagcattgtcctggcaatacttgatatatcatcacctataccatttgcaatatacccaaacagttctttagtgaagttagtaacatgctcttgaaccatatcatttgttgcgattgtcgttgtactgccgttagtgcctgccacagttccaattttcatcttttacctcatattattcaccgcgaggaatacatagttaacatttaatcttatgacatacacctcatgttcgatggaaaaataattatattttgcacaaatcattcagccttaaagcataatatgaaatttcttatctcatagcagcgaaagtccctaaagattgtagaggcgtcatcagaacatgcctctacaatcgattaagaaaacctatgaaatactggcaggattaaaaagacataccaccgtattcatggagttttaatgagattgaaaacaactaagccctgaggaataaattattttattatttttatcacgtgcttccttcagggaatttagccccataataccattatcaaattgttgattctgatctaccccgggcccatgatgcccatatttttgtctaatgtatttgctggggtcttcacctttgagtgtctccccacatatgaagatacgttcacgtgctggtctgaaatcagtagtgttatcaaaataattagcatatacaggtgtgggtttcaaagtattgcttcggattagatggaatagaggatcatccatgtgttctttatgttttttattaaaaatattggctaattcctcaggatcagtaggatttttcatctgattaaatggaacctgcaaagcaccgagacaataacatttttttcttcatctcttattattccgtgatgactggttaaaacttgcctttctgagtcataattacaaacatcgagcgttttaattaagttatacgtatcaccggcagagagtttataattttctagtcatgcagtatagttaccattaaaattgatttcatgatttccagccagaacgatgacatttttattaatacggctatctttattaccctccatatttcgcatagaatttagcaaagtaaggatatatttatcaccaaaaatagtactaaatctatcgcctgtatgatccccaaggaagatacaaggggttatcgcatcgtcctttaaaaaaacatgttgatgcaactcattcaatatcatgtctctcgtatttaataaattgtagagcaatttattatttttatgtatgtatgcagatgaagccatgttttcgtgttttaataattcacataataaactccaacccttttccctgatgcctatatgccctgaaacgagcaatgcataaagtacagcgcctactcttccatctgtatcgccaaaataagccgtgttggcattttgtgggttaatcacaccacattgtttataaaagtctattttagaaaacacagatttaacatagctatcaaacttatccttaggaaacgtctctttagagacatcccaacgccagtcagctttaaaattaccgctaagaagagtaaagaaattttcaggtatgatagaaagcccattaactttataagttatgtctgatttataaattatgtctgatttatctccggagaaattaataaaataataaccatccttacactcaatcttaactgtaatgggagacgataattttatcacatggttattgtctggtataattgtaaagataaacgtgttagtagtattatcggcgaaactattatattcttgaatatctatagatggctcactattgtaaaaccatattttctccatctgaagactatgttcatttaccctccagtgaccatgttgcaggaaatagatgatattcaggcctaaatcgttatctatttgcgaaaagtcattcagcatattaacttcaactgtgtttgatcgatattttttatcaaccttgccatggtgttgatgactgttaactttatctgaatgcttatcttgatggtttgaagagaagttcttaaatatattgcgaaatactttcataaataacctgtaatatttttacttgttagtaacaaaataaacaatacatgtctgaaagacatatttacgatgatacaaagcaataatacttatatgttcgatgattttaagcaccgagactatccggtcttttactaaataatggaaaacaatccatccctggaagataattgtaaaaaaaaacaacagaataagaattaatcttaggataaatatttatttatcatggccttttaaccggtaaaaatggcactcggcacagtaaaccccgctatagttatgctatgcatttgtctttaatgatatctcgtcgttatattaacaggctgaaattatcattaatgcacatttcattattagcagggatacctgaggagtttaaagtgaacatatatatcgggtggcttttcaaattaatccctttgattatgggattaatttgcatcgcgttaggtggctttgtgctggaaagttcagggcaaagcgagtatttcgtcgcgggtcatgtgctgatttctctggcggccatatgcctggcattattcactaccgcatttattatcatttcgcagctcacgcgcggcgttaatacgttttacaatacattgttccccattattggctatgcggggtcaattatcaccatgatatggggttgggcactgttagcaggcaatgatgtgatggcagacgagtttgtcgccggccatgttattttcggcgttggtatgattgccgcctgtgtatcgacggtggcagcgtcatccggtcactttctgctcattcccaaaaatgcagcggggagcaagagcgatggaacgccggtacaggcttattcttcattaatcggtaattgcctcattgccgttcccgttttactcaccctgctcggtttcatttggtctattacgctgttacgtagtgctgacataactccgcattatgtcgcgggtcacgtattgcttgggttaaccgcaatctgtgcctgtctaattggccttgttgccacaattgtccatcaaacacgtaatacgttttcaactaaagaacactggctgtggtgttattgggttatttttctcggctcaatcacggtactgcaggggatatacgtcttagtcagttccgatgcaagcgcccgactggctcccggcattattcttatttgcctcggaatgatctgttacagcatattctcaaaagtctggctactggcactggtatggagacgtacctgttcgttagccaacagaataccgatgattcccgtcttcacctgcctgttttgccttttcctggcatcgtttcttgcggaaatggcgcagaccgacatgggatattttattccttcgcgggttttggtcggtttaggagcggtatgctttacgttgttctcaatcgtttcaatattagaagcaggttctgctaaaaaataattgcaacgtaccggataaaaccagcgttgaccatttgcgtaacgctggtttttcttaggcatcatgaaataacgcagcattaatgcatagtggttaaggataaaaaaacaacaaagttactgtttttttcaacctgttcatattttataaagatctggccactgggtgagttttcaatcacctttccttccaccttatattaagcctggagggtttcagttcacgggctcattagaaaataatcacaagatagccactatcaaaattagctcatttttaatgcggctctaataattttcatctttaggtaacaggtcaggacgacttcgctgcaattgtgtagagacattaaagttgtatcctttaacctgaaaaagactttaaagttgtaaagttttaaaaaaacacatacaaaacatgatgctaagtgtgtatcacacgctgttccaacattatgccttgatgttcttgcaggaactgcaatttacaggaggaaaaaggtgtttttgtagttatctggcgttacgtgacagtgttggtcagatacttccacctcttcagagttaaagtttgatatatgggaaaaaaaacgctcccggacggagcgtaagccagtgacttcggcgtcaaatgagggtctaacaagtggagctgcgggttaattctgggtgatctgactgcgatgcttatcagcctgctgctggtgaacaacggaagactgaccattattcgccttctcatgtacagctgcggccttctcatgctcgctcatttcagaaaatgactttgctgtttcgttggtagctccgggtttagctttcatcatttttttatgcatttcagccatgtcctggtgggcagcagaattgctgttttgcatcatgtcatgggacattgcggcctgatcgtgactgctcatatccatcattgtcatgctgtctccctgaattgcactttttcagcagatgactgcatctggtgggcaggtgcctgtgcattatttacctggtcatgcatgttcattgtctctgcagccatggcagatgaagcggcagccataatggcaacaaatgatacgagaatctttttcatggttgggtctccggtgtttacatacccaaacaatcaatggcttataacagagaaagcagttgatctcagggcgggttaatcatcactccaggaaccaggtgattgtgttatcacgctgctcctgatttatgaataattataaaaaaccgcctctgtttatcgcgtgactgaatgatgacaattttgtcaccttccaggtttctcctgaacaacgggattaatccattaacaggcgcactttgaacacaatttcacgcccctgctgttctgctgacagctcgccgccgtgagcatgaatgatcgaccttgtaattgataatcccagccccgcgccttccgtgttgtagaaccttgatgagtctgcgcgatagaaccggtcaaacaaacgttccagattagcgggaacctggccggacatcgtattcgtaatcatcacgttcacacagtcactgtcacgctcaaggtgtatcgctgtacaggtgttatcgggagaatacttgattgcattggaaagcaggttactgaaagcacgtcggagcatatcgctgtctccggcaacaacgccctctccttcaaccgtgattgtctttcctgtttcgtctgccaggggctcgaacaactcacgtaattcattcagttcggctgccagatccacatcatgtttatccagccgcagcagaccatgctctgaacgtgccagaaaaagcatgtcactggtcattcgtgacaaccttttcagttcttccaggttagcgaataaaatttcgcggtaatgcgaaacatccctttccttagccagtgcaaactgcgtctgcatcatcagattactgactggtgtgcgcagctcatgcgcgatgtcagacgagaaatctgacagtttccggaatgccccctccaggcgatcaaacatattattgaactcctgcatggtctcagagatttccggcggagccagatcgggatttagacgctgatccaggctgtgtacggtcatggaggaagccagactggtcatttcccgtagcggtttcagaccaatacgtgtggtcagccagcccagaaaaacagaaataaagaccagaccgatattgaaccagaacagccaggtactgagtttgtccataaacagggtgtgatacccagtatccgtggcaaccgtaatgatgacatgtttgcttttaccctgttccggcgtcacggcaacccgccgcgagatactgcggtacacggtgttattttcttccgtctggatcatatagtcgagaatatcacccgacttattaagcaggatcgctggaacaacagaatttttggcatagagttcaacaattttttcattttccatgttttttatagaaatgaataagccattgtgccccaccatcgcatcgtttattttttctgataatgacttaatatccgttttgttcctgaacgtctctgttttaagaaactcttcggtgagctgaagtttacctgtcagaaaatcgcggtcctgattatcgaaatagccattaagggtgctaatcaggataaaacttgataaccaccataccgtaagcatcaccgcagaaaaaatcaggctcaggcgtgtggtcagggaaattttgaacctcactcttctctgatctccaggacatatccggcaccgcgaacggtatggatcagttttggctcaaagtcatcatcaattttacttctcagacgtctcacggcgacatcaatcacattcgtatcactgtcaaaattcatgttccagaccagggacgagataagactcctgggtaacacttctccggtgcgttgcagcagcaactcaagcagaacgtattctttaccggtgagatggatcttcttccccgaacggatcacggtccggcgcaccatatcaacggtcatatcggcgatggtgcagactgttgcggcctgcgagcgtgcccggcgcagtagggttcttacacgtgcaaccagctccgtaaaatcaaagggcttaatcaggtagtcatctgcgccaagctccagtcctttcactttgtcccgcacgttgtcctttgcggttaaaaacaggaccggttcttcgtgcccggactccctcagtgcgctgatgatttgccacccgtcgaggaaaggcagcatcacgtccagtattatcaaatcatactgtcccttcgacgcggccccgagaccatcgcggccattattaaagagatcggcctgatagccttcctcaaccagtccctgctgcaggtaacgacctgttttttgttcgtcttcaacgattaaaatacgctgcatggtcaactcgctgatatgaaagtaaaaatctcacgcatgagctttggctgtcccctagctgacctgagacggagcaagcattccgagccacgctacggcgcccagaatgataatcgcaacaacgaattctgtcaggatgctgtttcgcatcagggcaacgctgcgatcataattcccttccctgaccataacttcaagccggggacccaggtgaaaccggtttgctgcagccagaagaagcatcagaacaaacagagccgtcttggcaagcaatatcctcccccaggaactgttgaataagggagttaagttaccctcagcaatatacagatagttgaccagcgcactcaggatcagggctacaacaatcaccgttcctgccgtggcaaattttgccagggagtcagatatcacaatgacgctctgtgcattatgctcgtttctgcgcatcagcaggatagcaaatgcaaccagagcacctgtccaggcacctgcagcgccgagatgggtcagatcgctcagtaaatggagatagtaatgcagaccgtcatgcataacggcgtgtcctccccaggcaagtgtagccagcgccacgcccccactcatcgtcatcagcaggcaggacaatactctcttattagtgtaaaggaacaaagcaccgagtgtggtaaacagggcacagagcctgacaatccagctaatacccacatcagtttcttctatcaccatctcgataacatggatggataattctctgaggtcagttactccactcatggcattagataccaggagcatattaatgccagtaagaatgatgcctgtaacaacagcaaaagttataaacgacctgaaattagtcaggttataggtttcatgtctgacaccgcttattccatatatctgaaaaaatggcaatccaaatattaccatcaaatccagataaagaagaaaacgaataacaatcataatcaggtcgttcataatattacttcactgtaaaggtgtaattaccggtaatagggtgcgtatctgaagaaaccgcgcgccagtcaacacgataagtgccagcgggtaaaggctctcgcggaataatgaccatcgatttagggtcagcgcctggcgccacttttgccgcgaccggcatcggagaatgtgatgacatgcctttcatacccgtcatcgttaattttgcacctgagaatttcacggtcagattttccgagaaattaagctgaatcttttccggggccgctacggctgaatcagcctgtggcacagagctttttaattccggatgggccatagcagagaaagcaacgcccataacgaggccacctgtaagaatggctttatttaaaatcgacattttatttacctgtttagttgagtgttttatatcagtgcgttaaaaccagattctggctcccgccaggaatactacctgatggtctttctcaccttctcttttcgccatatcggatgttttcccgtaaagttgattccaggaaacgcctatatagggtgcaaactcacggcgtatttcatagcgcagccggagccccagctctgtgtcagtcagtcccctgccgcgaccccgcgattcatcatcctgactgtagaaattcacctcataggatggctggagtatgagccggttagtcagtaaaacgtcgtattctcctcccagacgaagggctgcttttccgccattactgacaaaacccgtaatttcagactcaaaattatagagtgccagcccctgaaaaccgacagcagcccaggtccgggcagaagcaggtctgaaatcctgcctgacacccgcaaccaaatcccaccatgggccaaccgcatgtccccagagtaactgcgcttcagccgcctccgtttccccattgcttcgttcaccttcactctttagccaaatccgatctgtgtcgcctccaatccagctgttaacactccagctgaaattgttggtgttatccgaccgttgccattccagttgatccagcagaaccagataattaatcgcactgtcgtgaatcgcatgcccctgtaaattgccgaatgcagccttccggtcggcatcggtaacaggcggaattggcgttctgctctcagttacaatgggctccattgacgtcatctcagtgaaattctcatctgctggcatctgcatggcagacatgtcgtgcccggcgtggggatctgcagagacggagcccgccgcaatagaaagctgtgaggtaaacaaaccggcgaccagaacaggtatggccttcaaatttctcttcattcgcatcattcctccacccggacttcacgaaacattcccatttccatgtgatagagcaaatggcagtgatacgcccagcggccaagcgcatctgctgtcactctgtaactgcgttttgtaccagggggaacatctattgtgtgtttacgaaccatgaaattaccgttttcatcttccagatcgctccacataccatgcaggtgaatggggtgagtcatcatggtatcgttgatcagcgtgatcctgagccgctcaccgtatttcagcagcaccggtgcggcatctgaaaacttgattccgttaaatgaccaggcaaacttttccatgtggccggttaaatgcagttctatggtacggccaggttcacgtccgtcaggatcctcaaagcggcttttcaaatccgcgtacgtgagaacctttcttccgttatttcgaagaccaatacccggatcatttaatttcggagagacgctcatcgcctgcatatcaaccagtgggttatccgtttctgacgcaggatgactttgcatacccggcattccggccatccgggaatgatccataccggccatgctgctgtgatccatgggcgcggaggatgtcccgctatccggaaggtcagcaccgtccatagacatcatctctccgctgttatccatgcctcccatctggctgtggtccattcctgccatatcatgtcccattccccccatacccatatcttccatggtcaacagaggacggggatcgagggggggaacggcagcacttaacccctctctcgtggccagtgtccctcgagcgtaaccggtcctgtccatggattgtgcgaagatggtataggcctcaccctgaggctccacaatgacatcataggtttcggcaacggcaatcctgaattcgtcaacggtaaccgggtttacatactggccatctgcagccacgaccgtcattttcagcccggggatacggatatcgaaataggtcattgccgagccgttgataaaccgtaagcgtatcttttcaccgggacggaacagtccggtccagtttttcagcggggcctgcccgttcatgagataggtgtaggtgtagccactgacatccgcgaggtcagtcggattcattttcatttcagcccacattttccgatcggcaatggtggctgacagccccctggtattcacgtcgcggaaaaaagagccaacggttggtttattgaaattgtagtaatccgactgtttttttaattttttcagcaggctgtgaggattttcatcggtccagtcagacaacatgaccacatgctcacgatcgtaagtaaacggttctggctccccggcatcgatgataatggcaccgtataccccctcctgttcctgcagaccggaatggctgtggtaccagtaagtcccgttctgcttaaccttaaaggtgtaaacgtaggtatcatcaggctctatgcccataaaactcagccccggaacaccatccatattggccggaagaataatgccgtgccagtgaatggacgtctgttcattaagacggtttttgaccttcagggtaatggtgtcaccttctttccagcgaagaacgggccccggcaggcctccattgattgttttggcctgacgctcactgcccgtgatattgacggccgtttcaccaatggtcaggtcaaactgagtaccctgcgagggatgcggcaactggcaggctcagactggaacgcgcattgaaactccatacgccaagacttccggctacgccagagagggttaaccccttcaggaaagttcgtcgagacgttttcaacagcatgcgcattcccttatttaaagtatggttactgacagaattcgagaaccgatttaaattaaattactggttcatccacttacaatgaaatgaatctagcacaccttaagaaacaaattcattacaatcgtgtaatgtacatagctgtattacatttacgtcatcttccccacaggttgattatttttatatatgatcataaggacatcttttatgtacctcagaaggtaattacacatgaatatattaatcacgaccactgcgtttacagctttattttgtggggcagcttttgctcagtccagtgatattgcccatgaagcacatcgatttgttaataatgcctcagccgtcagtcatgtgaattcctcgacgcatgaaaacttaccggacagggttaataaaaacaacacgccctcattctctgaaatgaatgaacatgaaagggccattgttgctcattcatttatgaacaacagcgcgtcctatgcgcatcagaaaatgattgaggaacataaaaaatgctgtccggcagtgatgcaaattcaaagacctcgtcttcttcttttaacgaactgaatgccggagaaaaagccgctctcgtgcatgagcaggtcaataatgccggtgcggaagcacatcagacgcaggcaagaaagcttcgcgggctgtattcgaccaggtaactgcaggcgggttagtgcttagcgtcaggtgcgcagcagggctttactgacgggttacgtagcaggacatgagccccatattgctctgccgtaacctgtttcagtcccgttaatcatcaccgtcgggctggtcatacagttcccagagcttcaggagcaaacgggaaacaagatatgttacaaaaatgacgaccatcaacggtgctcccgattaactgacagatgacacgcctcctgaaaacccctagcatacgccgcagtgttcatgctaacggcgaattccagtaaatgtattctaccgatgtcgtaaaagaaaatgcctacctttcagccacccgctcggggctggaatcgaacgagatcgctactcttcagcgctccttgccttcccggtttaatctgcggcatttgaaaaaaaatgaatcattaaaactcgtactgcaaaagaaagcgggaaaatcacgtgtcgtggcctataaatttacgtccggttcatttaattacacggcgtatcgtatatcagataaaaagttctataacctttccgatacttccgggaaaggcagtctcgattatccgttaccggccacagcaagactcagttcgcctttcaatcctgcaagacttaacccggtatcgggaaaagtgagtccccataatggcattgattattccatgcccatgaacacgaaaatagtcagcgtcatcgacggaaaaatcacccgggccgaatacaacagtaccatgggatattttgttgaagtaacgggaaaagccggtgttaaaactcgctatctccacctcaataaaatactcgttactaaaggggccagggttacacggggaggtgctattgcgttatccggtaacagcggacgttcatccggtcctcatctgcattacgagctggtcatcaataacaaccctgttaactctctggcgttccgggcagcggcacccgctgataacaaactcgaacagcatgcctttgcgcatgccagagactacgaacgatacctggactgataacgggaccgcgacgcggccccgtctgccggattaattttttttatcgttttcacttccgtgatgttgatgatctccatgccctccgtggccgtggaaaagatgcattagcgggcagaccagcaataacagatatggccagtaacctgccacatgtgaccagtgttcgcgcaggagggcaaatgccgcgatcgcggcgacagcaataagcgcataggtggtacttttcatactggactccttctgttcgtaactgacccttcactcagtgttatttcccgagcctgacacttttcagacgcaacgcattcacaatgacgctgacggaggaaagagccatggccgccgccgcaataactggcgacagcagtattccatacacaggataaagcagacctgcagccacaggcacgccaagtgcgttgtagataaatgcaaaaaacagattctgacggatatttttcatggtgatctctgacagatgacgggccctgttcagtatcatcaagtcgcctttgagaagggtgactccggcactttcaattgccacatctgtacccgttcccatggctatacccacgtcagccgctgccagcgccggggcatcattcacaccgtctccggccatcgcaaccacatggccagactctttcagtcgggttatcactgcttttttgccatccggcagaattccggcttcaacctcatctattcccagtttccgtgcgactgcttcagcagtaagctggttatccccggtgagcataacgatgcggatccccgcctgacgcaaagctttaagcgcatccggcgtggttgttttcacgggatccgagatagctatcaggcctgcaaggtccccgtctgtggccacatagataacggtagcgccttccatccgcaacgtatccgcaacggccttttgattatcaataactatactgttttcctgcatagccagttcattaccaataacaacccgttgaccttcgacatcgcctgagacacctttacccgacggtgcatcgaaatgagtgactgcgggtattgcgatccccttttcctgtgctgctttaactactgccatacccagcggatgctgcgagcctttttccactgcggctgttacacgcaaaagagatgtttccccacccggattgagactgataatccctgtcaccgtaggcgaaccttccgtgagcgtgcctgttttgtcgacaaccagcgtgtccactttttcaagacgctcaagggcttcggcattcctgattaacaccccggcctgggctcctttgcccacccccaccattatcgacatcggcgtggccagcccagcgcgcagggacaggcaataatcaggaccgacacagccgcaatgagaccgtgcgccatcctgggctcgggcccccagacagaccagatcacgaaagcaacaaccgcgataagtatcaccagaggaacaaaccagcctgaaacgctgtcagccattctctggatgggggcacgcgaacgctgtgcatcagcgaccatctgaacaattcgtgagagcattgtttcatcaccgactttctctgcacggatgatgagactccctgtctgattaatggtccccccgatgacagggtcaccctccgttttggtaaccggcatagattccccggtcaccatcgattcatcaacggttgttttgccttcgatcacgataccgtcgaccggaatactctctccaggtctgatgcggagcttatcgccaggcaggacatcttccgcattaatatccgtttcatgaccgtcatgatccagccgtctggcggttttgggggcaaggttcagaagcgcagtaatggcgcctgaggtttgttcccgtgcccgcagctcaagaacctgtcccagcagaacaagcaccgtaataactgctgcggcttcaaaataaacggccaccaggccatccatgtttctgaacgatgcaggaaaccaggaggggaagacggttgcaatgacgctgtaaacccaggctacgccggtccccattgcaacaagggtaaacatattcagggagcggttacgtaacgacattccggcccgggcgaagaatggccagccacaccacaacacgacaggggaggccagaagcagctgcagccatgtgttgtactgtggcggtactgtattcctcaactcgggaaacagatgagatcccatttcgagtaccagaaccggaaacgccagcaacaaccccagccagaagcgtcttgtcatgtcgtgaagttcatcactcggccccgtggatgccgtagctacgagcggctccagtgccattccacagacaggacagcttccgggaccactgcggcgtatctccgggtgcatcggacatgtccacacaccttcagaattctctttttccgcctggtggtgaggctgttttatctgatcagggctgacttcgtgatgatcgtggtgatggtgatgggaatgttcactggcatcttcggtaagataacgatcgggatgggctttaaatttactctcacagctggcggagcagaaataaagttgatggtcctggtatcgaatgctgctgtgcgccctgtcgggcaggatggccatcccgcacacgggatctctcaccttatgcaatacgtggccctcgtccggggataatgtctgctcagaagcagtctggttgttgtgttgcactgcattgtcatttttcacagtaactctccttatgcataccgaagcatcttctgtcttcagggtatgtcatggatgcgattaccacgaatatcgccggcacaggagtgcctgctaccggcgtcccgttatcagccgttccgctgactattcgattcgctggaagacttttttacttccatccggtgagaatgcgataacatcgtaagcctcttttcgggctcccatctccattccaggacttcctgctggcataccgggggtggcgagaccgtatatacctgaaccagactgcattgccttatgtatcgttgtcgcaggcacatggccttcaatgatcaaattaccggcaaccgcggtatgacaacttcgcagtcctgcaggaatagcatgcttttctttcagggctgacagcgcctgatcattcatgacgtgagttcgtacttcaaacccgtctttttccatcgccttgccccacagggaacaacagccacagttttcagatttgtacatatcaatcactttttcactcgccatcgcgggcagtgaaaggccgagagccagcgccatcagaaccacttttttcatactcacctctgtatattatcgatttaaaccctgacgtcagggtgaatcagtaaagaaggacacccacagggggtgccctttcaggttcaggacacgctttttttatgtctgcgcagccagattaatttgtaggcggcaggaataatgaacagggacagcagcggagccgtgatcatcccaccaatcatgggtgccgcgatacggctcatgacttctgaacctgcaccggttccccagagtattggcagcagacccgcaatgatcaccgccacggtcatggctttcggccggacacgcagtacggcaccatgatagagggcttcatcaaggccttccggtgtgaacgtctctttacgggacaattccgggtgcgcttcaatggcatgacgcagatacatcagcatgaccacgccaaactctgctgccaccccggccagagcgataaaccccgttccggttgcgacagacatatggaagccctgccagtacaggaaccatatcccgccaaccagggcgaacggcaggctcatcaggatcagcagggcttcatcaacccggcggaatgccagatacaacaggatgaagatgatcatcaccgtcatcggcaccatcagcttcagtttcttgttggcatgctcaagcagttcaaactgtccggagaatgacacgctggtacccggtctcagtttcactttctgactgatcgccgttttaatgtcattaaccaccgacaccatatccctgccgcgcgcgtcaatgtaaatccagctggctggacgggcattttccgttttcagcatagtcggcccggaaacgaccttaatatccgcaacatcgcccagcgtgatctgctgcttcatcggggtcaggatcggcatctgtttcagggcctgcgggctgttccggtaatcctgcggatagcggatattaatcgggtaccgggccacgccttcaaccgtttcccctaccgtcgcgccgccgatggctgatgagatgaacagctgcacatcgcccaccgtcattccgtagcgggaggctttttcccggttgatatccacatcaatgtagcgcccgccttccagtcgctctgcgagagcagacactacgccgggtacggttttggcgaccgcttcgatactctgcgccgttgcatcgatatcggacagaaccgttccggacaccttgatacctatcgggcttttgatcccggttgagagcatatcaatacggttacggattggcggcacccagaggtttgccagccccggtaaacggacggtcctgtcgagttcttcaataatcttgtcaatcgtcatgcctggacgccactgatcctcaggtttgagctggatcgtggtttcaaccatttcgagcggtgcggaatccgtggcggtctctgctttaccggtcttgccaaatacagaggccacttcaggaacgcttttgattaacttgtccgtcgtctgcaggagcgctgcagcttcagccggagagacacccggcagggtcgacggcatatacaacaggtcgccctcgttaatcttcggcagaaactcaccgcccacctggctcagcggccagataacggtgaaaatggacaaggccgcaaccagcagggttgtttttggccagtggagaacccgcaacagcaatggatgatacgctttgatcagtacccggttcagggggttactggtctctgcaggaattttcccccggatccagaatcccatcagaatcggaatgacgatgatggccagcgcggccgcgcccgccatggagtacgttttcgtgaatgccagcgggccaaacagacgtccttcctgaccttccagggtaaagataggaataaaggacagggtgatgatcagcaggctgataaacagtgcgggtcccacttcaacggaggcatcggtaatcaccttccagcgggtggcgttgtcaatctgctcacccggatgctgatgatcccactcctcaagccgcttatgcgcattctcaatcatcacaatggcggcatccaccatcgcaccgacggcaatcgctatccctcccagcgacatgatattggcgttcagtccctggaagtgcatgacgataaaggcgatacacagaccaagcggcagagagataatcgccaccagggcagaacgtacgtgccacaggaacagggcacagacgatggccaccacgataaactcttccagaagtttggaactgaggttatcaatcgcccggtcgatgagctggctgcgatcgtaggtggtcacgatttcaacgccttccggcaggctggccttcagcgtctcaagtttatccctcactgccgtgataacgtcgcgtgcatttttacccgaccgcaggatcaccacgccgccagcgacttcgccctggccgttcagctcggcaataccacgccgcatttcaggcccggtctgcacgcgggcaacatcccgcagataaaccggcacgccgttctcgcctgttttcaggacgatgttattaaaatcatcaatgctctgaagataaccgctggcacggaccatatactcagcttcggccatttcaacggatgagccaccggcctcctggttagacgattcaagggcctgtttcacttcgggcaggctgataccatactgagacaattttaccggattgacctgaatctggtactgtttcaccacgccgccaaccgaagcgacctcagccacgttcgggatggttttcagctcaaatttcaggaaccagtcctgcagagaacgcagttctgaaaggtcgtgttttccgctgcgatcgacaagggcatattcaaatatccagcccacccccgtggcgtccggaccgatttcagaactcacaccggcgggcagttttccctgtacctggttcaggtactccagcacgcgggaacgggcccagtacagatcggtgccgtcttcaaaaatgacatacacatacgaatcaccgaactgtgaaaaaccacgcacggtttttgcgccaggcacggacagcatggtggtggtaagtggataggtgacctggttttctacaatctgcggggcctggccgggatagctggttttgataatgacctgcacatctgacaggtcaggcaaggcatcgacaggcgtgttaataatcgtccatgtgccccagatgctgagaaacagggcccccatcatgaccaggaaacggttggcgacagagcgccggataatccattcaatcatcgtcgtctcctcagtgccctgaatgcatatttacaggctggtcagacattgctggcatactgctttctgttttttcagggtggcgcatacgttccagtgcgcccgtaatattggcttcagagtcaatgaggaacaggccactgaccaccacggtatcgccttcattcaggccggagccgatgccggactgttgctgtgactcatgcagaacgtggatctgtttcggcacaaacttgccttcatcatcaacagtaatcacgcgctgttctttgccggtatcgataacggcctggcttggtatcagcagcatctcctggcttctggtattcagtttcagataggcattcatgcccggcttgagaaactcatccttattagaaacctggagacggacctgaagcgtacgggttgtctgatccacgctgggaagaatattccatttttcgacatggaatgttttatccggataagccggtaccgaaatttcaaactgcgacgtatctttcagcagataggcgatagattctggcactgcagcgctgatccagaccgggtccattccctgaatctgagccaccaccttatctttcgaaatattcatgccggtgcgcaggtcaaatgcagtaatgacaccatcaataggtgctttaatggtaaaacgggtctgaatgctccgggtagaacgcagtctctgaatatcctcttccggcatacctgccaggcgaagccgttccagaacgcctttaatttgcgtggaagtaccaccggtgctggataacagaaggaattcactctgtgcttccacccagtccggaatggtaatatcgataagtggcgtccccttcttcacatgatcgccaatcgtcatggggtagactttttcgacaaacccgtcagaacgcgcctgcacaataacaaactgatactcgttatagctgacattagccgggattgtctgagaataattcagcattcctcgcgtgactttttgcgtttttaatcccagattctgaacctgggttgggtcgatacggatcccgccactgcttttatcgccactgtcatcagcatattttggcaccaggtccatatccataaagggcgattttccgggtttatcaaatttggtatccggtttcattgggtcataccagaaaagcacctttcgttccggtgccttttgttctgttttttctgtcttttgtgctgagtttacatactgccaggcagtaaccgatatcagcccccctgctatgaggctgctgataattattgcagcatattttatctttaaagaagccatacaattttccgctaaaaaatcaaaacacctggcatatgcgcctgacggttaactcacacatatacctatgtgaatgtacaggcgcacaggatgtaatcgctccggacagccaatcaggactgcgtcacgttaatgcttttgagtaaggagatattaccctgctgaataaacgagaaatcgacatggttgcctgttttcagggcattaatagcatcgtctgcattaacaaaagtaaagcgcatggtcattgcaggccagcccaccgctggaattgcttcatgcgaaatggtgattttcttagtattcatatcaatgtctttaacgacaccggtgcccttgataacttgctgtaccgaagcatcactggcagtattcatatcgccatgctgatgtgtttcagcatgaagaccggcagaaaacatgacagagaaggcaccaaataaaacggctttaagtgaattacgcattttaatttcctgattaattaaataaatttactctacccaaccgccacccagcgcggtaaacagattaatttcgttaacctgccgggaataggtaagatcgagaatggtttgctgggtagcgaagagggaacgttctgcatccagcacttcgatgtaactgacagcaccacttgcatacaatcctctggcacgctggagagttatctgaagtgaatcaagataacgctgctgtgactcaagttgctggctaaggctgtcgcgcagcgcaagcgtgtcggaaacatccttaaaggctgactgaattttttgttcgtaattaaccaccgactgttgctggcgaatttcagccagcttcagattggctttattcctgccagcattaaatataggaatttcaattttagggataaaattccacattccacttcctgacgtaaacaggctggacagctccgtactgcttgcggaaagaccactggtcagggtaattgaggggaaaaaggccgctcgcgctgcgccaatattggcatcagccgctttcagctgatattccgcttccataatatccggtcgctgcagcaaaatttgtgaagacagatttggtggcaattttactggggctatctccccgcctttcatccctttttctgacggaagtgcgcggtacgttcccagcaccagttgcagggcattgtttgcctgagccagatcgccttctcgtttggctatttcggcgcgggtactttcgatttgtcctcgcgcctgttcaagtgccagaacgttcgtactcccggtcacgagctgctgctcaacgaaagcataggactgttgataatttttcagcgtttcccgcgcaatacgaagttgttcgtacgccagttgctggctgaaatagctttgtgaaacgttggataccagcaggatgtgtacggcccgacgggcttcttcgctggcaaagtagttctggcgatcagcatcactcatgttcttaagtttgccgaaaaaatcgagctcatagctgagctccagtctcgcgtcgtactcctgtgtggtcggcttgtcacctttcagaccaccgctgtatgttatcccggatgaggcattcagctggggataacgatctgcatccgtgacgttgaactgggctcgggcctcttcaaccttcagggcagccattctcaaatcacggttattagtcagagcttcaccgatcaaccgggtaacctggggatcgacaaaaaagttacgccagcccgtatcctgatagccatttaccgctggcgtcaggctgttatgggacagtgaaaactgctggggtaccggtgctgcgggccgctgatattcaggcgcaagcgacacgcagcctgccaggatgaatatcgtgctaatgctgagtaattttaatttgaacataacgcttctcgtccaggcagacctggtaaatggttcaaatgaagtccagagtattgataggggtactttacctaacgctctctgtttgccgggtgacaggataatgacaatgttgtcatttttgctgtaatccgttgataacgatcgtgggcgcaatagaatgacattagcagccagccggggagcaagatgaaaatattgatcgtcgaagacgaaattaaaacaggtgaatatctcagcaaagggcttacagaggcagggttcgtagtggatcacgctgataatggtcttaccggatatcatctcgccatgacagccgagtatgatttagtcattctggatatcatgctacctgatgtgaacggctgggatatcatccgcatgctgcgcactgccggaaagggtatgccggtcttactgctgacagccctcggcacgatcgaacatagggtcaaaggactggaactgggtgcggacgattatctggttaaaccctttgcgtttgccgaactgctcgcccgggtgagaacccttctgaggcggggaaacacgatgatcacggaaagccagtttaaggtggctgacctctcgattgatctcgtatccagaaaagtcagtcgcgccggaaaccgcattgtgctcaccagtaaagagttcagcctgctggaattcttcattcgccatcagggagaggttcttccccgctccctgattgcctctcaggtctgggacatgaattttgacagcgacactaatgcgatcgatgtcgcagtaaagcgactccgcgctaaaatagacaacgattacgagacaaagctgatccagacagtccggggcgtgggctacatgctggaggtcccggatgcatagcaaaccttccagacgccctttctcactcgctctgcggctgaccttttttatcagcctgtccacgatactggcttttatcgcattcacctggtttatgctgcattctgttgaaaatcattttgccgagcaggatgtcagcgatcttcaacaaatcagcaccacactgaaccgtatactgcagtccccggtggatccggatgataaaaaaataagcaaaataaaggaatcaattgccagctaccgcaacgttgcccttttgctcctcaatcccaggggggaagtgctctttagctcagctcagggggcggcactacgcccggcagtgaattcagcagattttagcgagcacagccgcgcacgggatgtctttctctggacggtggaggatcctgcgggaccgatggataccgggtccgaaatgaagatggaaacatacaggattatcgcctcctctggtcaggcgatatttcagggcaaacagcagaactatgtcatgctgactggcctatccattaatttccatctccattacctcgatgcgctgaaaaagaacctgattgcgattgccgtcgtgataagcctgttgattgttctgatcattcgaatcgctgtccgtcaggggcacctgccccttcgtaatgtcagcaatgccattaaaaacatcacctccgagaatcttgatgcgcgactggaaccgacacgcgttcccattgagctggagcaactggttatctcgttcaatcatatgattggaaagattgaggatgtctttacccgccaggccaatttctctgccgatatcgcgcatgagatcagaacgcccatcaccaatctggtgacgcagactgaaatcgcactgagtcaggatcgaacacagagggaacttgaggatgtcctctattccagtcttgaagagtataaccggatgaccaaaatggtcagcgatatgctgttcctggcacaggcagataataatcagctgatacctgacagggtcatgtttgacctcagagcggaagtcatgaaagtcttcgagtttttcgaagcctgggccgaagaacgcaatatcacgctcaaatttaacgggatgccctgcctggttgagggagatccacaaatgttcagaagggcgatcaataatctgttatccaatgccctgcgttataccccggagggacaggcaatcaccgtctcaataagagagcaggagagcttttttgaccttgtgattgaaaatccggggaaaccaatccctgaagagcatttatcaaggttgtttgaccgtttttatcgggtggatccgtccagacaacgaaaaggagaaggcagcggcatcggccttgcgattgtgaagtcaatcgtggaagcacatcacggaagagtgcaggtggaatcggacgtacactcaacgcgttttatcttatccgtgcccagactggagaaaatgattccggacacccagtgctgggaataaagatttaaatgacaaagatgtcattagcctgtcatgcagcaaacagaagccattcgatataattagtgcaacttatcaggaaggctggattgctttatcaatatccggcgtcagtggacgccaggaaatgaatatccagtcccctcccggagaaataaacacttccgaacctgtttcagttatggaactgaaaacaccggttgtactcccccggacatcactaattaagaaatggagagttatcatgaaaaatatcgtattagcatccttgctgggctttggcttaatttcttcggcctgggccactgaaaccgtgaatatccatgagcgggtcaacaatgcacaggcacctgctcaccagatgcagtctgctgcggctcctgtcgggatccaggggactgcacctcgtatggccggtatggaccagcatgaacaggccattattgctcatgaaaccatgacgaacgggtcggcggatgcgcaccagaaaatggtggaaagtcatcagaggatgatgggaagtcagaccgtttcccctaccgggccgtcgaagtcattagcggcaatgaatgagcatgaaagagctgcagttgcccatgaatttatgaataacggtcagtctggcccacatcaggccatggccgaagcgcatcgtcgcatgctcagtgcaggctgacggcgagggaagtatctgtgctgtccttatttccttgatagatttttccgtaaccggatatatggcaacatctttgccccctacagggggcatttttatcagattctgctacagttaacgggcatcaacgctaaaaggatattttttatgaaagccagaaacactttatttgcagtattaatgttatccctgccagcgatttcagcagaacattcagaaatgaaaatgactgatatgtctacctcggcttcgtcacaggaatatatggctggcatgaaagacatgcatgacaaaatgatggctgccgtaaatgagtccgatcccgacaaggcttttgcgaaaggcatggtagcgcaccatgaaggggcaatagcaatggctgagaccgagctcaaatacggaaaagatccgaaaatgagaaagctcgcgcaggacatcattaaagctcaaaaaggtgaaattgagcagatgaataaatggcttgatagtcaaaagtaaacattgtagaaatgtcacgacaagcgtgattttacatcgttcctgggcgcgggagtcggttaatctttatataattcaaacccgattaatttcgggtttttactactctgtactccggtcctttgttgaggaccggaatatatgcacctgagatgcttatttaatacattatctcgtcatggatacaatgtcgctcaggatctcaaccagctcgcttctctcctgcgttccgtcatgataggttgatcttgagatgattctttctgatgtcatctgaggccagaatttatctagtacattatcgggtttcattcccacagcccggccgattatttttttagcgtcacaggtgtccgtaaacgtgacggctacaccagtaatttcctcgataagatccgggcacagatagttttctatctcacgtttgcgcgtagcgaaaaataccttaccggcctcctctacttcttttttacgcttctggatggacagaacctgtgcagggtctcccccaatatcggagtccagaaatacgcaccagggaagccccagatctttggccagattcaatgtaacccagtgtttgacgctaccacaccctcctatgaggactggcactattttcacgtcctccagagaggctggcagcgcacctgactgttttaatgaactggccgcatgcctcaggaaagtaacatccgactttccctctaccagaacaatcccctgcgccctttccataccggtctctggcagcacccccaggctttcagtggcttccttcagcactgcgtcatccggcatttttactacgggttcacccgcctcatttcgggtaacataacgtacgccttcgacagggattaatccggccagcgccgggacatgggtggtgacgataatctgacggtgcggctggcctgccagtgccagtaacgctttcatcagcatcatctgatagttcggatgctgtgacgtttcaggctcctctatggcataaatcacatttctgggcgtccccgcgacattcttttcagcctcagcccgaaaaaaattcaacaggataagcctccttatcccgctgccgcgcttattgatggggatgccattttccccgtccagggtgaaattgaaggtccacttgggtttctccttaaatcgtggagtcagttcactggcgagttcgggggccatttcacgtaatttatccagcgttctctgtgcgacatccaggacgctgtcctgaatctcattttccagcgctgtaattttgtcctgcagcgcagcctgagcgtcttttacggcctgctgtaaggggtttttagcttcggaatccccgtcgctgctttccctgtcggctttgaaaatcgcatacgtgggcagcaaatcgaggatcttaccccataatgattttgtgtcggttccgaactctttatcgacatccagcataatttccgaacaggtatagggggctgcggcttccctgatggcctgacgccataacgatgcagtgcgtttatccgccacatttttttcaacttcttttcccaccgccttgagctcagaaattttcatgcccagtaaatttctcaggggctcctcatccgggtggatgcagcggatgcaggtctgctccggttttcctgaggtcgttgctttaaacgttttgacgatttcaaaattgccgtcctcattcagcagatgttctgaggcgagcgtggtctgcaccctgtcgtcgatcatgataaaatcgggcaggtcatcaaattcacaggctatttcaaaacggccgtccccttctcttaggctgaaacagttcatgtcattcttgtcagccttcattccttctgtttcaaaaaaatagccagcgcttccagaagcgttgatttcccaaagtcattacgaccgacaatacccgtcatgctttcatcaataatgatttcagtagagtttctgtagcctctgaagtttttcagttttaattttctgagccgcatatgaagtcctgtgtgtaagaaagcgttttgctgcaacctgaatacaaaatatattttcaaatgcctgccaacaagcagggataaccgttattcagaatatcttaacgacatttcgggattatgatctggtcgcgctttcagaactttactgcccctcaaaacaccggaaactaacttgtggttggttacatggcaaagttaaaactccagaatcacgggtaatgatttcaatgcttattatattttttggaattgactcatgagctttataatttaaatgataataataaccattcttttatgcgtaatatttgctactgacactgatgaatttaaaagaagatagattttcatttacggattatttcctaaattcatcgataatgtgatcgacataaaattttcactgaagaatgaagagataatttaaggccgagcgaaatagctcaaaatggtgtatttaacataacagaagaaatgaaaggctctatcgcaacctgatacttcaggccgctaaggggttaatcttgttgaagaaaaattagaccgggaagcgccaggcgtcaccatttctcccgcctggctggaagtgaagaataattgtgcatagctccgtattcgggctttgcatctgacaatggttccctggatgaaagtacgatctccactccaaggacgctgaacaccctaaacaaacgctcaaaacccgcacttgcagggttggcctctagtcgggcataagtttgctgtgttatacccaaacgttcagaaacatctttttgcgtcagtccattggctttgcgaaagccgattaaaacaggacgtaactgattcaaagtcttcaaagcgtattgagtgttcataagtgaccttccgtatcgacgagttaacaagcataacgcagggatttacagcatataggctgtaatgctcattaacagactgtaggctgtaatacgaatcctgccaagatgcggcatctttcaaatacaaggccgtattgggtaagcagtacaccgttatatagcaccccttgcccctttgctggagagggacccacgtgatcgcaggtcttttagacgttgttgctaaccggcatcatacacaggtggtaacccccagggaaactctatgagtgataatttattcctgccccagtcaaaatataaaaccttatctaactagctttcttagtattttataaatgaagtgaaattagcgaagaagttttacattgtaaagtgagcaaaaatatttaccattcaactggcaaaatttacaatctgcagcccttagcctgagaaaatgcacattaacagaataatcatcaagtccgatagaggcataacttacgtcctcaaaaatatcagaaataaatgagttgaaattacaaaaattaacttcacttaacatcttgaacaccgcagaaatatatctatcatgcattatcttgacttcgataaccttagataaacttgaatgcgacttacatttgaagagatcaaagagaaagtaaatcagcatatttttattgtccgaaatccattttaaaattttattacgtgcacatggtaatatatacactggatttttgaaagggtttgaaacgtcaaccacaagggaacaataaccatgaggatttattccacttataattaagtcactaagtcctttcactgcattcaaatagttatcaaaacaaacctcatataaactggtactatgaactgcacatttagattcaaacaaccatctatgacgcagataaccaatgcctttagagtgtatatcttcaacaatacatttgtgacagtaacgaatgtttgagatgtttaccaatggatatgaattagttatgtgaaaatttttccgacaggcatcttcaacagcgttaaaatacccgtaaacaccagaagataacgacactatattggaagttagtatataaccatttctagtggcaagaatgtcatatatatcctgcaagctatgcaatttgtacatatcaatcagttcgaaacgaggaaaggcatcgtaccttagtgcgccatgctttgatattatgttcctgcaattggataagttatacattatctgtgaacgcagaagaaaactgtgccacaattcattttcgtaaaccatataactccctcttatttaattagttccatttttctgagaagtatcattgtcattggtagtttatctctgtatttcaaaagccagccatgccctcccagtaaagcatctagacttgtaagtgacatcgagtactgcccctgagataaaacatcatttattaatgatgatgagataatatctctctcgctccagtctactcttttatttttatagcatcgtattgttttaggaagacaggaattaagccagtcacattcatgtttatttagccaatagaaacttgcataacaactttctttgactaactttcgtgttatagaaacggattgattatgtataaatcttaatattttctgcttatgacgccgtcttaaagaatcttttttacattttttacgccatgagcataaaccgtaacaagatgaaattacagaggatacagctccttccgataatgagtttttctcagctatggatgctagactaaacccccttacagccatagacttgataagcaattcagtgaatatattaatttttgtgtttcgcttaaacgccctcaggtattttttataaataagtgttttaatgtaacatctgctgcgactaaattccttcccaaggttgctaacactagtattattttcaactatatgaaaactgtatttcttatgacttttaaagatttctttctttttattagtacgacttcctgcatacgttggccagcaagtatttaacaaacaataacaaagcaaaagatgctttgtgggatgctgacaacatttgtctttgagtataggctcccagtaatgataatcagttagggatgttggtataagtcccgatgaaccctcccccaaataactggcacttagcataaaca

SEQ ID NO: 601 - DNA, 87608 bp, Escherichia coli
  modified_base (294)..(294): a, c, t, g, unknown or other
cccccccctaccgttgtcgcatcaactgggtggatgctggcaacttacctgatttagtgtatgatggtgtttttgaggtgctccagtggcttctgtttctatcagctgtccctcctgttcagctactgacggggtggtgcgtaacggcaaaagcaccgccggacatcagcgctatctctgctctcactgccgtaaaacatggcaactgcagttcacttacaccgcttctcaacccggtacgcaccagaaaatcattgatatggccatgaatggcgttggatgccgggcaactgnccgcattatgggcgttggcctcaacacgratttacgtcacttaaaaaactcaggccgcagtcggtaacctcgcgcatacagccgggcagtgacgtcatcgtctgcgcggaaatggacgaacagtggggctatgtcggggctaaatcgcgccagcgctggctgttttacgcgtatgacaggctccggaagacggttgttgcgcacgtattcggtgaacgcacgatggcgacgctggggcgtcttatgagcctgctgtcaccctttgacgtggtgatatggatgacggatggctggccgctgtatgaatcccgcctgaagggaaagctgcacgtaatcagcaagcgatatacgcagcgaattgagcggcataacctgaatctgaggcagcacctggcacggctgggacggaagtcgctgtcgttctcaaaatcggtggagctgcatgacaaagtcatcgggcattatctgaacataaaacactatcaataagttggagtcagtataggctcccagtaatgataatcagttagggatgttggtataagtcccgatgaaccctccccaaataactggcacttagcataaacatgtgcgtagaatacatttttctttaaatttccatccaatgataataaattcaactttttaagtacatccatgtaattggggtgtgtaatatcttttcttctgattatatttagggactcataacaaaacttagcaaaatcgaagtctatctcattgctaagttgttctgtatacgaaacaggaggcatcagtccaatacgtatgtgcggtgaagaagggacatggatgctttcaagcgctaccggatgccgatggcaggttgtaaccccatgaagctgatgcgccagatgccaataagtaacaccataatgaaaagtatcttcacgagcgcaaaccgggcaaaacttcaatagtgtgcgctgccctagtgaaaaattactaaggcggcacaatcgattaagcctggcaggggtcgtgttgaaatccataatttcattacgactgattggtagtgcccaggcaaaaagagggagtaaagtctgttcatgccagagctgatctgcactttcggatgtatgaagagaaatagcctttaatcctgaattgagaattggatggacgttcatatcaggtttgttgaaaatgatcgttaacagagaagatggggacataccgtacacggtagttgtccgacaaaaccggctgaacaaggattcatcaggcaaaacaggcaacattctcatttcccacacctctctttgaccgttacgaactgttacctcattacaatttattaagtggatctatatttataagcccgcaacgctgaagagcatcgtaggtatttttcttttcagctgttctgttgataacaagatcgtggtcaagagacagtattttctcgtcgaaattgcgcaaaacctcgtctatttttcctacgaattccttgtgctgtggcctgtctatatccccagggatcaaagactttagggacttctctgccatgattttagccgaagcatcaccctcattagatgcagagagccatttagcttcctcatcttcagtcgcggcccccgggagtggagtatccttatattcctccgtatgactcacgagtaccggtacagaggccgacaagactgcgccagtgatgatttcattgccgctaccgataacctttaattgtgccccccgataaatcatctgagccaatccaatattgcctttagataaaatgaataatttttcgtttaactcatcatttaatggagtttcaacatttgtccattgtaatggccataaataatgaataaacgattgccagtcttgtgaatcgtatctaacattcttaattttcatgtaaccaccagactctgcccgcctggcaattctcattttctttgtcagcgtctcgtcaaaaggatgatttccacaaaaaaccatagatacccccatggaatctacaatttcatgtaaaaaatcaatcaacttactctcacccccggttcttgaaaatttaagcctctgcatttcatcaataacaaggatacccaaaaatgatgatttaattctttgtgcaatctggcgagccagagcaccatttctaatctcaggtgtagttcgttcaataccaattgcatcatctaatttttgtaaaatctcttcacaaaggtctctcacacttgaattgtatggacaattaatctttacccatacaatttgcttactgaagccgggaaaaactcctttatagctgctgtgttctataatctgagggaaatgatccatgacttgctcaatcatggtagtttttccagaaccactcattccaactatcgtaatagtttcagcctgggatttaaaatatccactttctggctcaatatcaggacgctcatttccatagtaatgaagatattgaattgttccgctttttaaaggattacgagctgcatagctttccctaagtgcccgtaagatcatcttataagcctggataagattggtttgagggcaacggaatttctttatacgttcgacatactgctctctaacattcgccggggcagtccagcggattttttcgtcaatttcggggaaataactcatttccagaagtacttcatcttccgtaagcgcttcaggaagtgcttcaattaagggattgccacgatactcaggtaactcctgttctttatatatcgctgaaacgcgccgtataagattcattattctgcgtcctcagtcttcttcttaccttttaaccatctttgtttctcctcccggccaggcaaaagcagaacattactggatgaaggaagtaggggttcagatcttccattagcaacatgagttcgccctaatgaatcaagttcatttttcctgttctttttaatatctttaccatgtacccggcgagattcgtatatttcatttaatctttcgttacctttcctgttaaattcatctttattattgatattgctgagcgaatccagagtaaataaattaatttctttttgagtatctacccaatcagccattacatctgtatcaagatgagctttccctttaaatacatctcttttcttaagtaggtaatgttttttgaaaatgctatttttgtcaaatcttacatatatataatctacgcaattgtcatctattcttgcttcacaagtggttcttccaaatactctgacacctgatgcaatttcaggatcacattcataaaaaagattattgtactgaatcccaccggcggtaatgttagcgttcacagggattaacaatcgtgcgatcacttcgtcggccccaacggctcttgcgctgaatctcccgtgctttaagcttatcatccaactattttttggtgatattacgagatcattttcaatcagtaagggattgatataagccagttcctcatacgttctctgattatgtgcaagtatctcccgaatcagtaaagacgtgacctcctgaatcgttaaacaagccctggattgcggtgttggctctcctttaacaatctttccccttcgtgttgttccaataagcctatgaataacctcatcattcagaatgccgaaacagcgttcaacaatgctttttctgtcgcctctaccgactggcgcaaactcaagttttgtcaggggggtcatctcttcctgaggtttaagaccaatcatctccccgttgtcacacatcaatgttaatggaatgtgagaacaaggccaatcatcatcagtaatagagattccaaataatctacaatattctttttttggcataaagcaatttgctaacgcttgtcgggcggctcgccatgaagcatggtataaagaaacatgaaggccaacaatcattcttgttgcacgatccaccactgtataaatagtaggacgcccaatgacttttcgtctgtttaaactcgaaataagatgtacatcagcgacagttgagtctatttcgaaaacatcacccggcaaaacagttgtattagccacactacctaaaagcgcccgcattttgaggtctatttcttttttcgtgttcttcttatttatcgagaaatctttagtgaagagttttttattccagtatgaaaattgttttaaagaaggaacatatggagctctattttctaggtttgctgttttaatttcatccctaaaatacaaatcaatatgtctctctaatgttttctttatcgtatctccgttaactttataatgatacgtaatgagagattttctaatattatttatatctctttcattaagaatgaaaacacgtgatcgttcattaggtaatgctctgttttttttggaattcccaagtttaatttcatgtttgattctacttttcccagcggcgccacagttcgagaatgcgggtagcaatgcataaatatcctgcccatgtcgccaatacaacgccagaagcgttctgatagtatattgtgatatttttttatttcttgagtaatccattaaaaggtgcgactttttatgtaatgcatagtcgaacagaaacattctgtcatctacaagatctttaatgatattgtaattttcatctcgccttcctctgtctttatctgttaattctttctcatctactaacatatatgaaggatatatataatctttacaagttatgctatttgattcaatataatatttaaacattgaaaatgagaaagggattggcttacccgttctttctgattttattttaaacaaaattaacaaatcgacctttctgtcaaaatccaaaacacggtaaagtccctctgcaagcaaatcagtgccttgagagagccagactgaattcctaataatatccatttgcgttcagtcctatatagtggtcattggaaattatctttatcagaccggtttcgagtattggatatgataaatcaacatttatcatttttaatccaatcattgcctgcaataacatcatcgcttcttgtgcatctaccccaaagattgatgaaatcattgcacgtagtcctactatgggataaacatctggtttaagcttccataggattttatcaagaggatatttatcataaaattcagaaccatctcttaatacagaagtagcccagcaaatgtttttaccgacgacgttattgagttccgagccaacataaatttgaaactcaacatcaatcaactgccaaaacatcctctctatttcaagtttttgggcttcgcgttcaggtatgctctcgttatgttttactgctatagctttgtatcgaagtccgccttcaggagttctcaaggtcagtaaaaaatcggttgtcataacattcagaacttcgacaggtactcctcttactcccctcaccataggatgttgaaaatgtagatgatttgctatttgttgggtaagccggagaggaaagagtgggaattgttcccggatatcaatcaccgagtcattaaactcagccagatagaaaaagttactttcgacagaagaaaggagatgatggtttcgaaacgtcttaaggccaaagactatcgaacggtttccacgggatttaacgtcctgagctctaagccagggctgataactttggccatagcccactcctatgccgtcacctagcgcattttcataatccaaataggatttgagacgcctacccctagccatgatcgtaccctaaaaacgacattgatacgtacctatatgtgcattttatagtctccaaccctataaccacacattcagtaagtatacaacattagcgtcgttttttgagaatggttacaactttagtgctttgtgtacaactttattgtcctcggacagcaatcaaatcctgcgcacaagcccacgcactcgaccacgcccactggaagttatagccccccagccagccggtaacgtccatcacttcgccgatgaagtacagcccaggcactttgcgcgcttccatcgtccgtgaagagagttcgttggtgtccacgccgccgagcgtcacttcggcagtgcgatagccttcagtgccgttgggttgtacgcgccagtcggtcaatgtgctaatcagtgcctgttggtcacgcacgttgagctgttttagcgaaacatccgggatttgcccgagttgctgtaagcgttcaaccaaccgcttcggtagatgaaccgccagtgtgtttttcaggctctgattcggatgtgcgttacgctgctcattcaggaaggtttcgagatccacatccggtagcagattgatactgacaaattcacccggttgccagtagctggaaatctgcaacaccgccggtccagacaagccgcgatgggtgaagagtaagttctcacggaaaacgatgccgttttcagcggtaatcacggaaggcaccgccacgcccgccagcacctgtaactcttcgagcaacggtttatgcagagtgaatggcaccagaccgcgcgggtcggcagcacgttgaggccaaattgttcggcaatcttataaccaaacggcgacgcgcccagccccggcattgacagcccaccggtcgcgatgaccagcttttcgcaaccgacagtcatgccgttcagttcaagcgtgaagcctgtttcatccttcgccacactcagcacttcgctacgcaatctgaaggttacattgcccttctcgcactcatccaccagcatgtcgacaatctgctgcgcggagtcatcgcagaagagttgtcctaacgttttctcgtgccaggcgatgccgtgtttattgaccagatcaatgaaatcccactgggtaaaacgcgcgagtgcagacttacaaaaatgcggattctggctcagataagcgcctggttcgacataaaggttggtaaagttgcagcgcccaccgccagacataaggattttgcgccctggttttttaccattatcgatcagcagaacccggcgtcctgcctgacctgccagcgcagaacagaacatacccgccgcaccagcgcctataataatggcatcaaacctttccacgttgcgctcctcttagaaaaaacgggcgtgaattgtaaagattcctcagtggtcgcaccagcatcaatattactaaaaggaagtatttgcctgaattatataagataattattttttgagtgaaatccatacaggaggcaaatcaaaaaaagtctatatttcactttgcccgcgccgcgaaagtcactgataatgcgccgcgttcatgtcctcaaaatggcgtaacgtcctatgctacatttgtttgctggcctggatttgcataccgggctgttattattgcttgcactggcttttgtgctgttctacgaagccatcaatggtttccatgacacagccaacgccgtggcaaccgttatctatacccgcgcgatgcgttctcagctcgccgtggttatggcggcggtgttcaactttttgggtgttttgctgggtggtctgagtgttgcctatgccattgtgcatatgctgccgacggatctgctgcttaatatgggatcgtctcatggccttgccatggtgttctctatgttgctggcggcgattatctggaacctgggtacctggtactttggtttacctgcatccagctctcatacgctgattggcgcgatcatcgggattggtttaaccaatgcgttgatgaccgggacgtcagtggtggatgcactcaatatcccgaaagtattaagtattttcggttctctgatcgtttcccctattgtcggcctggtgtttgctggcggtctgattttcttgctgcgtcgctactggagcggcaccaagaaacgcgcccgtatccacctgaccccagcggagcgtgaaaagaaagacggcaagaaaaagccgccgttctggacgcgtatcgcgctgatcctttccgctatcggcgtggcgttttcgcacggcgcgaacgatggtcagaaaggcattggtctggttatgttggtattgattggcgtcgcgccagcaggcttcgtggtgaacatgaatgccactggctacgaaatcacccgtacccgtgatgccatcaacaacgtcgaagcttactttgagcagcatcctgcgctgctcaaacaggctaccggtgctgatcagttagtaccggctccggaagctggcgcaacgcaacctgcggagttccactgccatccgtcgaataccattaacgcgctcaaccgcctgaaaggtatgttgaccaccgatgtggaaagctacgacaagctgtcgcttgatcaacgtagccagatgcgccgcattatgctgtgcgtttctgacactatcgacaaagtggtgaagatgcctggcgtgagtgctgacgatcagcgcctgttgaagaaactgaagtctgacatgcttagcaccatcgagtatgcaccggtgtggatcatcatggcggtcgcgctggcgttaggtatcggtacgatgattggctggcgccgtgtggcaacgactatcggtgagaaaatcggtaagaaaggcatgacctacgctcaggggatgtctgcccagatgacggcggcagtgtctatcggcctggcgagttataccgggatgccggtttccactactcacgtactctcctcttctgtcgcggggacgatggtggtagatggtggcggcttacagcgtaaaaccgtgaccagcattctgatggcctgggtgtttacccttccggctgcggtactgctttccggcgggctgtactggctctccttgcagttcctgtaatcgtacacaccaaaacgagcgggtcagtttactggcccgctttttttatgcgttattattgctgaagtgcttaatgccaaatcatcaatgcaatcaggctgaccaccaccagaccacacaatgcgctggtcagaataaactgccgacgcacccgctcacagcggcgaataaattcatcatcgtgatgatcgcgataacgttgggcatagatataccaaacgagacgcacctgtttgttgggttggccatgtgaggtaaaaaagccccctccatcaacatattgatagagcaatggatcgcagttacgcagtaccactaacaacgcgcgtagtgatgagaaatagcgcgccatgttaacaatgcaaacgacacataaagcccaaaataatgcgacggtgcttatcatacctcctccccggcgacctgcccgcggagttccaccccggggctaccgctcccgatacgctgccaatcagttaacaccaggtcctggagaaaccgcttttgtggtgaccaacatccgagcggctctatagatagtgtaggagatcaggttgttttttttccagaaggttaaccactatcaatatattcatgtcgaaaatttgtttatctaacgggtaagcaaggcggattgacggatcatccgggtcgctataaggtaaggatggtcttaacactgaatctttacggctgggttagccccgcgcacgtagttcgcaggacgcgggtgacgtaacggcacaagaaacgctagctggccagtcatcgacaactttatggaaggagtaacactatggcttataaacacattctcatcgcagtcgatctctccccggaaagcaaagttctggtagagaaagcagtctctatggctcgcccctacaatgcgaaagtttctctgatccacgtagatgtaaactactctgacctatacaccgggcttattgatgtgaatctgggtgatatgcagaaacgcatctctgaagagacacatcatgcgctgaccgagctttccactaatgcaggctacccaatcactgaaaccctgagcggcagcggcgacctgggccaggttctggtcgatgcaatcaagaaatacgatatggatctggtggtttgtggtcaccaccaggacttctggagcaaactgatgtcttccgcacgtcagctgatcaacaccgttcacgttgatatgctgattgttccgctgcgcgacgaagaagaataatcatccctccacgacgtgttcctgaacgcccgcatatgcgggcgttttgctttttggcgcgccttgttacctgatgcagcgtaaaccccttatctggcctacgatctgcgtacgcaatcaaaatctcctgccaatacaacatttaacaccataatattttccatcattagtgtgatcagctggttattttctgttgtaatagtgtattaatctattcaccgcatcaatattaagaatctctgacagatgtaaactttttcgcgcgttatcccttacgcgttcatacttttcaggatggtattggaaggttaataaatatgaatacaacaacacccatggggatgctgcagcaacctcgcccatttttcatgatcttttttgtcgagttatgggagcgattcggctactacggcgtgcagggcgtactggcggttttcttcgttaaacagcttggattctcgcaagagcaggcttttgtcacttttggtgcttttgctgcgctggtctatggcctcatttccattggcggctatgtcggcgaccacctgctggggaccaaacgcaccattgttctcggagcacttgtgctggcgattggctacttcatgaccggcatgtcgctacttaagcctgacctgattttcatcgccctggggactatcgctgtcggtaacggcctgtttaaagctaacccagccagcttgctttcgaagtgctatccgccgaaagatccgcggcttgatggcgcattcaccctgttctatatgtcgatcaatatcggctcgttgatagcgttatcgctggcccctgtgatcgctgatagattcggttattcagtcacctacaacctgtgcggggcggggttaattatcgcattactggtttacatcgcctgtcgtggaatggtgaaagacattggttctgaacccgacttcaagccgatgagcttcagcaaactgttgtacgtattacttggcagcgtggtgatgatcttcgtatgtgcatggctgatgcacaacgtagaagtcgccaatctggtgctgattgttctctccatcgtcgtcaccatcatcttctttcgtcaggcattcaagctggataaaaccgggcgcaataaaatgtttgtcgcctttgtcctgatgctcgaagcggtggtgttttacattctctacgcccagatgccaacatcgctgaacttctttgccatcaacaacgtgcatcatgaaattctcggtttttccatcaacccggtcagcttccaggcgcttaacccgttctgggtggtactcgccagcccaatactggcaggcatttacacgcatctgggtaacaaaggcaaagacctctcgatgccgatgaaatttactctcggcatgtttatgtgctctctgggctttttgacggctgcagctgcgggaatgtggtttgcggatgcccaggggctgacatcgccatggtttatcgtgctggtgtacttattccagagcttaggtgaactgtttattagcgcccttggcctggcgatgattgctgccctggtgccgcagcatttgatgggctttattctcgggatgtggttcctgacgcaggctgccgcgttcttgctgggcggctatgtggcaacatttaccgcggtgccggacaacattaccgatccgcttgagacgttgcccgtctataccaacgtgtttggtaagattggtctggtcacactgggcgttgcagtagtgatgctgttgatggtgccgtggctgaaacgcatgattgcgacgccggaaagccattaattattcttgcagaaagcagggtagcgttatcgctaccctggtttacttttacactggcgtacctgcataaatatcaaacctatgccctttagtgactaccgcgtttggcgtggcgacattcgccagcggtggcgcgtagtccgggcgctttaccaccacgcgtttggtcgccagcaagcgtgcaggctccagtaatccatcggcatcaagatccggtcccaccagcgactgaaagacacgcatctcttttttcactagcgcgcttttctgcttatgcgggaacatcgggtcgagataaaccacctgcgggcgcggggtaatatcagtcagcgccgtcaggctggaggcgtgaattaactgcaaccgctcctgcaaccagccgccgatttccgcatccgcataaccacgcgccaggccgtcgtcgagcaatgcggcaacgactggattacgctccagcatccgcacgcggcagccgactgaagccagcacaaaggcatcgcgccccagccctgcggtggcatccaccacatccggcaaataatcgcctttaatgcccaccgctttcgccaccgcctcaccgcgaccaccgccgaatttgcgtcggtgcgccatcgctccgccaacaaaatcaacaaagatgccgccaagttttggctcatcacgcttgcgcaattccagatgttccggcgttaacaccagcgccatcaggttgtcttcatcgtgctccagcccccagcgggccgccagaacagataaggcgccgtctccggcgcctgtttcatcaattaagcagattttcactgaatgatcagcccttaatgccgtaatgctccagcatcgcatccagctgcggttcacgaccacggaagcgtttgaacagatccatcggctcttctgaaccgccacggctcagaatgttgtcgaggaacgactgcccggtttcacggttgaaaatgccctcttcctcaaagcgcgagaaagcatctgccgccagtacgtcagcccacaggtagctgtagtaacctgccgcataaccaccggcgaaaatatggctgaaagcgtgcgggaaacggccccaggacggagatggcaccacggcaaccagtttcttgatttctgccagagtttcgaggatttttgccccctgatccgggcggaactcggcatgaaggcggaaatcaaacaggccgaactccagctgacgcagaataaacagcgccgcctggtagttcttcgccgccagcattttatccagcaactctttcggcagcggttcgccggtttcatagtgaccggagataaacgccagcgcctccggctcccagcaccagttttccataaactgactcggcagttcgaccgcatcccacggcacaccgctgataccggaaacaccagcggtttcgatgcgggtcagcatatggtgcaggccgtgaccgaactcgtggaacagggtgatcacttcgtcgtgagtgaacagcgccggtttaccatttaccgggcggttgaagttacaagtcaaatacgcgaccggtttttgcagcgaaccatcagctttacgcatctggcctacgcagtcatccatccacgccccgccgcgcttgttttcacgggcatacagatcgaggtagaagctgccgcgcagttcgttattttcgtcatacagttcgaagaaacgtacatccggatgccagacatcaacatctttacgctctttagcggtgatgccgtaaatacgtttcaccacttcaaacaggccgttaaccgctttgttttctgggaagtacggacgcagctgctcgtcgctgatgctgtagaggtgctgtttttgtttttcgctgtagtacgcgatatcccacggctgcaactcatcgacgccaaattccgctttggcgaaggcgcgcagttgtgccagctctttttcgccttgcggacgcgcgcgttttgccagatcggttaagaaatccagcacctgctgcgggttttctgccattttagtggcaagggatttaaaggcgtagttttcaaagcccagcagttgcgccagttcgtgacgcagagcgaggatctcttccatcaccttgctgttatcccatttaccggcgttcgggccttgatcggaggcgcgggtgctgtaagcgcgatacatctcttcacgcaaggcctggttgtcgcagtaggtcattaccggcaggtagcttgggatatccagcgtcagcaggtagccttccagctctttcgcttcggcctgggcttttgccgcagccagcgcgctttcaggcatccccgccagctccgcttcgtcggtaacgagtttggtccagcccatcgtcgcatcgaggacgttgttgctgtactggttgcccagctcggaaagacgagtggcaatctcaccgtagcgttgttgtttctctattggcagaccgatgccagagagttcgaagtcgcgcagtgcgttatcaaccgcttttttctgagccgtgttcagcgtggcgtaatgatcgccatcgcgcaggtcgcgatacgctttatacagcccttcatgttgccctacccaggtgctgtattccgacagcagcggcagggtttgttcgtacgcttcacgcagttccgggctatttttcaccgagttcaggtggctgaccggggagaagatacgccccagcacatcgtccacttccgccaacggctggcagagattttcccaggtgtacggtgctccttgcgctactacgcgctccacattttcgcggcagtcgttcagcgccttagtcacggctggaacgacatgttccgggagaattttagaaaacggaggcaattcaaagggagtcagtaacggattcgtcattcgcgcagtcctggttaaagaggttaaggaagcgctcaacaggcgctttacataatgtgtgtagcatggggttaagtgtagtgaatttcaatgagaaacgttacgctttcgcggcggcggcctcttttcggtatactgtcctgatacgcttttgtgcgccccgaatacgggccgatttttacttaccggaacacctttacccatgctcagttatcgccacagctttcacgctggcaaccacgccgacgtccttaaacataccgttcagagcctgatcatcgagtcgctgaaagagaaagataaaccgtttctctatctcgacacccacgcaggggccgggcgttatcagttaggcagcgaacatgccgagcgtaccggcgaatatctcgaaggcatcgcccgtatctggcagcaggacgatttgcccgcagaactggaggcgtacatcaatgtggtaaaacacttcaaccgtagcggtcagttgcgttactaccccggttcgccattgattgctcgccagctactgcgcgaacaagacagcctgcaactgaccgaactgcacccgagcgattacccgttgctgcgttctgaatttcagaaagacagccgtgcgcgcgtcgaaaaagccgatggtttccagcagcttaaggccaaactgccgccggtttcccgccgtggtttaatccttatcgacccgccgtatgaaatgaaaaccgactatcaggcggtggtcagcgggatagcagaaggttacaaacgtttcgccactggtacttacgcactgtggtatccggtggtgctgcgtcagcaaattaagcgcatgatccacgatctggaagcgaccggtattcgcaaaattctgcaaattgaactggcggtactgccagacagcgatcgccgtggcatgaccgcttccggcatgattgtgattaacccgccgtggaaactggaacagcagatgaataacgtgctgccgtggctgcacagcaaactggttccggcaggcaccgggcacgccaccgtaagctggatcgtgccggagtaattgcagccattgctggcacctattacgtctcgcgctacaatcgcggtaatcaacgataaggacactttgtcatgactaaacactatgattacatcgccatcggcggcggcagcggcggtatcgcctccatcaaccgcgcggctatgtacggccagaaatgtgcgctgattgaagccaaagagctgggcggcacctgcgtaaatgttggctgtgtgccgaaaaaagtgatgtggcacgcggcgcaaatccgtgaagcgatccatatgtacggcccggattatggttttgataccactatcaataaattcaactgggaaacgttgatcgccagccgtaccgcctatatcgaccgtattcatacttcctatgaaaacgtgctcggtaaaaataacgttgatgtaatcaaaggctttgcccgcttcgttgatgccaaaacgctggaggtaaacggcgaaaccatcacggccgatcatattctgatcgccacaggcggtcgtccgagccacccggatattccgggcgtggaatacggtattgattctgatggcttcttcgcccttcctgctttgccagagcgcgtggcggttgttggcgcgggttacatcgccgttgagctggcgggcgtgattaacggcctcggcgcgaaaacgcatctgtttgtgcgtaaacatgcgccgctgcgcagcttcgacccgatgatttccgaaacgctggtcgaagtgatgaacgccgaaggcccgcagctgcacaccaacgccatcccgaaagcggtagtgaaaaatgccgatggtagcctgacgctggagctggaagatggtcgcagtgaaacggtggattgcctgatttgggcgattggtcgcgagcctgccaatgacaacatcaacctggaagccgctggcgttaaaactaacgaaaaaggctatatcgtcgtcgataaatatcaaaacaccaatattgaaggtatttacgcggtgggcgataacacgggtgcagtggagctgacaccggtggcagttgcagcgggtcgccgtctctctgaacgcctgtttaataacaagccggatgagcatctggattacagcaacattccgaccgtggtcttcagccatccgccgattggtactgttggtttaacggaaccgcaggcgcgcgagcagtatggcgacgatcaggtgaaagtgtataaatcctctttcaccgcgatgtataccgccgtcaccactcaccgccagccgtgccgcatgaagctggtgtgcgttggatcggaagagaagattgtcggtattcacggcattggctttggtatggacgaaatgttgcagggcttcgcggtggcgctgaagatgggtgcaaccaaaaaagacttcgacaataccgtcgccattcacccaacggcggcagaagagttcgtgacaatgcgttaaatgttaaagggctaagagtagtgtgctcttagcccttaattacgtttccgctatcagttcagaagctgaagcagaaagcggatcagttccagcagcgcaattaacgccccaagaacgatgattgctttatcaatcacccgttttctccatgcgatggagtgagaatgcatccgcttactcatccactgcctgtcacggcgcatgccctattgttagataatggcattctcactccggccagagcatcagttaacggcaccacccgtacttctgaccaggactttgaaagcgtttatgcgcattaccagagtgaaaatgcctcagagctaactggataatcatacagtacattcaggttataaaaccagcatgtccttgcaatagtttcagtatggtattagcattgatgcgttagataatggcattctcactccagccagtgccaccaactcagggctggaaagtaaaaaaccgacgcaaagtcggtttttttacatccggattcggacaaggcttaatatgacgatgacccagtgaaagtatataaatcgtcattgcgatatataccgaagtgccccctccgccagctgaagaaatcgctaattcttgcaatgttagccactggctaatagtattgagctgttagataagaactctctcactccagccagagccaccaactcagggctggaaagtaaaaaaccgacgcaaagtcggtttttttacgtcctgattcagacctcttttcaaatgaatagccaactcaaaattcacacctattaccttcctctgcacttacacattcgttaagtcatatatgtttttgacttatccgcttcgaagagagacactacctgcaacaatcaggagcgcaatatgtcatttctgttacccatccaattgttcaaaattcttgctgatgaaacccgtctgggcatcgttttactgctcagcgaactgggagagttatgcgtctgcgatctctgcactgctctcgaccagtcgcagcccaagatctcccgccacctggcattgctgcgtgaaagcgggctattgctggaccgcaagcaaggtaagtgggttcattaccgcttatcaccgcatattccagcatgggcggcgaaaattattgatgaggcctggcgatgtgaacaggaaaaggttcaggcgattgtccgcaacctggctcgacaaaactgttccggggacagtaagaacatttgcagttaaaaatttagctaaacacatatgaattttcagatgtgttttatccgggaggcattatgttactggcaggcgctatctttgtcctgaccatcgtattggttatctggcagccgaaaggtttaggcatcggctggagtgcaacgctcggcgcagtactggcgttagttacgggcgtggtccatccgggtgatattccggtggtgtggaatatcgtctggaacgcgacggctgcgtttatcgccgtcattatcatcagcctgctgctggatgagtccggcttttttgaatgggcggcgctgcacgtctcacgctggggtaatggtcgtggtcgcttgctgtttacctggattgtcctgctcggtgctgccgttgccgccctgtttgccaatgatggcgcggcgcttattttgacaccgattgtcatcgccatgctgctggctttagggttcagtaaaggcactacgctggcgttcgtgatggcggccggattcattgccgataccgccagcctgccgcttattgtctccaacctggtgaatatcgtttccgctgatttctttggcctcggctttcgcgaatacgcctcggtgatggtgccggtggatatcgccgcgattgttgccacgctggtgatgttacatctctattttcgcaaagatattccgcagaactacgatatggcgctgctgaaatctcccgcagaagcgatcaaagatcctgctacgttcaaagctggctgggttgttttactgcttctgctggtgggatttttcgtcctggaaccgctcggcattccggtgagcgccattgcagctgtgggcgcgctgatattatttgtcgtcgctaaacgcggtcatgcgattaatacgggtaaagtcctgcgcggtgccccctggcagattgtcatcttctcgctcggcatgtatctggtggtttatggcctgcgcaatgccggattaacggaatatctttctggcgtactcaacgtgctggcggataacggcctgtgggccgcgacgctcggcaccggattcctcaccgccttcctctcttctattatgaacaatatgccgacggtactggttggcgcgttgtccattgatggcagcacggcatctggcgttatcaaagaagcgatggtttatgccaatgtgattggctgcgatttgggaccgaaaattaccccaattggtagcctggctacgctactctggctgcacgtactttcgcagaagaatatgactatcagctggggatattacttccgtacagggattatcatgaccctgcctgtgctgtttgtgacgctggctgcgctggcgctacgtctctctttcactttgtaatgagatactgatatgagcaacattaccatttatcacaacccggcctgcggcacgtcgcgtaatacgctggagatgatccgcaacagcggcacagaaccgaccattatctattatctggaaacaccgccaacgcgcgatgagctggtcaaactcattgccgatatggggatttccgtacgcgcgctgttgcgtaaaaacgtcgagccgtatgaggaactgggccttgcagaagataaatttactgacgatcggttaatcgactttatgcttcagcacccgattctgattaatcgcccgattgtggtgacgccgctgggaactcgcctgtgccgcccttcagaagtggtgctggaaattctgccagatgcgcaaaaaggcgcattctccaaggaagatggcgagaaagtggttgatgaagcgggtaagcggttgaaataaagcggcgatatccactgcccatagttggtaaagtgcgctttgtttatgtcggatgcgacgctaacgcgtcttatccgacctacaaaaccgtgcaaattcaatatatggcatgaaatatgtagagcgtagcgcatcaggcaattttgctatttacgcagcactcctcgcgtaagaattcaattatcgcttccagcattgcgtattgcgaaacacacatcagcgtccgactctcacggttttgtttgaccagtcctaccgataccagtgctgatatatggtggctgagtgtggagccaggtatcccaagctgcttttgcaactcaccgaccggcaacccttgttccccggctttgacaagatgtttaaatatgaacaaacgggtcgggtgacctagctctttcagcgctttagcgacttcttccaactgcatatgacacccctctgtctggttgatatttcgataataccagaaatatcttgatctgaatttcatttcgattattctggaaatatagatttatccaatgaggttacgtatgagtagttggcttgcgatgctgcaagatgccgcagagatgtttgtgtttctcgccgtcgagctttcgttgctgtttatagtgattagtgccggtgtcagcctgataagacaaaaggtgccagaccataaaatccagcagatgatgggggccagaaaagggagaggctatctcctggctgctctgttgggagccgttaccccgttctgtagttgctcgacaatacccatgctacgtggattgttgtcagcgaaagccgggtttggtccgactctcacttttttatttgtttcaccattacttaatcccattatcgtcggactaatgtgggtgacctttggttggaaagtcaccttgttgtacgcgattatcgccaccggcgtctccgttcttgccagtattatcctggattctctggggtttgaacgtcatatcattgccagtaaaagctcatcagcaaattgttgtgctccagccaaagcgtcggcaaaaactttgccggggacgacatatacgccaatagaagtgagttgctgtagtccaacggctaaagccattgagaaacccgtcgttaactgttgcaataccaaagcagtggcaagtattaatcccataaaactagccaccaaagatgcgttgcaacagtttaaagatgtactgccatatcttttgttaggggtattaataggctcttttatttatggctttattccctcagcgtggattgccgctcatgcaggagcagataatcccttcgccatcccattaagcgccgttgtcggtattccgctgtatatccgggctgaggcggttatccctctggcatctgttctgatgacaaaaggaatgggtctgggagcattaatggcattaatcatcggcagtgccggcgcaagcctgacggaagtgatattacttaaatcaatgttcagaatgccgatgatagctgcattcctgacggttatattaggtatggctatcttgatgggctatttgactcaattgctattttaaatagatgccagcagtaaactataagatgcatagttagtgccatatccttctaagtagaaaatcatagacaggataatccttaaaaatcacaaatgatttaactaatgcattgagaatgatgacggctcggtcaacaagtcatcaacagacaataaccacgtaatcatgcttctctgacattttatcggagaagcaatgactctttgtctcagtaccctcctcctttttaaaaggcagatttcagtcgctaatacaacacatttttaaatacactttaacctggttcattattacacatctaaaacatcacaaaaatattacttcacacactatcggagaacaaaataactttttaaaatgagcgctttttgatagttgttaacgttttcctttacgatactatcactgcctttttttatacacaaatattaccgggtggaaatgaaagggaatttaaaggtaattatatcaggaagatataacgcattatatttattgtgtgtagaagaaaatccattcctgttctaattatccaatttaaacatcttagcataaaacaaatgatgaataaggaattttatgtcaattgactttaccccaggtataataaatacatatcacggcgatatttataactgcacaacaaataccgataatgctaaaacgccagacacaccgaagtggccttgcgataattgggaagaacaacaacccattaattccacattctctggagaaggatatatctctgatcaatatgatttagcgcaacaccaacttcaacaaattaatgcgtgccacacgaacactacatatacaaatgcagactactcaaaagttgtggctcaacttgtaagtcttattactaacattgaaacgataagttcgacacaacttacgcaacagacacaatcaatacttaatcagattaataacattagatatgaaaaaaacaaaagtgctgaatgtcgaatcattgttgtcgctaatcctaaacccgacaaggcaatcataactaaaattagcgtagaagagggaatacccataacattcagtgtccaaaccatgttttcagatactaattttattgctgaacaacgagctgacttaccaactaatataaaagatattcaaagcctgtatcaaaaaatgacgaagttatatattgagcacagtgaaaataaaaacaggatgaaagtctttgccggaaccaactttattgatttcaatatgacaggacagaacctgtccgggttcgttctaaccttgtcaaggttttatttcgaagatctacttaatataaatttcactgacgcaaatttaggtgacactattttttacataaagaacaccctaccccccaaattatataaagatggacaatatcttgacaaacaaatcgaaggtttattttcaacattattaaccattaatgacaactttttacgagcaaaagcggaaattgcttcgacaataattaaatttttagaggctaggataaccaatctttcatacaatgacatattaacatatcagcaagaattccaaaaacaatgttataagcaagttaaagcctttgcgacactctctcgatacaataaaattcaaacatgggcagaaatgtctgaatatcagttcgaagtatttcaatacgagacgcttaaccccaaaaaaatgtcacacacgccttatttaaagagccacttcctaatgaaaaagatataaattatggggtggaaatagaaataccatctggcaaaagaattcgcttatcaaatcattatcagaatataataccataatattgattattagcactttataattattgaataaaaatagattttatgtaattttaaaacaaagggttatattattgggcgatggatactcataccacgccccaaaataacggaattgaactaaacagaagggatataaacatcagacaggtttacgttactatcaggcatatcacctcagaatcagatgaaaactataaagaaatatctattatggttttaatatttgttgataaggatagtaacatgaacatgacaaaaggtgcactcatcctcagcctttcatttttgcttgccgcatgtagttcaattccgcaaaatatcaaaggcaataaccaacctgatattcaaaaaagttttgttgctgttcataaccagccggggttatatgttggtcaacaagcgcgctttggtgggaaggttatcaacgttatcaatggcaaaacggatacgttgttagaaatcgctgtattaccgttggatagctatgcgaagcctgatattgaagccaactatcagggccgactgctcgccagacaaagcggcttccttgatccagtgaactatcgtaatcactttgttaccatcctcggtaccattcagggtgaacaaccaggctttatcaataaagtcccgtataacttcctggaagtgaatatgcagggcatccaggtgtggcatttgagagaagtggttaataccacctataacctgtgggattacggctatggtgcattctggccggaaccgggctggggtgcgccttactacaccaatgcggtgagtcaggtaacacctgagctggtcaaataacaccaccgaaagatgcagatgctttctcagcatctgcatcatgtattacataaaattaatatacagtaagctaactattattattataagccctgtcctgttaattacctttggcaaactgattataaagttaatgtccgcaccaggagtcggttatgtttcttataattaccagggatacgatgttcttcaccgcgatgaaaaacattctgagtaaaggtaatgtcgttcatatacagaacgaagaagagatcgacgtaatgttgcatcagaatgccttcgtcattattgatacattaatgaataatgtatttcattctaattttctcactcaaattgaacgattaaaacctgtccatgtgattattttctccccctttaatattaaacgctgcctggggaaagtgccggtgacctttgttccgcggactatcactatcattgattttgtcgcactcatcaatggcagttactgctctgtgcctgaagcggctgtgtcactttcgcgcaagcaacatcaggttctgagctgcattgcgaatcaaatgacaacggaagatattctggagaaactgaaaatatcgctaaaaacgttctactgccataaacacaatatcatgatgatcctcaatcttaagcggatcaatgagctggtacgccatcagcatattgattatctggtgtgaatttcaggcttacggtgagtctggctacgctgccacacagattagctaattgaaacgcctttcacccctgccataccttttaataatcgcaacaggtcttctatcgacgttgtggcatgaagctggatatcaatggcgaccacttcatgatcttcattttcctgcaacgaaactaaatccgtttttattttttgctgcttaaaccagtcgagcattgataccgtattaccgttcagtaatgtcagctgtaaatggtaatttttgttcatcaggcggaaggttaattgatggaagacttccagcaccaacaaggtcatcactgaaccataaatacccagttcgtacataccgctgccaataaccatacctatggcggcggtcacccagatatccgctgccgtcgtcagacctacaatattttggttacgaacgagaatgttacctgcaccgataaacccgacgcccgtcaccacctgagcagcaatacggctggggtcgagtccgacgtgatctaaagacagcacgtcagcaaaaccatatttcgaaacaatcataaacagggcgcttcccatgccaattaatacatgtgtgcgtaaccctgctcctttgccgcgcatttgcctttccatgccaatagcgccacaggcaattgccgcgagtataagacgtataataaattctgctgtcatataaaaatgcaaaaaggagcagcaagatggctcaacttgctactcctttttacttgtacctcattaattcggcaagtcattagatgcttgatttttgaaggtatacaaatttttctgcgggtttttcttacagtattcgatcactttaggaatttgagtgagatcggtttcatttaaagtaacggtatcgccacctttatatactgtttcttcatgcagcatccaccatgcaaccggggtcattgcttttggattcagatcaataaattcctggcaggtcatatctttagcggattcattggctgccagcgcagattgtgcgttcaccagtgacaaagccgctacagcgcccataaaaataaacgctttacggagagatgaaatattcattttgtaacccattcaatatagagattatatatgaacaggaggaatagctgcttttaaagaagatattccggcctgttcaatatgcaaggaagtacgatgtaacgcattcccggaattacatatctttcttaattttgtcccattcgcctttaactttatctttaaagttggcttgtttatcctgagtacaagcctgaacgatagctggggttacggttgcaataccctgaacatctaaaaccgcatcttctggtttatctttgttgttcagcgcttcagcaaaaccaactgcagttggctggaaggattcgtccacagccaggaaatcttcacaggtccaggagttgaccggttttttgttatcagctgctttttgcgcatccgctgcattgcttacaactggcagaagaagcagaccaccaagaataacgcctaatacttttttcatcgtaatatcctcaactataaagtgaaagagccgtcacgaatcaatttcgacactgaggttataacctggttttctgtatatgtcatgttgatagaaaatatcaaaatcagatatttttatttcaatacaatgagttacagatgcatcagatactgtaattaggaaatttttattaaatcgactgcattcttagacgcgtttttggcatagattgatagcaggggattttcttcttaattttatagggtggttctatgttatatatagataaggcaacaattttgaagtttgatctggagatgcttaaaaaacatcgcagagcaatccagtttattgccgtgctgttgtttatcgtcgggttgctgtgtatcagtttcccgttcgtctctggcgatattttaagcacagtagtgggtgcattattaatctgctcgggcattgcgcttattgtcgggttattcagcaaccgcagtcataatttctggccggtattatccggtttcctcgtcgcagtcgcctatttattgatcggctatttcttcatccgcgcaccggagctgggcatttttgccattgcggcatttattgccggtttgttctgtgttgcaggggttattcgcctgatgagttggtatcgtcagcgttcaatgaaaggcagctggctacagctcgttattggtgtgctggatatcgtcattgcctggatattccttggtgcaacgccgatggtgtctgtaacgctggtttccacactggtgggaattgaactgatatttagcgccgccagcctgttcagcttcgccagtttgttcgttaagcagcaataattatcccggttgtcacccggatcatagtcacttgatgtgactatgatccgattaatactctctccgctacgcagcgttgtagatcaattgcgcactatcattgaaataattacctgctagtgattatttcaacctactgaatttcatctaatttttttcactccatggcaaattagccatttcaaacattatcatggctgatattttccgtagtcaggtttaatgttttaaaagtgcagtgggaaagtgaacaaagagttccgtaagcgttgatgctatgggcggttaaataagtaatccgggttcatttttttgcaactggcattgattacattgcataaatatccgtgtctccagacgctatataaaaacctgaagacatgaatgcgttatttactcaggtaatttcaatgcgttaaaagaaagctggcaatccaattgccagcttaagtcgaaacaaggagactcgatatttaaatcggattacattttaactttagtaatattcttcagagatcacaaactggttattgataacttattcttgggcagtaatccgcaaacgttaactttttgtttactgtttacaaactgataacaaccaggaatcttacttaggatcaatatatggagtgcgtgatggataaatctgaagtattgattagtgttaatagacgtattagttcacgaagggcaaagttcttataggcgtttactatattgaacaacgattcggacaaggatgtaaataatgaaaaggatgacatgttcgaaacgataacggctaaggagcaagttatgatttttctcatgacgaaagattcttttcttttacagggcttttggcagttgaaagataatcacgaaatgataaaaatcaattccctgtcagagatcaaaaaagtaggcaataaacccttcaaggttatcattgatacctatcacaatcatatccttgatgaagaagcgattaaatttctggagaaattagatgccgagagaattattgttttggcaccttatcacatcagtaaactaaaagctaaagcgcctatttattttgttagccgcaaagaaagtatcaaaaatcttcttgagattacttatggtaaacacttgccccataagaattcacaattatgtttttcacataatcagttcaaaattatgcaactgattctgaaaaataaaaatgaaagcaatatcacgtcgacgctcaatatttcgcaacaaacattaaagattcagaaattcaacattatgtacaagctgaaactaagacgtatgagcgacatcgtcaccctgggtatcacatcttatttttagtcaggacataagcaactgaaattgatggctggcatgacgagggatgcagatgctgatttcattacccccggtgattactaaaggagaggctaaaacgactttattcccctggtatgtgtatccaccagtagaacccttcgttgcccgaatgctggcaggaactgttggcagaacggcaacattttttttgtcgttgacctcaccatgtcgatcactatacctgtatcccaccttactggctgacaaccccactatgccgctggtctgtaaatccctcatatctctcctcgcgcgcaatttaaagaaccgttatttctcaagaattttcagggactaaaatgaacagaagaagaaagctgttaataccgttgttattctgcggcgcgatgctcaccgcctgcgatgacaaatcggcggaaaacgccgccgccatgacgcctgaggtcggtgtcgtcacactctcccccggttcggtcaatgtgttgagcgaattgcccggtagaaccgttccttatgaagttgccgagatacgtccccaggtgggcggtattatcattaaacgcaactttatcgaaggcgataaagtgaaccagggcgattcgctgtatcagattgatcctgcacctttacaggccgagctaaactccgccaaaggctcgctggcgaaagcgctctctaccgccagcaatgcccgcatcacctttaaccgccaggcatcgttgctgaagaccaactacgttagccgtcaggattacgacaccgcgcgcacccagttgaatgaagcagaagccaatgtcaccgtcgccaaagcggctgttgaacaggcgacgatcaatctgcaatacgcgaatgtcacctcgccgattacgggcgtcagcgggaaatcgtcggtgaccgtcggcgcactcgttaccgctaatcaggcagattcgctggttaccgtacaacgtctggacccgatttatgtcgatctcacgcagtcggtgcaggatttcttacgcatgaaagaagaggtcgccagtgggcaaatcaaacaggttcagggcagtacgccagtacagctcaatctggaaaatggtaaacgctacagccagaccggcacgctgaaattctccgacccgacggtggatgaaaccacgggctccgtgacgttacgggcgattttccccaacccaaatggtgacttgctgcctggcatgtacgtcacggcattagtggatgaaggtagccgccagaatgtattactggtgccgcaggaaggcgtcacccacaacgcccagggtaaagcaacggcgctcattctggataaagacgatgttgtgcagctacgcgaaattgaagccagcaaagccatcggcgaccagtgggttgtcacctctggcttgcaggctggcgatcgggtgatcgtttccggtttgcaacgcattcgtccgggtatcaaagcacgagcaatttcctccagccaggaaaacgccagcaccgaatcgaaacaataacgttgcaggcttaaggggactttcatggctaactattttattgatcgcccggtttttgcctgggtacttgccattattatgatgcttgcaggtggtctggcgatcatgaacttaccggttgcgcagtatccgcagattgcgccaccgaccattaccgtcagcgctacctatccaggtgccgatgcgcaaacggtagaagactcggtcactcaggtgattgagcaaaatatgaatgggcttgatggcctgatgtacatgtcttcaaccagtgatgcggcgggtaatgcctctatcactctgaccttcgagactgggacatctcctgatatcgcacaggttcaggtgcaaaataaactgcaactcgctatgccttcattacctgaagcggtgcagcagcaggggattagcgttgataagtcgagcagtaatattctgatggtagcggcgtttatttctgataacggcagcctcaaccagtacgatatcgcggactatgtagcgtctaatatcaaagacccgctaagccgtaccgcgggcgttggtagcgtacagctctttggttccgagtacgccatgcgtatctggctggacccgcaaaaactcaataaatacaatctggtaccttccgatgttatttcccagattaaggtgcaaaacaaccagatttccggtggtcaactgggtggcatgccacaggcggcagaccagcaactaaacgcctcgatcattgtgcagacgcgtctgcaaacgccggaagaatttggcaaaatcctgttgaaagttcagcaagatggttcgcaagtgctgctgcgtgatgtcgcccgcgtcgaacttggagcggaagattattccaccgtggcgcgctataacggcaaacctgctgccgggatcgccatcaaactggctaccggagcaaacgccctggatacctcgcgggcagtcaaagaggagctgaaccgcttatcagcctatttccccgcaagtctgaagacggtttatccttacgacaccacgccgtttatcgaaatttctattcaggaagtttttaaaacactggttgaggctatcatcctcgtcttcctggtcatgtatctgtttttgcagaatttccgtgccacaatcatcccgacgattgccgtaccggtggttattctcgggacgtttgcgatcttgtcggcggtcggtttcaccatcaacacgttaactatgttcgggatggtgctggcgatagggttactggtggatgacgccatcgtggtggtggagaacgtcgagcgtgtcattgcggaagataagctaccaccgaaggaagcgacgcataaatcgatggggcagatccaacgtgcgctggtcggtattgctgttgttctttccgcagtgtttatgccgatggcctttatgagcggcgcaaccggggagatctaccgccagttctccatcacgctgatctcctccatgctgctttcagtatttgtggcaatgagcctgacccctgccctgtgcgccaccattctgaaagccgcgccggaaggcggtcacaaacctaacgccctgttcgcacgcttcaacacgctgtttgaaaaatcaactcagcactataccgatagcacccgctcgctgttgcgttgtaccggtcgctacatggtggtctacctgctgatttgcgccgggatggcggtgctgttcctgcgtacaccgacctctttcttaccagaagaggatcagggggtatttatgaccaccgcgcagttaccttccggtgccaccatggttaacaccacgaaagtgctgcaacaggtgacggattattatcttacaaaagagaaagataatgttcagtcggtgtttaccgttggcggctttggcttcagcggccaggggcaaaacaacggcctggcgtttatcagtctcaagccgtggtctgaacgtgtcggtgaggaaaactcggttaccgcgatcattcagcgggcaatgattgcgttaagcagtatcaataaagccgtcgtcttcccgttcaacttacccgcggtggctgaactgggtaccgcgtcaggttttgatatggaactgctggacaacggtaacctggggcacgaaaaactaacccaggcacgaaacgagctgttatcactggcagcgcaatcgcctgaccaggtcaccggggtacgcccgaacggcctggaagatacgccgatgttcaaagtgaacgtcaacgccgcgaaagctgaggcaatgggtgtggcgctgtctgatatcaaccagacaatttccaccgccttcggcagcagctacgtgaacgacttcctcaaccaggggcgggtgaaaaaagtgtatgtccaggcaggcacgccgttccgtatgttgccggataacatcaaccaatggtatgtacgcaacgcctctggcacgatggcaccgctttctgcctactcgtctaccgaatggacctatggttcaccgcgattggaacgctacaacggcatcccgtcaatggagattttaggtgaagcggcggccgggaaaagtaccggtgacgctatgaaatttatggcagacctggtcgctaaacttccggcaggcgtcggctactcatggaccggactgtcgtatcaggaagcgttatcctcaaaccaggctcctgcactgtatgccatttcactggtcgtggtgttcctcgccctcgccgcactctatgagagctggtcaattccgttctcggtgatgttggttgttccgttaggcgtcgttggcgcattactggccaccgatctgcgcggcttaagtaatgacgtctacttccaggttggtttgctgaccaccatcgggctttccgccaagaacgccatcctgattgtcgaatttgccgttgagatgatgcagaaagaagggaaaacgccgatagaggcaatcatcgaagcggcgcggatgcgtttacgcccaatcctgatgacctctctggcctttattctcggcgtgctgccgctggttatcagtcatggtgccggttctggcgcgcaaaacgcggtaggtaccggcgtgatgggcgggatgtttgccgcaacagtgctggcaatttacttcgttcctgtctttttcgttgtagtggaacatctctttgcccgctttaaaaaagcgtaacgtgtaaatgagagtaaggttgaacgtgaaggttcagccttactctttcctgctaaccattcaccactcaacaaccagctaaccgtcaggaataccaggcttagtacacagcactgaaagtagaaaccactccagccattcgtcatcaatttgaacagcacaatactgacccacattcccgtaatcgtatgaattgtcagcttaataatcccaaacatgccgagtcttttcctcctgaaaatacctataccgcctggcaaactgcgaaagagaactagccggtagcccggcagaaatcatcagggaagagtttcacatgaagcaggtgtgagatcctgaccaatattcaaatgcaaaatatgtcaggaaaaggtacctggcgaatgttgcgcaaactgatgtggcgttacaccataatattgtcgaaatgtgtttataaagtacgacgtactgctatagccacatttttctgcaatagtatgcagaggaatttgacgtaactcgagtaatcgtctggccatcgacatcctggaagcgagtaatattttactgaaacaggtattttcatcctgcaacttttttttgatgagactctcgctggtatacattctttccgcgatatcgcgcagataccaacgtttggcgatatcaaagctaataaggcgttcaacttttcctgaaacagtgctgatgctattgaaaagtaaggggatcagttctttcttatgagaaaacatcgataaacaggaaaggtagagcatattgctcagtatcggtgaatttaccccggattcattgaagctatcaaaaatcgccgtcaccagcggcatggggggggactggttaattaatagacggtctttgctatgtaaccctaaattgcgtggtagctgacgaatattttgtaagtaatggcaaactgtcagctcatcgatatccagtcgtcgcgtatccggtgaacaaaacgcaaaatcgtctgccaaatttttctccagcagcacgatactctcgttatgcagcgatattttatgctgttcatgataaatatcgaatgaacgacgaatgaggatcaccgagcagacatgagtcatgattatcccttatatttcatactgcgattatttcaatttcagtatactaatgaaatgttgccagactgtttcttagcgaaaaaactgccagatttggtaggaccaaaatttatccacaaagtagttttgcataacagttaattgataataagtaaatgcagcacgaatatattttcgcactgcgtatagcttatgtttataaaaaaatggctgatcttatttccagtaaaagttatatttaacttactgagagcacaaagtttcccgtgccaacagggagtgttataacggtttattagtctggagacggcagactatcctcttcccggtcccctatgccgggtttttttatgtctgagtaaaattctataatcttattccttccgcagaacggtcagtgccgtaaaaatttccttgcgcaacaatacttgccgccgagtcacggttcggcaatccctgcgccgatcgctcctgatactctgtgggcgtcatcccataataatttcgaaagacgtaaatgaaatacgacacgctgtgatatccacaggacactgcgactcgcttaattgaaaagccatgtataacaataagttgcaaagcacgttgcattctacactcagtaagcaactgtgaatatgatgtctcttcttcgcgcaattttttctttaacaggcttggactcatcaacagctcgctggcgattcgggctagtgtccactcatgggcgatattattattgataaccgtacaaactcgtgttcgcatgttcggttgcaaaacgttcaaaagcagcggtataaagtgctcatcctcaagaaaaacagataacaacgcaaagattaatgctcttttacgtagcatttctgcatagcgaagattcttattctgcgatagttgcgcaacttcctgaaaaacaggaatatctctgctacagtgatgaacgagtaatgaagaaatttttttatgtgcatgaagatttaatgcctcctccttgagcatcggcagaaataatgaaagcgtatcccttgatactaatacaaaattttcaacacacttatctactcgaatttggcttgcatccgcaaaaaccaggtcaccgccattaaaatagcgatattcaccattaaccatggtgagaatatatttatgtcttgcgtacgcaattagacaattcccatgtaatgattgcatagttgacttaatattacataaacatattactgttaattaatgtagcacgccgccctcttaagtcaaattgattgataaataaatttaaacgaagcgggagaacaggatgataatgtgtgatgttctacgggcaggatgactggatttataatacaaaaacgtgtttaagaacgcagtgaaattaatagcaagcaaataatcccttttcgtgacattagaggcaatcgctacatttaataaacattcatataacatatatcttatcaacacgatgaatagacagccaatatattattgcgattaataagcaaccgaatgcccagctgtttttttaaaggctgggcattcggtttttacaacgttatgttatcaggtgtgtttaaagctgttctgctgggcaataccctgcagtttcgggtgatcgctgagatatttcagggaggctttgtagtcttccagcaacagttcagcaaagtccatttcgaagccgcgacgacacataatgcgcatcaccacgatgtcggtggcttcaccgccgagagtgaaggccggaacctgccagccgcgcagacgcagacgttcagagaggtcgtacagggtgtatcccggatcttcaccatctttcagtttgaagcaaaccgccgggatgccttcgtccgggcgacccgtacagatgaactcatacggccccagtttggcgatttcatccgccagataagcggcaacctggtaagaggcgttctgtactttggtgtagccttcacgaccgaggcgcaggaattcatagtactgtgcaattacctgacccgccgggcgggagaagttgatggcaaaagtaccaatttgaccacccaggtagtcaacgttgaacaccagttcctgcggcagcgcttcttcgtcacgccagataacccagccgcagcccagcggagccagaccgaatttatggcctgaagcactgatcgatttcacacgcggcaggcggaagtcccagacgatatccggggcgacgaacggtgctaggaagccaccgctggcagcgtcgatgtgcatgtcgatgtcgataccggtgtcggcctggaatttatccagcgcatcgtgcagcggttgtgggaactcatagttaccggtgtaggtcacgccgaaagtcggcaccacgccgatggtgttttcgtcacaggcttcaatcatgcgtttcgggtccataaacaactgaccggggcgcatagggatctcacgcagctccacatcccagtagcgggcgaatttatgccagcagatttgtaccggaccgcacaccaggtttggtttatccgttggtttgcctgcagcttccatacgcttgcgccaacgccatttcatcgccatcccgccgagcatacaggcctcggaagaaccaatggtgttggtgccaacggcctgaccatttttcggcgcaggcgcatgccacagatcggcaaccatatttacgcaacgcaggtcgatggctgcggattgcggatattcttctttgtcgatccagtttttattgatcgacaaatccatcaatttatggacgttttcgtcgtcccaggtctggcagaaagtggccaggttctgacgagcgttgccatcaagatataattcatcattgataatctggaatgcgacatcatcgcgcatttcgtgcagcggaaatcgttttgactccgcgatagtagaaatggcctttgcgccaaaacgtgaatcgagtagttctgagcggaaatccgttaacagcttctggtccatttcgaactccttaaatttatttgaaggcaataaaaaagtaggatttatccgcaatggaagcaaggcattacaggcttaatttaaataacaaaatcctaagcagaaaaacgactttttataatataaacatttaacatgataatattaaaaacagactttattatcgtaataaaaatcgcccaaacattcctgttcgggcgatcaaattaattattgtttatcctgcatatacggcgtgtacaccccgttcagactgtgcaggaaagctacgatatcatccacatcctcctgcggcagctctttgcctacctgatagcgcagcatcagtttcaccgccccgtccagcgtcggcacgtcaccgcgatggaagtacggtgccgttaaagcaacgttacgtaaaccgggtactttctgacgcaatttatcacgctcttctttagtcacattcatacgaccaatatccgccgccgtaatttccccaaagttaaagtcttttttcagccccaacggttcaaaggaacgtccgccgagaataataccaccatgacaagttgcacatttattatctttaaataattgatagccttttttctgttgcgccgtcagcgcattttcatctccacgcaaccatttatcaaatggggaatccggcgtaattaatgttttctcaaattcagcaatggcatcagtaatattttcgccactgaaaccttgcggataaacttcgaggaactgcgctttaagctgcggatctttttccagcttagcaataatttcgtcccaggatttcgacgccatttcaatcgggttcaacggcggtccacctgcctgatcctgcaatgttgccgcacgaccatcccagaactgctcaacgttaaatactgagttaaataccgtcggcgcgttaatcggcccaactgcgccaccaacaccaatcgatgtttttctgccatcgacgccccccgcattcaacgcatggcaatgagcgcatgaaatggtgctatcagccgataaacggggatcgtgatacagcgcaaagcccaacgccactttttgcgcatcggtaggcagtttttgcgggatgggctgcaccggttcattgcgatgctccggagcagtatcattgctggcgtaatattccgcgcgctgttttgcaatccaggccagtatttccgcccgctcttcatcactcaccttacccgcccagtgtagcgcggtataacgcgttggtggcatagtttcatactgcatcacccattcaatcttattcagatcgctttgcgaaacgggtttatcagccagcagtgccgcacgcacggcctcgaggttaaaagatttatatccaagcttaatgtcgtaatccatcaactgtttcgcgccaggaatataataataggcgggtaattctgccgaaggtgtgtggcaatagtcgcatcctttttcgcggagaaagcctaaaaccttattattttcactgacagcagatgcctgaacatcggcctgtttactgcgtttattatcgtggtaccacacataaccagataaccctaaatagcaaatcgcgacgccagccaggccgatcgcggtaatacgtgagaccattttcattattcttccctcacggtggtgagttattgtgacccagaaaattttccagaatgctgcaaacgtctctgcgagacaaagccatcataaaaaacagggagatacgctttttgataggaatcaatcaattacatgaatataaactatcaataagatagcctgtgcctattacccagatcaggaatggcatatcatgattgcggcgagagcaggattgaatgttctgaaaatgaaaaacaacacgaaatccgtatttttataaattccatggatattagtgcgttatattttttgacaggttaataaacgtgatccaccgcacgctttgtcgcccaccaggcggagcgaatgactacccttaaagaaaagcccgataattagcgacgaatttcggaggttggatccttatgctcaatcagaaaattcaaaaccctaatccagacgaactgatgatcgaagtcgatctctgctatgagctggacccgtatgaattaaaactggatgagatgatcgaggcagaaccggaacccgagatgattgaagggctgcccgcctctgatgcgctgacgcctgccgatcgctatctcgaactgttcgagcatgttcagtcggcgaaaattttccccgacagtaaaacctttcccgactgcgcacccaaaatggacccgctggatattttaatccgctaccgtaaagtgcgccgtcatcgtgattttgacttgcgcaagtttgttgaaaatcacttctggctgccggaggtctactccagagagtatgtatcggacccgcaaaattccctgaaagagcatatcgaccagctgtggccggtgctaacccgcgaaccacaggatcacattccgtggtcttctctgctggcgctaccgcagtcatatattgtcccgggcggccgttttagcgaaacctactattgggattcctatttcaccatgctggggctggcggaaagtggtcgggaagatttgctgaaatgcatggccgataacttcgcctggatgatcgaaaactatggtcacatccccaacggcaaccgcacctattatttgagccgatcgcaaccaccggtttttgcgctgatggtggagttgtttgaagaagatggtgtacgcggtgcgcgccgctatctcgaccaccttaaaatggaatatgccttctggatggacggtgcagaatcgttgatccctaatcaggcctatcgccatgttgtgcggatgccggacggatcgctgctcaaccgttattgggacgatcgcgacacgccgcgtgacgaatcctggcttgaggacgttgaaaccgcgaaacattctggtcgcccgcccaacgaggtgtaccgcgatttacgcgcgggagcggcctcaggttgggattactcttcccgttggctgcgtgatactggtcgtctggcgagcattcgtaccacccagttcatccccatcgatctgaatgccttcctgtttaaactggagagcgccatcgccaacatctcggcgctgaaaggcgagaaagagacagaagcgctgttccgccagaaggccagtgcccgtcgcgatgcggtaaaccgttacctctgggatgatgaaaacggcatctaccgcgattacgactggcgacgcgaacaactggcgctgttttccgctgccgccattgtgccgctctatgtcggcatggcgaaccatgaacaggccgatcgtctggcaaacgccgtacgcagccggttactgacacctggcgggattctggcaagcgagtacgaaaccggtgaacagtgggataaacccaatggctgggcaccgttacaatggatggcaattcagggatttaaaatgtatggcgatgaccttctgggtgatgaaatcgcgcgcagctggctgaaaacggtgaatcagttctatctggaacagcacaaaatgatcgagaaataccatattgccgatggtgttccccgcgaaggcggcggtggcgagtatccgttgcaggatgggtttggctggactaacggtgtggtacgccgtttaattggtttgtacggcgaaccataatatttttacagccagccgctaacttcctgctggctgtaaaattatcctcttcaggaggagatatttaacatcattgccgcctgggtgcgatttttcacttccagacggcgatacagggattccagatgcgcttttaccgttccggtactgatattcagcgctctgccgatctccttatttgattcgcccgccgctaacatggttaaaatctcccgctggcgggcgcttaacgatttgagatctttaatgtccttttccggcgtcgtccgccagtctccaggcagaaacatcatccccatcgccgcactatttaccgccaacgcaaatgtctcgacggttgaatcacgaggcacaatggccagcacattaaaatggataacttcctgtaaccaccgtttattgcaatccgtcgccgtgattaacaccttaacctcaggaaactgcaccacggttttttgcagcaaccagtagcaaaactcaccatcctgatcgccatcgagcataactaaggcttcagggtaactttccagcttttgccataactcgtctgcctgactggccccctgaatactcactcctggaatacgctgctgtaaactgattttcattccatgaataaatattgactgcctgtcaaacatgactatttgcataactgaatctccacctgaatacgttaaaaagacttaagtagtggaagggtattacccgcgagaaaaaataagaattcgccatttggcggtggccattctacagagatgacgcgtagaaaatagttaccgatataaatagttacagctaaacgcctgaaattacatgtcgagggcactatttaaaacaattttgaggatttccttatattggtggttagtacgcatgcaattaaaaatgaaactccgcgaccacaagcaaaaataacaaacggcaatgagacaaaaataagcacaaatagccaacacgtcctctattcactttaaagggaatcgctgaaaaatacgctctgtttagggggattcacctttctcagaaagctattccgcccttttcctgctgagaaatcgccacattcgtcatgacaacattgtgaaacccggcattagatgttagaaaaaacaataaacaatgcgatatgcgcgttactgtttcgctgtgaacaacaatcggtcaaagaaatggataaaattcacgcaatgcagttgttcatcaaagtcgcggagctggaaagtttttcccgcgcggcggatttctttgctttgccaaaaggaagtgtttcgcgccagatacaggcactggaacatcaacttggcacccagcttctccagcgcaccacgcgacgggtcaaactcacgccagaaggcatgacctattatcaacgagcaaaagatgtgttgagtaatctcagcgaactggacggtctgtttcaacaggatgccaccagtatcagcggtaaattacgcatcgacatcccgccaggaatcgcgaaaagcctgttactgccgcgcctgtcggaatttctctatctgcatccgggaattgagctggaactgagtagccatgaccgtccggtagatattcttcatgatggttttgattgcgtgatacgcactggcgcgttaccggaagatggcgttatcgcccgtcccctcggcaaactgaccatggtcaactgtgccagtccgcactatctgacgcgctttggttatccgcaaagccccgatgatctgacttcacacgcaatagtgcgttatacaccgcacctgggtgtacatccgttaggttttgaggttgccagcgttaatggcgtccagtggtttaagtctggcggcatgttgacggtaaacagtagcgaaaactatctcgccgccggtcttgccggtctggggattattcagatcccgcgcattgccgtgcgcgaagccctgcgtgccgggcggcttattgaagtgttgccaggctaccgtgccgagccgctctccctttcgctggtttacccgcagcgtcgggagctttcccggcgtgtaaacctgtttatgcagtggctggctggcgtaatgaaagagcacctggactgaccgactatactttttaagaatgaccacgacagaaggacaaaagagcggatgacgcaggaaaacgagatcaaacgtcccacccaggatctggagcacgagccgattaagcagttggataatagcgagaaaggcggcaaagttagccaggcgctggaaaccgtcaccaccactgccgaaaaagtccaacgccaaccggttattgcgcacctgattcgcgcgacagaacgctttaacgatcggctgggtaaccagtttggtgcggctatcacctatttctcatttttatcgatgatcccgattttgatggtgtcgtttgccgcagggggctttgtgctggcctcccatccgatgttgctacaggatatcttcgacaaaattctgcaaaacatcagcgatccgacgctagccgccacgttgaaaaacaccatcaacaccgccgttcagcagcgtacgactgtagggcttgtcggcctggcggtggcgctttattccggcatcaactggatgggtaacctgcgtgaagcgattcgtgcccagtcgcgcgatgtctgggaacgctcgccgcaagatcaggagaagttctgggtaaaatatctgcgtgattttatttcactgattggtttgttaattgcgctgattgtgacgctgtcgatcacctcggttgccggttcggcgcagcaaatgattattagcgccctgcacctgaacagcattgagtggctgaaaccgacgtggcggttgattggcctggcgatttccatcttcgccaactatctgcttttcttctggatcttctggcggttgccgcgccaccgtccgcgcaaaaaagccctgattcgcggaacatttctggctgctattggttttgaagtgattaaaatcgtgatgacctacaccttgccatcgctgatgaaatccccctctggcgcagcatttggttccgtgctggggctgatggcatttttctacttcttcgcccgtttgacgctgttttgcgcggcgtggattgccaccgccgaatataaagacgacccgcgaatgccagggaaaacgcagccttaaaataggccggatgcggcgtaaacgccttatccggcatacgattttattcggcctggctccccgtaggccggataagatgcgccagcatcgcatccggctataatgcgcacataacctcttgaaactcgtccccagagcctcttcagccatctatttgggagcaaacaatttcattccaactcataaccccagcatataaatccagttggtaacttttatttaacctgaaaccagttttatccactatttataaaattatgtgaagcatttcatagaagaaaaatcactggcctaaacattatcccctttttgcctggtttttgaccatttccgcgatttgttacacattgaaatatcacttttgctgtgcgtaatatggctattcgttagccaaaaataagaaaagattatgcaagcaacagccacaacactcgaccacgagcaagaatacacgccgatcaactcgcgtaataaagtccttgtcgcctctctcattggcacggccattgagttcttcgacttttacatttacgccactgcggccgttattgtgtttccgcatatcttcttcccacagggcgatccaacggcagcaacgctacagtcgctcgccaccttcgccatcgccttcgtcgcgcgccccattggctctgccgtttttggtcattttggcgatcgcgttgggcgtaaagcgacgctggtcgcctcgttgctaacgatggggatttcgaccgtggtgattggtctgctgccgggctatgccacgattggtattttcgccccactgctgctggcgctggctcgatttggtcagggtctgggcttaggcggtgaatggggcggcgcggcgctgctggcgactgaaaacgccccaccgcgcaaacgtgcactgtatggctccttcccacagctgggcgcaccgattggcttcttctttgccaacggcactttcttgctgctttcctggctactgaccgatgagcagtttatgagctggggctggcgtgtgccatttatcttctcggcggtgctggtcattatcggcctgtatgttcgcgtgtcgctgcatgagtcgccggtgtttgagaaagtcgctaaagcgaaaaaacaggtgaagatcccgctgggtacgctgctgaccaaacatgttcgcgtaaccgtactgggtacgttcatcatgctggcaacatatacgctgttttacatcatgacggtctactctatgaccttcagtaccgccgccgcgccagttgggcttggcctgccacgtaacgaagtgttgtggatgctgatgatggcagttattggttttggcgtgatggtgccagtcgccggattactggctgatgcctttggtcgccgtaaaagcatggtaattatcaccacgctgatcatcctgttcgcgctgttcgcctttaacccgctgctcggttctggcaacccgattctggtttttgccttcctgctgctggggttaagtctgatggggctgaccttcgggccaatgggcgcgctgttaccagagctgttcccaacagaagtgcgttacaccggagcatcgttctcttacaacgtagcgtcgattctcggggcttccgttgcgccgtatatcgcagcctggttgcagactaactacgggttaggtgcggtggggttatatctggcggcgatggctggcttgacgttaatcgccctgctgctgacccatgagacgcgacatcagtcgttgtaagtatcgtgtgggcagccaccctcaccccagccctctccctgaaagggagagggagaaaagcggagcgagatgttatatcgcgaacataacagccctcccccagaaagtgaacggaaaagcggtactcgttgtttcaacacgcacaaaacagtcccctcgcccctttggggagagggttagggtgaggggaacacgctgctcccgaactcaccagcaaacacaatccaacctcatcacttcttcatctgcgacaatatcgtccgacactgattagcctccccttcggaaggtgagatcagtgccagtaacgccgccgccggtgttaccagcgttgccagtgccgcagcaacagcaccacgggcaatcaacggcccggctttcaccccagcctgcggatttttaaacgtcccacgcacatacagcggcgaacgcagtgtgataatccgaatccctttactctccggatcaatagtcaaatccagctgttccgaagcaaaacttgccgtgccggtaacattaatcaacgcgttctcagtatcgaaagcaaaaatctgcgggcgcgccacgccgttggcaatattcagattcgccgccgcgcagttcacccgcacctcatcgtcaccaaatatcgcaccgacaatgtagttgccgacattcagcccaacaatctccatcaggttgcggctcaccagcccgtcattcatcaacagtttcaggttgccgttactgttgcctaaaagcgccgccaccgagttaccgctaccgcgtagttccgcgtcaccgttcatttcccccagcgtcttctgcatcagttccacatcgggcatcagttctttcagtttcagtcgacgagcctgaatatctgcccgcccctgcatcggctttttatcgccttccagatggatattcgccgcaatgctgccgcccgccatgccaaatttcagcggttgcaggcgcaggtcagcatttttgaggatgatatgagtagaaagatcgctaatcggcaggctactgccatgctcaatgcgccgccctttgaagcgaacatcggcatccataacgtcccatttatcggtttcgaagcggtcataaggcagcactttgcccgcaggctgaacgcttttttcgcccttcttctgttcagaccgtttcgacttttctgcccctttcccggagtcaacgccaattaacggtcccaggtccgccagccgcaattgccgcgactcgacatcaccttccagttttggtcgtggctttccggtggtgtagaccagagaaccgtggatatcgctatcgccaattcgcccattaaaaccgcgataatcaaagaccgacgatttttcagtgtcgattttcgctaccagccgaccatccgtttcaaacggcggggtatcgggcagcagaacgcccgtcagttcatagagatcacccagtgaatcgccagaaaatttaagccgtaaatcgacaccgcccatcttcattgggtcattcacgacgccatcaaaagcaacacgggtgttaccagagcggaaatcagcctgtaccggaaacggcgtcccttcgccacgcagcgccagcataccgcctatttttcccgtacccgtgagcggttcaccgttataacgtccctgcgccttcaggccaaaaacgtaatcgcccaccttttctttatccgctttacctttcgatccagtaacttcgctgaacggcagcggcttgcctaacggatcaacaaaaatctccagatccgctttgcttactttgtcatcaatagcgatccgcccttgatcgaaaagaatattatccagccgaaacgaccatgccgacggctttgcattcgcgtctttgttatcatcgttggcgagattaaacgtccagttattgttcttttcggagaggcgaatcaggcgcgcgtcgggcttttcgagcttgatccacggcagccagaccgttttggtcagcagcgccagcggggccagcgttgcctctacgcgtggcaaatgcaccatcgtgacttcgggaatatccggtggattgccaagaatgatgtcttccgcgtgtacatggggccacggcacccagctgcgccagccagtttcttgtttttgccgctcccacaccacgcccagatcgccacggatagcgaacggacgattcaactccgcagagactttctggttgatggtcggtttgagtcgattccagtcaaaagttgcaatcaaaatgatcgccacgacaatcaacaacaagaaagcccctgaaatcgcagcggttattttgcctgccttgctcatcgttcgcttcctcatattcttcctgtgccagtcctaaagatagtccagccaggcggaaaatgaggcagcttatagcgccagaaccgccgtattcagcgtttctatcggtgccgggcgtgaaagaaaccagccttgtgcggcgaatgcgggcgagttctgaacatcacgccactcttccggtgtttctacgccctcgacaatcaccccgcgacaatagcgattcattagatgtaaaagctgagaaaagagtgtgcggccttccggcgactgacgcagcatcacgaacagctctcgcgcgattttgatgtagtcataacgcacttcacttagcgcagagaaatttgccatcccggtgccaaaatcatccagccacagcgggccaaattcacacatcgaggcaaaggttgaatctttcggcaggcggatgtgttccaccagttcgaaacgcagccagggaagacgctcaatctggcgcaggatttttggttgctgacgcagggcgatgagcgtagggccatcaatattgaccgatgccagcaggccgtgctctataaagaagtcggctttttgcgccaacaaatcaatctgctctttcacaacctccatccgatggctgacggtgatttcagtaaaatagcgatccggcggcaggcgttgcgaagggttcaagggatgcgtgaccaccgttaatagctccacggccattaaccgcccgcatgtttgatagatcggctgccaggtgtaagcacgctcacactgcaaccaaaaacgccgttcctgcaagctctcgatgcttgcttcagggttgcttattcgctggataacctgccttatcatcaaagatgtcctgtgtttaaaagtgatgctgcccggactcgacaaagattatcggcgcgtaagggcagaactttaccgcctggccggggtaaatttcctcactccacaacggaatctttcaggaatacgtcctggctcaaaaaaataatggaacactgttttaatatggttgaccagcaaaccaccacagcgcaaactaacgctaattttttacagatcaggttcacgactatgtccaaaaagattgccgtgattggcgaatgcatgattgagctttccgagaaaggcgcggacgttaagcgcggtttcggcggcgataccctgaacacttccgtctatatcgcccgtcaggtcgatcctgcggcattaaccgttcattacgtaacggcgctgggaacggacagttttagccagcaaatgctggacgcctggcacggcgagaacgttgatacttccctgacccaacggatggaaaaccgtctgccgggcctttactacattgaaaccgacagcaccggcgagcgtacgttctactactggcggaacgaagccgccgccaaattctggctggagagtgagcagtctgcggcgatttgcgaagagctggcgaatttcgattatctctacctgagcgggattagcctggcgatcttaagcccgaccagccgcgaaaagctgctttccctgctgcgcgaatgccgcgccaacggcggaaaagtgattttcgacaataactatcgtccgcgcctgtgggccagcaaagaagagacacagcaggtgtaccaacaaatgctggaatgcacggatatcgccttcctgacgctggacgatgaagacgcgctgtggggtcaacagccggtggaagacgtcattgcgcgcacccataacgcgggcgtgaaagaagtggtggtgaaacgcggggcggattcttgcctggtgtccattgctggcgaagggttagtggatgttccggcggtgaaactgccgaaagaaaaagtgatcgataccaccgcagctggcgactctttcagcgccggttatctggcggtacgtttgacgggcggcagtgcggaaaacgcggcgaaacgcgggaacctgaccgcaagtaccgttattcagtatcgcggcgcgattatcccgcgtgaggcgatgccagcgtaaacgcagcatatgcaaaaggctggataaagtgttacccctctatccagctcatccataaatacctgatggttgtgctaactcatcaccatcaggcattactgtgcaggtggaatatccgtcacttcaggatgtacgtcatccgtggcgacagaggtggcggcagcagcagtcgatggggccatgatttgatcccaggccgcctgcaacgctttcatgttaaattccggctcgcctttcggctgcagcagtattaacgccatatcattcgacaactgctgacgcagatcctgatttaacatctccaccgtcaggctgttaaggaaatcctgccgcagtttctgatactgctccggcgcgatatcgacgacctgattttgcaacgaacgcatccgctgacccatcagaatatcggtatcagcccgcgcataggcggcaaacagtttctgcagctccagtttcttttgcgccactaacgcattgaactcttcttccggcagacctttatcgcgaaccttcgccagttcacgcgccaccagattaaggttgctgttcagcttgtcgtttggtgattcgatgttgatggcacactgcgcacgcagatacagcacacggcagtcaaatccaagaccgatgtctttgctgttactggcgcttaacgcttgctgaacatgccagaacagcgcctcgcgggccaggtccgcacgccagtagcgcagcagtgcggctgattcacgaatcggctgccacggcgtatcccacatgatagataaccggtcctgacgcaccgcgtcagtcataatactcaccgcttccgcacgcagcggagaaagcgtcggcaccggagctggcgtttcacgtttgcctttcagttcgccaaacgttttgtttatttggtcgacaaccgagcgcgcatccacgtttcccaccaccagtagcgtcattgcatccggggtgtaccatttctgatagaaatctttaattttttccgcttcaacgggttgtttcagcggatcggcaggatcgtgacctaacaaggttgaccctttcagacgatagcgccaccagccctctttagtatcggcaggccaggttgccaccatgtcctgactttgcagcgcgtggttgatggtttctggtgtgatggtcaatttgccagtggcatttgccagataagagagcgcttctttcagcaaatcgttacggttattgggcaaactcagattaaacagcgtggtgtcataagagacaattaccggcggcatcgggcgtttagggtcgatcccctgctgccacaatgaacgcgcctgtgctgcgtcaaggccaccgctttgcgttagcgcaatacgagggatggcgtgactgtaaccgctctgttgtgtactttcggcgagcgaaccggtattaaccagcaggcgaatttcaacacgatcgctgggacgctggggggtggtcagcacttgccactgtaaaccgttggaaagcgtcccctgttgccatgctggatcaggctggagcgcatctgcctgcacatagccagcagtggccatcatcagcaaaccgcccgctaaaagtcgaatttttgtgccctgcatgtgaacccctgatcaactatcctggtaataaaaaaactgcccgttgtcggtcagtctaaatgacgttaaaaacacttcgtgttagaccgcaagaacatgaaaatgtcacggaagaagtgaaataaacctgaactcacccaggtggtaagttcaggcacaggggtcaattatgcgcaaacacccgcactcggggaagggagtgcgggcataagtgatgagattaagaggataattcgtgcgttttgccatccggcgcacgattattcagcacatcgtccagttttttgtggtccagttctttcacccacttagcaacgacaatggtcgctacgccgttaccgaccaggttagtcagcgcacgagcttctgacataaagcggtcgataccgaggatcagcgccagacccgctaccggcaaatggcccaccgcagagagcgtcgccgccagcacgataaagccactacccgttacccctgccgcccctttagaagaaagcagcaacacgattaacagcgtgatttggtggacgatatccatctgactgttagtggcctgggcgataaacaccgccgccattgtcaggtatatcgatgtgccatcaaggttaaacgagtagcctgtcgggatgaccagccccaccaccgatttgcggcagccgagtttctccatcttgtcgagcatacgcggcagcgccgactcggaagatgaagtccccagtacaatcagcagttcttcacggatgtagcggataaatttgaagatactgaaaccagtcgctttagcgattgaacccaataccagcaccacaaacaggatacaggtaatgtagaaacagataatcagctgccccagttgcaccagtgtgccgacgccgtatttaccgatggtaaacgccattgccccgaacgcaccaataggcgccagacgcatgatcatattgatgataccgaagatgacctgcgagaaactttcgatgacgttaaaaatcagttggcctttgctgcccagacggtggagcgcaaaaccaaacagtacggcaaacagcagcacctgcagaatgttaccgctggcaaatgcgccaatgacgctcgccgggatgacatccataatgaaggcgacaatgccctggtctttcgcctgatcggcgtaaaccgctaccgctttcgcatcaagcgttgccggatcgacgttcattccggcaccaggctgcacgacgttaacgatgataagaccaataatcagcgcgatggtactgacaatttcaaagtaaagcagtgcgactgcgccggtacgaccgaccgccttcatgctttccatgcccgcaatgcccgttacgacggtacaaaagatgacaggagcgatgatcatcttaatgagcttaacgaagccgtcgccaagcggtttcatttgctcgcctatttcaggatagaaatggccaaggagaataccaatggctatcgctgtcaggacctgaaagtaaaggcttttaaacagagaggttttcatagggtgtcctttagtaaaaccacaggtcttgtaaggttatggggtacctgcggccttaaaataacacccagacaacatcacagaaatgtacctggatcataattgaaacaaaaaggttaaaaagtttgagctggctcgcacaaaccagcactttttaaagttttgtaatcagtttggggtagctacttttcttccaggtaactctcttcgaagatttcaatagggagtgggcgagcaaaaaggaagccctgggcaataccaacgcccgcttttgccagccagtcgcgttgtgcttcagtctccacgccttcggcaatcatttgtaagttcaggctctgcgccagcatgataattgcagcaatcatgctgctatcttccggcaagccttcaacaaacattttgtcgattttcagtacgtcgattggcaacgatttcatatgctgcagctgacgcagccctgcgtagcccatgccgaaatcatccagcgccacccgaactccggcattgcgcagcggacggaggattgccaccgcagcatgagggtcgtcaatacgtcggctttctgtcacttccagaatcagtgttcccggctgaatgcgatagcgggttaacagttccagcatatccgccaccatattcgggtgcatcagttgcagcgcagagaggtttaccgacaagggcagcataatgccgcgctcttgccaggctgcaagcaatcgacaggactcttccagcacccagtgaccgacggtaaccatgagcccacagcactcaatgcgatcgattaagccatccggcaggtcccaactgccatccggttgctggatacgcagtaacacttccgcactgaccagtttaccgctggtcatctcgacctgtggctgtaaccaaattgcaaactgatgattttccagtgcattaaggatatcgctctcttccgtcaaccgcttctgggcggcttccatctgctgcggatcaaagaactgaatctgattcttgcctttatggcgagcggtaaatgccgcagaaatagcgcgactgtaaagctgttcggcggtgagatcgccgtagaacatcgccacgccaatgctacagtgcggacggagttgaatacgttcaatcggcaggcgctcgctcatgatagtgagcacttgctgacctaaggtgattgcgtgccacggttcctgtacaccgttggcaatgacagcaaagtcataaccgctaatctgcgcgaggatcatacgtggcgacagtaccgatttgagtttttccaccagcgtcagcagcagaatttctcgttgcgcctctttcagcacgcccgcagtatcacgcagggtttcacaggtgatgatcatcagcgcggtggtttgtttacgcgcgacaacctgctccagcatctccatcagcaaggctttgttcggcaaatccgacaccgggaagcgcatcgcattttcgttctgttcttcataatggcgctgcagcaattgctggttgaggttgtaactgcgcaccaacataccgatttcatcgtcctgatgcagacgcggtaatgccagttggtgaccaacaagctcctgggctgggatggcgttaagttcgcgagcaatattgcgtaacggatgcaaaatcaggcggttaatgcaccagctgatggcgacggtcaggataagcgacaaaagtaagtaaatggtcactaacgttgagagggtgctcatcacgaacttatacatacggaaggaatccgcctgtagtaccagataggcaattggctgcgggtttgccggacgttcgagcgagtaaacgcccagcgagatttgaaccggtagctcaaacaggcgagtaaccattaccggcaccgggcgctctggaataaaacttttacgcagcgcctggaactggttaggcagcactacatcggcacggctgaccacgcctgccggtttaatgctggcaagaatagcttccgcttcgggaatatcgcctttcaaaatagctgaagataagggttcgcggacagagcgagcaatgctttccagttgcgtagccgtgttatagcgattctgttggaccagatggaacagcaaaacggtgcaaaaaataaaaacgaacaccaggacaacggctgccaccattgccatctgcttgattgttaacgagcgacttacgcgcaaattgtctccccccggaaatcccagattgccgcccgagtatacccgatcgcagcggcattaagagaggcgctatctgaaaacttaccagtcggcgtaaggtatcagcggctgcggcggtaaatccatgtcaccctgccatccggcggcggaataacgtacgtagagcaggaaatggctgggtgcgtaatctttcgcctgctggatatcaattgccgtgccaacaaaccagttggaagtaacacgtcgttcaagtaatgcccgcgccgtgtagccgaagccctgactgctgccgccatcgttggattgccgcgcagcttcttcctgccagtcggtcgggatcagattcatcagcggataacgcggcatggttttggtgcgtgaatgcgaccacgagccagacgcccccagctcccacgaccagttttccgtgcgctcccgccacatcaccggtatggcaaacgacaggtattcctgcggactgtagtaaccgccctgaccgagtgagtagccactcagatctttgtcgtaatgccagatcatgttgttcaggccgattgtgacgcggcgattgttctggttaatgaccttatagtaatagcccgtcatccagcgcacgcgccagttatcttcgacatttttaccggttaactggtcgccactaagcgatgcccagacgccgtttgcttcacctttatcgtagctcagacttagccccacaccgtcggcacgtacgccaccccattttttcccggtattgctcggggagtctttttgcccaccaaaggccagcaaagaactggagatgggccgacggtgggcgttaacggtgtaacccagcggcccgatatcatcgctgtaactgatgccgccgaccacatccaccacgttgaagcccatcggcgtggtaccgatatcccagctccagacgtcatttcgccagccgaccgccacgctggcaccggaatccgactggctgcggttgccgctacagtcctgtaatgtacaggtgccccagttgtcatcccatttgccatcggcattagtggagaaactgccgacgttcatattgacgaaatcactgcgaaagaacatccgcccgtcagaatacggcgcatccacctgcaacatggtagtgtgcgctttcagatcggagtaaccaccggtgccgctcgaaccccagtaatcgtgctcaagggtgacgttaagatcctgctggcgatagaggtccgccgcatcgctgcgcacgccgcgtttcagccagtcatctttctcgtcgttacgggtcagtcgggtgaatgtgtcgttatcctgcggacgcgtcgtagtcacaccggatgcgaccatggcgtctttgtaggtttccagcgcctgctttggatcgcccgcctgcgcttcaaacttcgcaccgtcgcgcagcaccatcgcgctttccatcgacggtggctgagattttgcctgcgggatcaacttattaaacgtctgctgcgccgctgcggtatctccaagctgcgcctgcgccagcgccacgcgccgctgtgtgttcagcgaggcgttatcggtagcgggcagtttcgccagctggctacgtgccgccgctgtgtcaccggcagcaatatccacttccgtcagccccagaatggcatcggcgttagttggctcccgcgtcaggacattctgatatgcagcgcgggcggcggtgtaatcacgtcgctgctgcgcccagtcagccagcgtgaggtcaatacgcgtggaaggtggttgctgacgcagcatcgcttccgcttcagcttctttgccgctttctcgcaggcgattagcggtttccagcacctgatcgctttgcagtcgattaaccagctcctgaatattgctgttccactgcgcgcgcggcaggctgttgatatgcgccagcgccgctctgtcctggtcatgaccagagaggtacagcccgtaagcgtaaacctgctccgggtcgttcggcttctgctgcgccagattgcgcattaacgtatcggcctggctgcgttgtccggcctgccagagatcctgcgaaagtcggtaagtaatccatacgctgccggggtccagcgccagtcgttgccgctgaagtgctgccgcctgcgcccatttgccctggttttccagtgcctctgcctgctgtgccagacggtcgttttgcaggctgcgttcgatatcatcaatgctacgccgctgactggcagagagcgaggcgataaacgcttcagctttttctggcgattgctggcggtaaatatttgccagcccgcgcacggcgttagtgttgccgctgtccatatgcaaggtctgctgataataacgttcggcggcgggataatcttttcgcgccatcgccacatcgcccagccccagcactgcataactgtcggtgttatcgacattacgcgcctgctggaacaggcgttctgcccggtcaggattattggctttcagcgcagcatcgccctgctggatcgccagccagtagcggtttactttcagcagactgttccatttgtcgttgttgctgctgtgcgggtccagtgcgagggctttttccagattcgccactgcattggcgcgatcgcctttctgagaatacgcctggcccagcgcccccagagcttcactgtctttcgggttcgcccgcaccgcctgttgtagttcgggaatggctttacccgccataccagagtccaccgccgctaaaccttgcgcacgagcgcggaaagcaggatcggccagctgtttttgctgttctgccagttgcgattgcgcagccgccacgctatcgccatcactaaagatcgagagatattttttcagcgccgacacactggcatcactgacgggcatgtctttaatctgcccgtaccagattttagaggccccttcgcgcccggcgttcgattttgccatctgttccaggacggcaaaaccttcgtcacggcgatcgctactaaacagcaatagcgccagattgttttgcaggcccgtattgcccggtgcatccgcattgatgcgttttaactgattaatcgcttcgccacggcgagccggaattttcgccaccgtactccagtactcgacagcaatgtcaccttccggcggcgcaccgttgaacagtttgttgtaactcgccacagcttcttctgcatgaccggtcgtcgcctgcaatcgtgcctgttgcagtgcctgacgaccatccggcgtggaaagtagcatcgtagtccgcgacgatttatacgcatttgaactcggcgctaactgcgacagccgatcgagctgtttttgcgcgccatcaatatcgccctgacgtaacaaagaacggaaacgggcggcaacgacgtccgggttattcggatcaataagttccagccgatataacgactgttgcaccagatcttcacgatgggtcgcttcgcctaaccgaacttgctccagcaactgttgctgagcggttggtgctgcctcgaccatcggcatgacggccagaccgagggaaagcgtgaatatgtttagtgtgaatttgcgcattcctggccccagtcaggtaataactcaccttttgtcgagaagcggaaacggtgttgatcccagccttgtccaaacagggtcagcacatagttgtaataggcatcgctgccgggaaagttatcggccacgcgctggcgctgaacggcctgcgcatcgcggttttgtaaaaagggcagcatggcggcagaaaaaccgaccggtcctttaccctgcgctttccccgtagccacatccactttttccggcggataaccgtttttctcagtgaatgtcgccatcggtttaaaccggttgagcatccgcgctttttgcggatcgctgtcaggcatcatgcctacccacatgtaaacgcggatagcgtcgtagctgctgatcaatgttttttcggcttttagctgccagcctttgtctttctcatagcgcacccagtctggcgaaaaacctttcggggcggtttccagcaataaacgttgattggtttcgcgcagcgtggtccacggcgcgccaaagcgggtgaaatactgcgccagcgtcggcggcaggtagctggggttaaaacgccagctgttatcctcagcaaaacccactttgcccggtaacaacatggaacccagcccaggcaccgtcaccacttcctcccgcgcgatacgttttagcaacgcgctgccgatgtcggtataacgctgctctttccacaaacgccccgcctccagcaacgaccaggccatccagacatcaccatcggaggccgaattgctgtccagcacttcccacttactgttctctttcttgccccacagccaggcgggcaaacgttcttttaaagagccctgagcgagattgttctgcgtccagtcgagaatattatcgaaagctacacggtcgttagccgccagggcaaagaacataccgtaactttgcccttcggaggtggtgattttgcgcgcgtcgctggggtcgatgacgcgcccttcctgactgatgtaatcctttttaaactgctcccaggcaggccaggtacaggctgcctgaacactaaaggcagccaacagcagcatcgtcacgattccactacgcaacacattcatcttcaattactcgttatccgggttaagacgacgacgactaataattcgcagcagacgccacagtacccatgccagcaatatcacactgatagccgccagcaccgccagcagaatcggatggtttgccagcgcataccacaagcgctcgaaccacggcagatgacctacgtaataaacgtcgccaacacgtaggctgttgataccggactcgcggatcaccgcgaccgaaccgaacatggtggcgcgtttgccgctatcgttcaccgcatcgttaagcatttcataaccgcgtgggctatctgccagcagcgcaatcacgctgcgctggtcgttatacggcgactggaagccaatcaccgccgccatcgcaccggaagaggtcagcgttgactgggtttctgccgcgcgatcgctctcgtccggcacaatgccggggaacggggtctggcgcatcggtgttttcacccagctttcggtcgcctgcaccaataggtcgatctgcttatcgtctttcagtttgtccgggataccaccgatgatcatgatgtcggcatctttgccctgaatggtgctgccatcatcggtcaccgtcagattaatcgccgggaagcccgtctgtgcgccgataaaaccaacagtattcagcaacgtttccatctgtgcttcgttaggcgctttcggcatcacggtgatggtttgcgacagatccgccatccggctgaatgggaagcccgcgttagcaaaggcgcgtagatccggcatcgggatgaagtggtaatacttcgagaagtcgatggtggagtcgtcaccaatcaccacatgattctgcaccggctggaaggtaatacagttatccaccgaaccgcccggcatcgggttcatatactcaaagtcgaagcgcagctggttggtcgcgcccagtttcagcgccggaatagagacatctgttttgccatccagcaaaccttgtaataccggaatccgcagcagcaggcggttcgcctcctgtttgctgctcaggttgaaggattgcaggaactggttattcaggctgatatccatccgcgaactgtctttcaccggcggcatggtgtagcggtaattaatatccatatcaatgccggtactgcgcatcaggtagagatccggcggcaggtttagcgaaacgttaatcgctgctggctcaagaccgctggattgtaactgttcttcataggttttcagttcgccaaatgtgaccggacgatcggtacgtacccagttcggcgcatcgtacggcttacgcggtagcagcggtttcacttcattcactaccacgctttcaccacggaacagaatgttaccctgagcgatacctttcgctgcctgcaacaggtctttgtcgtcacgaccaaacaccaccagcagtttgacgtaaggattctgcggatggttaatcatctcaatcaccggggcttttaccgccggatgatcgcgcaggaagtccggccgtttgtcgttggttgcaaagacaatggcattacgatccggcagttggttatagagcaccgggaagttctgcccacgccagccagaacgcgaaccaaaccacgaggcgacaatggcagaggcttgttgcagcccaacatccggcgcacccgcaaagaccatcggcaaggtgttggtgcggttatcacgcggatcaaagaatggcaccgggaagtgtgacaggtcattcttcacattcagggtctgataggtcagatccagtccactgctccgcccaacatccagccaaagcgtggtgctggccgggttttcgcacacgtcctgataatggccgacaaactccagccgcacacggttgaagtcggtaataaacagtgggttaatgggcatttgcgccagcgtttttttacccaactgttctttggtcactggcagcacgcccatcagctcatcattgagataaacctttaactgcgactggacaggcagtaacgatggcgatggcgtgtattcgaggttgagcatcgccttcgtcaccacttcatcgctgcgcataccaaactcaatgctgccgttcgggttaatgccacgtagcaccatgctgcccggcggcggcgcaatttgcgcaaaggtcagcttcacatcacgcgaaggaccgttctgcgccacgactggcgcatcagcgccctgcacgcccggcatcacttgccccacctgcggattttgttccgtctgggcggctacagctggctcagcattgatcagtggttgcgttgctggcgtcgcctgcgtcatgaaagaggggaacgcactcatccccatagccactgcacaaatccagaatagttttcttttcatcgcgttatcatcattgttgagccaaagcctgatccgatggttgtgccgtttcgctccgctccgggcggcgcggaataaacgatacaacccaggaaaccagagaagtcagcacacggaatatgcccttcaccgaagaaggcgcaaactccgccagatggcggtagccacggaagccgagcttcagaatatccagcagactttccagcggcttatcttccgggtagctgtcctgccagagcgcccatgtatccgcacgggcaaacgtacactgcacaaaatcgatatgttgctgggtggtgagcggcattaatttcagcccaacttcattacccatcacgcgcgccacctgggtcgggaagacgtattcctgctgaccgcgtttaagcaacagattcactttctgcccttccagaatctgcgcctgaccgttgatcttgatccccaaaccaccgtcggagaaatcctgaacggtacacgagaagaggtgaccatcttcgcgggcaattgccgcgggcatcgtcatctccacgcggtgcgatcggcgtacctgtttgctttctaccgataccgcaactgcgccgccaagaacaatcaggttgtagaacacccacaccatactgacgaccacggtgagcatctcggttggcgggccatagaagtagcgccagatgcctaccgcaacgcccaccaggttgagtagaacaaggaagatgtagggccgcgagatcacccagtcgacgtactcttcttccaccagtccacctttggcggtgacgttaaatttgcctttgtgcgggttaatcagcgccaccagcgtcggtggtgcgatataccacgccagcaccgtttcgtagatttcactccagaaagagtggcgatatttgccctggatcttcgagttggtcaggctggcatggatcatatgcggcagcacgaatagggcgatcatcaacgctggcgcatagatgatgtaggcatgaagcagcaggaacgccagcggcgcagtcaggaagatcagccgtggaatgcccgacaagaagtggaacatggcgttgacgtagcacagccgctgagcgaatttcagccctttaccggtgagcgggttatcgagacggaagatttgcaccatcccgcgcgcccagcgaatacgctgaccgatatgcgccgacagactttcggtcgccagccccgccgcctgcggaatacgcatatacgcggaggtatatccacgacggtgcaaacgcagagaagtatgcgcatcttcagtcacagtttcgacagcaatgccgccaatttcatccagcggcttacggcgaatcaccgcacaggaaccgcagaagaaagtggcgtcccacatatcgttgccatcctgcaccagaccatagaacagcgtgccttcgttcggtgttttacgaaaacgccccaggttgcgttcaaacgggtctggcgagaagaagtggtgtggagtctgcatcatcgccagctgtttctctttcaggaaccagcccatggtcatttgcaggaacgatcgcgttggtacgtggtcgcagtcgaaaatcgacacgaactcgcctttggcatatttcagcgcattgttgatgttgcccgctttcgcatgttcatgagtggtacgggcgatatatttcacccccacgttttgcgcaaactggcgaaactcttccctaccgccgtcatcgaggatccagatgttcagcttgtctttcggccagtcgatacccagcgaggcgtaaatagtatttttcaccacgttgagatcttcgttgtaagtcgggacaaagatatccaccgacggccacagcgacatatctttcggcaatggcaccggctgacgattcagcggccatactacctggaagtagccgagcaccagcacaatccacgcgtacgtttcagcgaagagcagaataagcccgcacaccaggctgaccggatcgtcccagttcagcgtagaggtgtaacgccaccagatataacggcaagaaacggtcagcgacagcacaatcaacattagcgccgagaagcgccccggcatccgccgtacgatcagcgctacaccccacagcagcatcaggaagataaactgcgccagcgggttaaacggttgagtaacgcagattaacgccagaatcagcgagaaggtgacgatgataccgaggatcaaccgccgcgccccggcactcaaatgaccgagctcttttttctcatcaagatgctgtgttttatggctaacgcgctcaggcagctcgttcatccattgatggtaacgtccacgaatattctgcagacctgaaaatgcccgcctgcgcggtttcggcgtttctttgcgcgatgtaccgatcagtaaccagcatgtttgaatgagataacggaccgggtccagcggacgcggacgcgaggcgttgatatgcggatacaggtttttatgttctgcgcgaatacgctgccagcgcgggtgctccagcggaataaaaatccaggccaggatcatccagaaacagccgagcgtcgcgctgaaagccgacgcaccgtgacgacgataatcgcgataacgcccgataagccgcgcgttgaccggcgggataagcaaccaccgggtcaggatactcatgatgcactcccgactggcgttttcagcccggagtagttcaacaggcaccagttcgccagcgtcagtatctcttcagccgccagcgcatcactgcgatattcacctactggttgcttagccgccaggcattcagccatcgcttcatcacgatgaatgagcatcggcagtaatcggcgctggctttgcaaccaaagctggtaaatatcgtcctgaacctgactgccaatacggaagtcattaatcaaaatatgtgcgccatccggcagcgcttgctgatgcagtcggatatggcagttggcatccacattgacgattgccagcgagtgatcgcacaaactcagcagctggtgggttatctgcgaggcatcacgcggtaagtcgattaaaatccactggtaacgcccgctggcttttagttgctgtaagccggagcaaatatcgctcagccgggtttgccagtgctgtggattttcttgttcttcaatggataactgaccaaaaggcagcaaatcgagctgcgaggtgtagcgcaacccagcgtcacgccagtcctggccatccagcatcgctctggcccagccctgacggtgggtaaaatcaacattaaatgacaggcgcaacaagttgtccgggcaggcatcgaccaccagaacattttctcccaacatttgtaatgaccaggctaatgcggcggtgatggttgttgtccccacgcctccccgcaccccctgcaatcccagtacggccattcaccaatcccctacttttgttgcgcaaactctgccagcaacggccagcgttttaatgccgcggccaactgttcgcgttgggaaatatcggcataatcaatatcaggcagtgaaaatgcctgctttaacgccacaatatcattctggaagatatagcctatcgcgggatcaggcagagtatctggttcattgttattcattttgcttgatccctatgaaataaccgtaccgttcatgagacaattctaaccgtgagcatttcgccggtttattgtttacggcgagacgggaatttgctcactttttgactttccgttacgcaacagaaaaagttaaaaacgaaaagactaaaatcacacgtcttgtgaccttctaaattgattcacatgctaaatctgataagttttaatttcaatggtaggtttatttcttagctttcgctagtaaactgataatcagacaaaatggtgacatgagggacattgtggaccctgtattctctatcggtatctcatcattatgggatgagctgcgacatatgccagcaggcggcgtctggtggtttaacgtcgatcgccatgaagatgctatcagtctggcgaatcaaacaattgcatcccaggctgcaaccgcacacgtcgcggtcattagcatggacagcgatccggcgaaaatctttcaattagatgattctcaagggccggaaaaaataaaattattttcaatgctaaatcatgaaaaaggtctatactatttgacccgtgatttgcagtgttctattgatccccataattacctttttattcttgtttgcgcaaataacgcatggcaaaacattcctgccgagcggcttcgctcatggttggataaaatgaataaatggagcaggttaaaccattgttcgcttttggtaattaatcccggaaataataacgataaacaattttcattgttgcttgaggaataccgttcactttttggtcttgccagtttgcgttttcagggtgaccaacatttgctggatattgccttctggtgcaacgaaaaaggggtcagcgcccgtcagcagcttagcgttcagcaacaaaatggtatctggacattagttcaaagcgaagaggcggagatccaaccacgcagcgacgaaaaacgcattctgagtaatgttgctgtactggaaggtgcgccgccgctatcggaacactggcaactgttcaacaataacgaagtcctgttcaatgaagcccgtaccgctcaggcggcgacggtggtcttttctttacagcaaaatgcgcaaatcgagccactggcccgcagcattcataccctgcgtcgccagcgcggtagtgcgatgaaaatcctcgtgcgggaaaataccgctagcctgcgcgccaccgatgaacgtttgttattggcctgcggtgcaaatatggttattccgtggaatgcgccactctcccgttgtctgacgatgatcgaaagcgtgcaaggcagaagtttagtcgctatgtgccggaagatatcactaccttgctgtcaatgacccagccgctcaaactgcgtggtttccagaagtgggatgtgttctgtaatgccgtcaacaacatgatgaataaccctctcttgcctgcccacggtaaaggcgttctggttgccctacgtccggtaccgggtatccgcgttgaacaagccctgacgctgtgtcgccctaaccgtaccggcgatatcatgaccattggcggtaatcggctggtgctgtttctctcattctgtcggattaacgatctggataccgcgttgaatcatattttcccattgcctactggcgacattttctcaaaccgtatggtctggtttgaagatgatcaaatcagtgccgagctggtgcagatgcgcttgcttgccccagaacaatggggcatgccgctgcctttaacgcaaagttctaaaccggtcatcaatgccgagcacgatggtcgccactggcgacgaataccagaacccatgcgactgttagatgatgctgtggagcgctcatcatgatgaccatcagcgatatcattgaaattattgtcgtttgcgcactgatatttttcccgctgggctatctggcgcggcactctttgcgacgcattcgcgacaccttacgtttgttctttgctaaacctcgttatgttaaaccggccgggacgttacgccgcacggaaaaagccagggcaaccaaaaaatgactcaatttacacaaaataccgccatgccttcttccctctggcaatactggcgcggcctttccggctggaacttctattttctggttaagttcggcctgttgtgggcgggatatcttaacttccatccgctcctcaatttggtgtttgccgcgtttctgctgatgcccattccgcgctacagcctgcatcgcttgcgccactggattgccctgccgatcggctttgctttgttctggcatgacacctggttgcctggcccggaaagcataatgagccagggttcgcaggtggcggggttcagtaccgattatttaatcgaccttgtcacacgctttattaactggcagatgattggggccatttttgttttattagtggcctggttattcctgtcacaatggattcgcattaccgtttttgtggttgccatactgctatggctgaacgtacttaccctggcgggaccaagtttctccttgtggccagccggacaaccgacgaccactgtaacaacgacgggtggtaacgcagcggcaaccgttgcggcgacgggtggcgcaccggtagtgggtgatatgcccgcacaaactgcaccgccaacaacggcgaaccttaacgcctggctgaataatttctataacgcggaggcgaaacgtaaatcgaccttcccgtcttcgctgcccgctgatgctcagccatttgaactactggtgattaacatctgttcgctttcctggtcggatatagaagccgccgggttgatgtcgcatccactgtggtcgcatttcgatattgagttcaagaactttaactccgccacctcctacagtggcccggcggcgatccgtttactgcgcgccagctgcgggcagacttcgcacactaatctgtatcaaccggcaaataacgactgctatctgtttgataacctttcgaaactgggctttacccagcacctgatgatggggcataacggccagttcggcggttttttgaaagaagttcgcgaaaatggcggcatgcagactgaattgatggatcaaacaaatctgccggttattttgctgggctttgatggttcgccggtttatgacgataccgccgtgcttaaccgctggctggacgttaccgaaaaagataaaaatagccgtagtgccacgttctacaacacgcttccactgcatgacggcaaccattatccgggggtcagcaaaacagcggattacaaagcgcgggcgcagaaattctttgatgaactggacgccttctttactgaactggagaaatcgggtcgtaaagtgatggtggtcgtggtgccggaacacggcggcgcgctgaagggcgacagaatgcaggtatctggcctacgtgatatccctagcccgtctatcacagacgtccccgttggggtgaaattcttcggcatgaaggcaccacatcagggggcaccgattgtcattgaccaaccgagcagcttcctggctatctccgatctggtggttcgcgttcttgatggcaagattttcaccgaagacaatgttgactggaaaaaactcaccagtgggttgccacaaacagcaccggtctccgagaactcaaatgcagtagttattcaataccaggataaaccgtacgttcgcctgaacggcggcgactgggtgccttacccgcagtaagcacgaaaaaggccgcagagtttaacctctgcggcctgatccgggcgcaaattgccattacggcagcctgacgcccgcatgacacgttacttccgcttattcagccagttcacgatcatactggcaagaatgccagcaatgaccggagccgctaaatcatgccagaaggccatgcccagctctgcgagcgtcatatagccgcctgtgttgtaatgacaacgtttcgcggctattcttgagttgtttgggttcaagattagcccccgttatgttgtcaggtgcatacctgcaacgtgcgggggttttctctctccagcaaccaatgccaccagggataaagcccccgcaacattgcgccttaccggaacctttccggcttgccgctgattctacgactgtttttctgttccgaaatccatcacttactcactctgtgctgcgcattccgcagaatattatccgcttgcaaccgttgcatttttcttacgaaaaaggccgcagagtttcacccctgcggcctggtccgggcgcaaattgccattacggcagcctgacgcccgcatgacacgttacttccgcttgttcagccagttcacgatcatactggcaagaatgccagcaatgaccggagccgctaaatcatgccagaaggccatgcccagttctgcgagcgtcatatagccgcctgtgttgtaatgacaacgtttcgcggctattcttgagttgttcaggttcaagaatggcccccgtgatgttgtcaggtgcatacctgcaacgtgcgggggttttctctctccagcaaccaatgccaccagggataaagcccccgcaacattgcgcctcaccggaacccttccggcttgacgctgattctacgactgtttttctgttccggaatccatcacttactcactctgtgctgcgcattccgcagaatattatccgcttgcaaccgttgcatttttcttacgaaaaaggccgcagagtttcacccctgcggcctgatccgggcgcaaattgccattacggcagcctgacgcccgcatggcacgttacttccgcttgttcagccagttcacgatcatactggcaagaataccagcaatgaccggagccgctaaatcatgccagaaggccatgcccagttctgcgagcgtcatatagccgcctgtattgtaatgacaacgtttcgcggctattcttgtattgtttggatgcaagaatggcccccgtggtgttgtcaggtgcatacctgcaacgtgcgggggttttctctctccagcaaccaatgccaccagggattaagcccccgcaacattgcgcctcaccggaatccttccggcttgacgctgattctacgactgtttttctgttccggaatccgtctcatcttcactctgtgctgcgcattccgcagaatattatccgcttgcaaccgttgcatttttcttacgaaaaaggccgcagagtttcactcctgcggcctggtccgggcgcaaattgccattacggcagcctgacgcccacatgacacgctacttccgcttgttcagccagttcacgatcatactggcaagaatgccagcaatgaccggagccgctaaatcatgccagaagccatgcccagctctgcgagcgtcatatagccgcctgtgttgtaatgacaacgtttcgcggctattcttgagtggtctaggttcaagattagcccccgttatgttgtcaggtatatacctgcaacgtgcgggggttttctctctccagcaaccaatgccaccagggataaagcccccgcaacattgcgcctcaccggaacccttccggcttgccgctgattttacgattgctttttactgtcagcacccagcaatcttcctcattgcgtgatgccttccagcttaatttcttaatttgcaatagttgcagttcatatccgggctgactccagactggtagtgaaatgcgcaattttgtagaattgcgcctcctcgcgacctccccagtgaatctgttgcctcattttttatcatactgcgtattcgacttctccacctgttgcgcaagagaatctgggtttattcatttttgcgaggccgacttctttctggacaggactttatgcagcacaacacactaccgaaacacgatcagaaattgccgtttacacgctacgacttcggctgggttttattatgcataggcatggcgattggtgccggaaccgtgctgatgccagtacaaattggcttgaagggaatttgggtatttattaccgcagcgatcattgcttatcctgccacttgggtagtgcaggacatttatttaaaaaccctttctgaaagcgattcctgtaatgactacaccgatattatcagtcattacctggggaagaactggggaattttcctcggggttatctactttttgatgattatccacgggatttttatctactctctctccgtggttttcgacagcgcctcgtacctgaaaaccttcggtttaaccgatgccgatctttcacaatctctactttataaagtcgctattttcgccgtactggtggcgattgcgtctggtggtgaacgattactgtttaagatttctgggccaatggtggtggtcaaagtagggattattgtcgtgttcggttttgcgatgatcccgcactggaatttcgccaatataaccgccttcccgcaagcctccgtctttttccgcgatgtcctgcttaccattcccttttgcttcttttctgcggtatttattcaggtacttaacccaatgaatattgcctatcgtaaacgggaagcggataaagtactggcaacccggctcgcgctgcgtacccaccgaattagttatgtcacgctcatcgcggtgatactgttttttgccttttcgtttaccttctcaattagccacgaagaagccgtttctgcctttgaacaaaatatctcggcactggcactggccgcgcaggtgatccctgggcatatcattcatatcacctctacggtactgaatatctttgccgtactgaccgcattctttggcatttatctcggtttccacgaggccattaaaggcattattctcaatctgttaagccgtattattgataccaagaaaattaactcacgcgtgctgactctggcgatctgcgcttttatcgtcattacattgacgatttgggtttcgtttcgtgtatcggtgctggtgttctttcagttgggaagcccgttatatggcattgtgtcgtgcctcattccgtttttcctgatctataaagtcgcacaactggaaaaacttcgcggatttaaagcctggctgattctgctgtacggcattttgctatgcttgtcgccactgttgaagctgattgagtaaaccggagcacaaggctccggttttgaacattaccgctgcggattttcatcctgatcaacggcaaagcaggccaccagttgaccgccgtaatctttcagtgctggctgcaactgggtgcaggggccgaagcgtcgacgacagcgggcgttgaaggcgcaacccggcggtggattgagcgggcttggcagttcaccggtgagcttgatgcgctcgcggcgatcgtccgggttcaggcgcggcgtcgcggagagcagcgcctgagtgtaaggatgacgcgggttattgaagatttggtccttcgtccccttctccacgcagcggcccaggtacatcaccatcacttcatcggcaatgtgctccacaaccgacaggtcgtgggagataaagacataagaaagccccagttcctgctgtaaatccatcatcagattcagcacttgcgcacgcactgagacgtccagcgcagaaaccggctcatcggcaatcaccacatccgggtcgagcatcagaccacgggcaatagcgatacgctgacgttgtccgccggagaacatatgcggatagcggtcatagtgctcggttttcaggccgactttcgccatcatcgacagggctttttcccgacgctgttctttgcttaagctggtgttaataagcagcggctcttcgagaatttgcccaacttttttacgcggattcagcgaaccgtaagggttctggaagacgatctggattttctgccgacgcagcttctgcgcctgcggatcgtgcttaagcagatcctgcccctggtaatacagctcgccaccggtgggcatttcaatcatcgtcagcaaccgaccgagggtcgatttaccgcagccagattcgcccactactgccagcgttttgccacgttcaaggttaaacgaaacgccatccagcgctttaaccagacgttccggcgcgaacatgcctttcttcaccggataatgttttttcaggtcgatagcctgcaacagcggttgttgcgaggtggcctcttgcgtactcatagtgtcggcctcccggcatcatcaagtgggtaatggcatttggactgacgcccatcagcgagcatattcagcgccggttcttcagcgcgacatctgtcagtggcataggggcagcgcgggttaagcaggcagccgttcgggcggtcgtacttaccgggaacgacacctggcaacgacgccagacgttctttgtcctgagcaaattctggcagcgcacgcagcaatgcctgagtatacgggtgacgcggcgcatggaagatggcgtgcgcatcaccggtttccaccacctggcctgcatacatcacgatgattttatgtgccgcttccgccaccagcgccaggtcatgggtaattaacaccagcgccatgttctctttctgctgtagctccagcagtagttcgatgatttgcgcctgaatggtcacgtccagcgcggtggtcggttcatcggcaatcagcagttttggccgacaggcaatcgccatggcgatcatcacgcgctggctcatgccgccggaaagctgatgcgggtaaacatccagacgcgatgccggatcgggaataccgacctgattcagcaggtcaatcgctcgctgacggcgggtacttttgttgccgccctgatgcaccttaatcgcttccataatctggaaacccacggtgtagcacgggttaaggctggtcatcgggtcctggaagatcatcgccacttcggcacccaccaggttgcggcgctcttttctgagatacgctgcaaatcctggccgttaaactccagtttttctgccattacgcggcccggataatcaatcagccccataatcgccagtgaactgaccgacttaccggagccggactcacccacaatcccgaccacttcgccctgttttacgctgtagctgatgcggtctacggcgcggaacggcgcgctttcgtcgccgaaatgcaccgataatttatctacatttaataacgccatctcgaacctcttactgcttcagtttgggatcgagcgcgtcacgcagaccgtcacccatcaggttaaatgccagcaccgtcagcaggatcgccagacccgggaaggtcacgacccaccaggcgctttgcgcgaactgcaacacgtcggagagcatggtgccccactcaggcgttggcggctgtgcccccatgccgaggaaaccaagagcagccatatcgagaatggcgttagagaaaccgagcgacgcctgaacaatcagcggcgcaaggcagttcgggaagatgttaataaacatctgacgcatcgccccggcacccgccacgcgagacgcggtgacgtaatcgcggttaacttccaccagcacggcggcgcgggttaagcgcacatagtgcggcaaggcaacgaaggtcagtgccagcgcggcgttaccaatcgacgggccgaaaattgccaccagcaccagcgccagcagcagacttggcagcgccagcatgatatcgaccacgcgcataatgatgttatcgaccaggccgccaaagtaaccggcgatcaggccgagaataacgcccataatcagcgataacacaactaccagacagccaaccagcagcgacaggcgcgcaccgtacatcaggcgcgacagcacatcacggcctacgtcatcggtgcccagcaagtgcgccatgctgccgccttcctgccaggctggcggggcgagcagtgcatcgcggaactgttccgccgggttatagggtgcaatccagttggcaaagatcgcgatgaacagcacgatgacgacgtaaaccagcccgacgaccgcgcctttgttgcgtttaaaatagtgccagaactcctgtaacggggtcatcggcaccggtgcgctaatcactttattttcagtaacctgtgacatgatgtccccttacttcttatgacgaatacgcgggttcaccacgccgtacagcagatcgaccagcaggttgacgaggataatcatcgtcgccaccagcaatacgccgccctgtaccaccggataatcgcggcgttgcagtgcgtcaatcaaccagcgccccagaccgggccacgagaaaatggtttcggtcagaatcgcccccgccagcaatgttcccacctggaggccgataacggtcactaccggcagcatcgcgttacgcagcgcatggacgataatcacccgcatgcgggtcaaccctttggcgcgcgcggtgcggatgtaatcttcacccagcacttccagcatcgaggagcgtgtcatacgcacaatgaccgccagcggaatagtacccagcacaatggccggtaagatcatatgggcaacggcatcgataaagttgccatcttcaccccagatggcggtgtcgatcagcataaaaccggttaacggattggaatcatcgaggaacaccatatcgctcacgcgaccggagacgggcgtcaggttccagtgcaccgaaaccagcatgatcagcatcatgccccaccagaagatcggcatcgagtagccggtcagcgccaggccaaccgctgtgtgatcgaaaatggaaccgcgtttaaccgcagccagcacgccgaccggaataccgactgccgtagcaaaaatcatcgcgcagacgccaagttccagcgtggcctggaagcgcggcacgaactcttcccaaaccgggatgcggcttttcattgaaatgcctagatcgccatgcataacgccccaaatgtaatggagatactgctgccacatcggtttatctaagccgagttcagccagcagctgcgcgtgacgctctggggagatcccacgttcgcccgccatgatcatcaccggatcgcccgggatcatgtggacaaaggcaaatgtgagaagggtaataccgataaacgtggggatgacgagtcccaaacgtcggagaataaactgcaacataacccggattctctatagtgacccgcagcctggaactgcgtgtctgtattgctcacaaatcaattcccgcccaggtcgggcagggaatgaagtattgctgccggatggcgctgcacgcagaggcacagcgccaccgggtatggcttttaattattcgatagagacgttttcgaagtgatgtttgcctaatggatcaaccacatagcctttaacttctttgcgtaccggttcaaacacggtggagtgagcgatgatcagtgccggagcctgatcgtgcatcaccacctgcgcttgcttgtacagttcaacgcgtttgttgtggtcgtcggtagcacgcgccggttgaatcagatcttcaaacggtttgtagcaccattttgagtagttggagccttgttcagaggcggcgcagctgaacagggtggcgaagaagttatccgggtccccgttatcgccagtccagcccatcattaccgtctgatgctcgccatctttcgcacgcttgaggtattcaccccattcgtaggtgacgattttggcctgcacgcccactttcgcccagtctgcctgaatcatctccgccatgcggcgagcgttcgggttatacggacgttgtaccggcatcgcccacaggtcgatggagaaacctttttccagacccgcttctttcagcaaggctttcgctttttcaggatcgtaggtgtagtcctgaacgtcgtcgttatagccccacatggttggcgggatcaggtttttcgctgatacgcccgcgccctgataaaccgctttgatgatcgcgtctttgttcaccgcgtaggtcagagcctggcgaactttcacgtcatcgagtggttttttctgcacgttatacgagagataaccgacgttcagccccggcatttccatcagattgatggatttatcctgcttcatgcgagcgatatctgccgggttcgggtacggcatcacctggcattcattcttctgcaatttcgcgtaacgcacggaagcgtcaggagtaatagagaagaccagcgtatcgatctgcggtttggtgccccagtagccatcaaacgctttgtagcgaatacgggaatctttttgatactgctgtaactggaacggaccggtaccgattgggttgaggtccagtttttccggtgtaccggctttcatcatcgcatcagcatattcttttgacagaatagaggcgaagtccattgccaggtcagcgaggaacggcgcttccgggcgagtcagcacaaactgaactgtgttgtcgtccacctttttcacttcgctgatcagctccggcaagcccatgccttcgaagtattcgtagctgccgccagaaaccttatggtacggattttgcgcgtttttctgacgatcgaacgagaacaccacgtcatcggcgttcagttcgcgcgtcggtttgaattctttattgtcgtgccacttcacacctttacgcagatggaaggtataggttttaccgtcttcgctgacttcccacttttcagcgaggcccgggatcacttcagtggtgccgattttaaattcaaccagacggttataaagcgggacggaagaggcgtcataggtggtgccggaggtaaacagctgcgggttaaacccttccggagatccttctgagcaataaaccagagttttagcctgaacacttgctgcgacggtcatagccaccaggctgagaccaagcttcagcatccctgactttttcaaggaaatacgcattattctgctccaattgtgatgtttgttgttttaaccctttgcagtgggttgtcgctgcctgaccttttttgttttttgcccggtcgggtcaacgttatgaggtggggatgccgaactaattaacatcagtgtaacagtgcggatcctccataaaatgcccctcgtgacctacaatctgtcaacagaatgtgaaaacgtcaatacagccaaccgggatttacaccaacggtgagaatccacaaacaaagattaaaaaaacttcaaacagctatttgcagcagagaaatttgtgctactccaacatgaccagaacaatcagcttaatatttagcaacatttggtgattaagttttatgcatttagtgaaaaaatctgaggaaaaggtggatatctgagcgattaataccatgaacgctaaaacgcacagcggaaaatgccagcgccagccataagtaacgcaaaaaaagatttaagcaaatataaaaaaagacaatggtttctgtcacaaatccgttaatggatagtgagatatggggcgcaaatttggcagggaatgtgtggtgtgtaggtcgaataaggtgttcacgccgcatcttacaataagtacggtgccgttgcctgatgcgacgctggcgcgtcttatcaggcctacgtcgagtcgaacctccctgcccccggaagttctcatcctcatgggctgcagatgcaaaaaagcctgctcgttgagcaggcttttcggatttggtcggtgatagaggattcgaacctccgaccccttcgtcccgaacgaagtgcgctaccaggctgcgccaatcaccgaatgcggggcgcatcttactgcgcagatacgccctcgtcaatcccttaatagcaaaatgccttttgatcggcgagaaagtcagcaggcctcttagttagccgctgccttttttgtctgcgggatgtgacaccagttgttgttttcgttaattcccccatccggtgaagtatagccaagacaacccatgatggtgtcgtacagctctacgtgacggcgtggcactttcatgtcggcttcttttttcagctgcgcaaatgcctgcgcattgaccggattttccagatatttatctgacatccagaccatcatcggtacgcggaactgctccggcggtgccagttcacgcggcgtgccgtgcaggtgctcgcgttcattaattgactcaccgtggtcagctgcgtagaacacaatcgctttcttatcgcgaacctgatcaatcacgctggagataaagtgatccacataggtcaccgaattgtcgtaggagttgatcatctgcgctttggtacagccgctatcaacaccaatacattccggcttccactgcgcgaagctgcgcgggtaacgctgggtgtagttaaagtgcgaacctttggtatgcagaatgatcagatgcttaccatccgggttgcgccccagcgattgctgcatttcgtctaccagcaacatatcatctaccggcttgccacggttacgtggctccgcaccaatctgttcacggtaagcaatattgtccgccatcgtattgctgtagaaccacatttcgctctgcatagcgtagaggtcagaactgaatcctaactgcttcagcaccgcgaaaatgttctgttcttttaatgtgcgctgcggattatcttccgcgcccccctgacgtacaaacatgcaacgcagtgagagtttggttgcggtatcacaggagtaaccacggaatgccgccagatttttctcctgggccagcttcggcgtggtattacgctcatagccgaaaatgcccatatggtcccaacgcgtggtttcaccgatgataaacacgacataagtgtcatcaacgttttgcggtgcctggtacgtaaacttcttcgccgggttaaggagagaattgttatcggaagattcatcgacccgcgcccaggcgtacagccccaacgcagaaagccagtttgatggcagataagagttcgctacgacaccgccataactcggcaaatcaacgccggtcgccctctccactttcttctgctggatatccagcaaacgaatcggtgcccaaaccataatacccgccagtacgacgaccgccaggctgcgaatacgctgccctggggttcgcagttgtcggagcaaggtgtagcgacagcggttattccagataaggataagaggcaatgcactaacggcgattaaccagagaataaagttcagaccaacaacttcttttgacaggtcgatatcggtggtcatgacggaagcgatgatgccataaccaatgaccacattaaggaaggtcatgtaatagctggcacctgcggaaaagagcaccaccagcgacgccagaatacgccagctgcggcggccaaacagcgatagaagacgtagtaaaaagaaggtcaccagtacggtggcggccagttcaacaacagcagaaacgcctttccagacggtaaaatcgtgcgcatagctgccgaagcggcgataaaaaaccgcgccattcataaaaaggccaatatagattgcaagcaaaaagctcagcttctgctgtgtaatcgatttgatgtatctcatgcaaacaaaccctggacaaacaggtgataacaccctgcttagcggcttttcaggcccggcaggggaaaagtgcggaggtagtcagataagtaaaatctacacgcgcgaataagtagaccacagcaaagcgaaaaagtgtggggaaagagtgtgcatgaagcacaaatttacaaaaatgcaagtttgaaaagagactttagcgttacaaaaagcagtaaaaagggccagttaactggcccttaagatgtgaaattattcgtactgtacagtaaagtcgaccgttgcatctgcgcgaccaatagttgcatcggcgcgaataggcacgtagctggcgatatagttcagttgatgtgcgccatcaccgttaattgcaaactcaaccggtgtcggcgttgtattttccgggaactgttgtactccagcagcggttttgattttcagcccaacgcctgtagcgccacccgcatccagcgcaaaaagatttgagtcgtctgcattgggtgtaccgtccatagtcacgtaggctctgaccacttcgctacagtttttcaggccgatggaaaaaggagtgggattaatttccgttccgattcttaccggctttttgagaaccgcggtgcccatgtcaacctcaacgctgtctttcaccagttcgcaagcaccctggctgattttaagggtgaatttcaatgttcctttcggccctaaatccgtggttgccgcgaatgacgaaaaggaaagaggcagcaggcataacgcaagtattgttcgcttcatgactgttactccagttcgacatgtatggtagcaataccgctataatccccggcagcgggtaattttccggtagtgctaacgggataagcggtaattgtggttgtcgctttgcgtttgacatcttcatacagcgagcctgggttcatttctaataagctattactgtcattcggcttaagaatattacctttaccgtcctcaatgactgcaccaacatcggcgttgcctaaatcaattgcgctgggataggcagtatttggtgttgcatcaatactgagataaattttgacgccatctgaaatattattgcagtcaaagcttaattctttttgtaccttctgaacattttgtggtggttgtccggcacgccctttaaaatcatgggcctgatattctccgaatggaatatccagtacggtgccagcggcaagttcacagccttgagtaactgtaatactcccggaaatactgacattggccatgggctgactatcattgtaaacacctttcttttttgtcccaaagagggacgcaactcgtgttttaggaataatcatttgcccaacaaaaggatgtgaaatataaatactgatacttcctttaccacctgtcccccaattgttagcagtatagggcgtacattctttctgtgccgtgccattgcttcgatcggtaaaaggcaccgggatatctaattgtgtgtagacatatattttggtgagaatatcaatgtaattattgaatttatagtacccatctacagttccaggctcaggcagaagcgttacacctttaaaataagtcacaactccattatctggaatgggatccgggcattcacaataagcggaatattttgtacctaaagcaaagggctgagttaatattttcccagccttattttctgaaggtacctggatagtctgtacgaaatcaaaactatactcatgggccaccccatttgatgtctgacatggtccccaatccgcagcccatatatttccagcaaaagtgctcgtccctaacagcaccatacctgccaacaaatttttaattttcatctaaatatccttatttctcgcataccgcattaaccatcacgatagccgcattgtccttgttctctggcaagcggaatggcacacggcaacgttgcgcctgctcgttcccccagctcacctgcaattcgccctcttctggcatcccgctgatataaagctgtccttcttcacccacaatgctgctggcaggtttgctctcatcaattaacgctgcggttgcaccaaacggtactgcgttgccattcgcctgttttaagctcatcagcacacggtaaccgacgcgggtatcaaagcgggaacgcacaactgcaccacgagtaggcacgactttctggaacgcttcctgtagttcaacgttttgccccaacgtgtcgctacgcaattccacaatggtttcacgatatggtgtgagataaggcaccacggcgttgcccatccagtcaacttctacgccgctgctgttaaccacatgtccaccacgcgcgcccggtgcagaaacaatcgccagactttcgcctaaaggctgcgaaagcgttataccttcactgtgaacgatgacaccgccgcgcacgccatagttaacctgttggttatctttagaatagttatagcctacgtcaatgttaccagagccacccatataccccatgttgacgctgccactgtagcctacgccattactggtgtaaccctgctgaacgttatagctcaggttacgatcttccagtaacgtgccgctaacagaggcctgttgcgacgtcttgccattctggtcggtagtcatgcgataactgctccacgcgcccccagagggatggaaacactgaatgaccacaagcgatcgtcttcttcccattccggacttctcgtccaggtataggccacgctgtaattcacccgaccaatgtgaccgtgataaccggcgcttaaggagttttccttaccgtcaacgttccagtaatcctgctgcgtcatattgaaataaaccgagccgtagtctcccagttgctgggtaatattgccctgtatctggctgcgcttgtgataacggcggtaatcactgtcggcgtcactgcgaacatcagttgcttcctggaaggtgtagtagccgctggttgagtatttgtagcccaacagacgcaggtcagtgccaccctcaaaacttttcgaatagaggaagcgataagactggccttcctctttttcattgttgcgtaactgacttttcgcctgagtgacatccaccgatactgcgccaatggtaccgaagtttttccccaggcccagagctaaagcgctgtaatctgccgacaacaatgcaccaccgtaggcggtcataccccacggcaagccgtacatggcggtaaactgcccgaaatgtggtttatcgctgtcgtaattaccagcacgatattcaccggcagccagactgtatttcagatacccttcacgctggaaaatcgccaccgccgaaaacggctggataaaacgttgttcacttccgtcggcttctttaatgatcaccgtcaggtcgccgctgccggaggttgcgtagagatcgttaatctcaaatgcacccggctgaacaaaagtgcgataaatgacatagccgttctgttcgatactcacttcagcgttgcttttggcgatgccgcgcactaccggagcaaagccacgctggctgtccggcaacatttcatcgtcggatgccagtaacgccccacgcatttgtacgctatcaaaaatctcgccaggcgtggcggtatcacccagagttatctgtgatttaagtggaataattgcccggtttaacgatgtaccaacgttatcccattggtttttgccatcggtacggttccagatactgttattacgtaaacgccacggaccaacgttcaaaccgctgcgcaggttcaggtaataactgtcactggtcgaatctgaagatgaacctgtaccttcattgcgtccattgctgccactaaagctgtaatccagcaacagcgcaggtattccttcgtcccagcgagaaggatcaaccgtgccgcgagcggtcatcatcattgccgcctgtggaaaggaaagatgcagcgtctgagtattaaaatcaaagcggctggtggcctggggaatgatttcatcaaacgctacgcaggcttctggtggtgacatcttcagcgccggaaagctgtcaacgcgcacgcccatttcttccagttgcacccggctaaggcaaggcataagcgactcaccgctggctttgcgtttcgcttcgctggcggtactaaaatccagcgtccgggaagccattttttcttcgtttacaaacaccgaaacccggtatttaccggggatttgctggccgacaggtgagtcgtataccgacaagtcgatgtgttgatcgataccctgaacgttttcgagaaatttagggttaaattttccgccatacgcaggtaacgagctggcaatcgttaatgccagcagagagaaggaaaaatgcgctctgtagtgatagagaggtaaatgcatccaatgcatagtaaaagcgccttgtaaaaggatcagttaatcggcttcgtcagcatttcgccagcaacaccgaaatcattaataatgctgtatttcacttcgtgcgcgttgcctgtaccggctggaaggttaatgtttaactttcctttcgcgagaaccattcccgcccgttcaatcttttgtccattaatggaaaactgattaaaggtcaggttataagcggagtcgttattaaccacaatttggttattttgacgctggaaacgtaactgtttcatggcctcgaggttgcttcccggcaaaccttttggacgatagaacaacttcaaacgggtgcgaacggctatctgtaagacgtttttattttcattttcagcacttttcgcaggaatggcctttacattaatccagtaaacggattcacgatctttaggtaaggtatcttcaatattgacgatacgtaagacgttatttttatcaggatcaagtttgaataatggcggtgtaataataaacggtgtttttttattgccattcacatcatcaatccatgactggatcaaaaactcttcatttttattatggttttcaacggtcagcgacgcttctttcttgccgccatcataaataacacgcgtcgtgcttaaggctacgccaccagcaaaacactgttgtgcggtcattaaaagtgccagcacagcaaagctaatacgtttcatgattcggtccctgagtcattggtgtgaataatggcaacacagtctctgttgccattgagagatgatcgttccgtcaggatcgattagttgtaagtcaggttgaagtcgacttcagcgttaccgtaacccgtggttactgcatctttggtagagacatagttagcggtgaaatacagaacggtctgaccttctttcaggacagtagcagatttaccagtattcaggtcaaccagggtattggtgttatcataaataccgatacctacgccagttgcggcacctggttcagtgcttacagaaaccagtttgctgttgtctgcatcgccaacgccgttaaagctgatttccacatttttgaaagtggagatatcgcagttttccagtttgattttgaacggcgttgctgtggatttatcacccatagcagtaaatacagacttgttcacctgacccagaacaacttcttgtttttgagtgtctggagacacaacacaagcggcgtcaacaatctcaccggtgaatttaacagtaccgtcgcccgcatcagctgcgaatacggaagtagaggtcagcgcaagcgcagataaggcaaacagaacctttttcatttataactccatttatatagataaatatgcttgatgttgttcatacaacggggcgcagattatacaaatggtgctaaaaaagaaaattatttttaatgaatattaatttttgcaacaagttgaaatatacttcaacttcaattaattgcatacaaaaaaggtttccaacgactattttttaggaatatatttata

SEQ ID NO: 602 - DNA, 209287 bp, Escherichia coli
  modified_base (209284)..(209287): a, c, t, g, unknown or other
atataaacaaataaaatatatttgtggtatgaatattattgttcttttaatatgcgtccataaaaagggagactttgaagtctccctactcgtatttatttcagtagcaacatatttctaaatatgcgcctcacgcaacattttctgctctggctgacgaatcgtcgtagaaagcgccaatgacagaatcagcagggcgaaaatcacgtagaaggtcacatagaaaccgccaaacagtgaggcgataatcgaaccaaaaatgctaccgataccgaaaccgaggtaaatcacaccgtagtttttcgccaggttattgaggccgaagaactcactgaccagtgacggaaagacggtaatagtgccgccaaagttaaatgccacgcaggcaatcgctgcaaagaacgtcactgcattcagtggtgcaaacagcagggccgccatacccactagcgaaatcacctgaccaatggtgataacacggatacgggcgattttgtcagacagtatccccagaaccagacgacctgaaaggttggcgatggaaataacagtgactgcattagctgcggaaaccacatcaaggtgtgccagactttgggcgatatctttcgctaccccaatcacgtacaggccgctcatgcaggcagtcaggaacattaccgctaacatccagtactgcggtttacgcatcgactctgccagcgtgtaatctttctccaccacaccattgctggttttcacttcctgttttggtgcgtctttcattaacgttgcgccgaaaacaatcatcaccagcgcaatcgctccccaaatcacaaaggttttttccagacccaccgtttccagcagccgcgtgtcgataaatttgaaacccaggctacccagaccataagaaccgatagcgaacgcggatatcagacctttacgctccgggaaccacttcacgcagttagagagcgtcagcaggtaacccgcgccatccgccagaccgaccagcacaccggcgcttaaccacagcatcatcaggttgtcagaatgcgcggtcaggaagaagcctaatcccagcaaaatgccggaagccatggtgacgcgtttaacgccaaaacgttcctgtaatttgcccgcaacagaagatgaaattgccagccccagacttaacaagccgaaagagaaagcgacctggcttaccggcgcatccagcttggcggaaagcgcgccattaaacaggctccaggtataaaccgaccccagcgcaaactgggtaatgattgtaccgatgagtgtcagccagcgggtacgctgataatttgaaggtgtcatggcagtattcctgcagtaataaaaaggaaaaatctctgccgacaaccataacgaagtgcactttatgcctggggaaaaacggcatgaaatgccatcagaacggaatgaaatgccttagttcaggaatgaatgacgcgacaattattcaccaaatttattatttggtaagttagcacccactatcgccacaactgttgttattcaatggtttcaattgtgactgttacgttaaaatctggcgctaacccccatcgtatacagatagtcgctattattagtggtattttctgcctgagttagcgcggcataggcggcaatattttgattgagcaacatatcagcgcctacggtgacatccagccagttgccgttctggtttgtcgccgtcatccggctcaggcctgattgcgccttccagatattctcgccaaattgctggttatagctgatttgcgcccagggtcggagatcgccaagccgggagtcaacacgccagcctaaggtactcacgctggcatgccataacggatcggtcagcgtggtagtactgtcgccaaactcgttatacatcgaggtggttgtgccatcgtaatgtaatgccgcgaccgggccggttgtaacctgttcatataaaggaaaattccagcccatactcatactgctggtcacatccacaggagtttcttccgccagattgacttccagtcccagcgccctttggctactttgaatacgttgcgacaaaatatcgttgtaatcaggttgatgatcactatcccaggtgtaacgctctgtggaaagtccgggttgcgtatcaacgatatattcttgttgccaggcgtaagctgtgttgagaaaaaaggcactgattaccacgctcgccagcaggcttagctgccagcgaccaccgcttttttttatgatcattaacacgactccagggaagagccgaattcggcaatattattgtcattgtatgaaggatatcgggcatagtagccctgtattaaatattgactttttcaccgatgcgtcaagaaaagcggctgaaatttttacgatcgggtacatagcgagggaaagtatggaacgttgcggctgggttagtcaggacccgctttatattgcctaccatgataatgagtggggcgtgcctgaaactgacagtaaaaaactgttcgaaatgatctgccttgaagggcagcaggctgggttatcgtggatcaccgtcctcaaaaaacgcgaaaactatcgcgcctgctttcatcagttcgatccggtgaaggttgccgcaatgcaggaagaggatgtcgaaagactggtacaggacgccgggattatccgccatcgagggaaaattcaggcaattattggtaatgcgcgggcgtacctgcaaatggaacagaacggcgaaccgtttgccgactttgtctggtcgtttgtaaatcatcagccacaggtgacacaagccacaacgttgagcgaaattcccacatctacgtccgcctccgacgccctatctaaggcactgaaaaaacgtggttttaagtttgtcggcaccacaatctgttactcctttatgcaggcatgtgggctggtgaatgatcatgtggttggctgctgttgctatccgggaaataaaccatgattcgggaagcgcaacgttcagaactccccgcgatcctcgaactgtggctggaaagtacaacctgggggcatccctttataaaagcgaattactggcgtgactgcattccgctggtgcgggatgcctatcttgccaacgcgcaaaactgggtctgggaagaggacggtaagcttctcggttttgtcagcattatggaaggccgatttctggcagcaatgtttgtcgcaccgaaggccgtcagacgcggtattggtaaggcgctgatgcagtatgtgcagcagcgctatccccatctgatgctggaggtttatcaaaaaaatcaaccggcgatagatttttaccgtgcgcagggttttcacattgtcgattgcgcatggcaggatgaaacccaactacccacctggattatgagctggccggtggttcaaacgctgtaagtgtcagttccggaccgttgtatttttccagccatgccagcgccgtattacccgcacagccattccccagccgcgagctggggagatctttggtcagcacgttgactgcgccgtttttacaaataccgtcagcggttaaatccaaatccggccatgccccttcgtgaatacaaatcacgccaggtttaattccctcgctaatgaccgctccggcaagaatttgcccgcgtgcgttccacagccgaacagtatcgccatcttgaatgccgcgcgcctgagcatcgtcaggatgaatggtgacaggctcacggtttgctaccgcgtacaattcgcgcagagaactgtaattcagctggctgtgcaggcggtgcgccggatgggcagaaagtacctgcaactgttctggttcggcattgccctgccattcgtccggctccagccacattggatgcccagggcaatccgggtaaccgtaatcggcaatacgctgtgagaagatttcaatcttgccgctggcggtttttaacggatgcgccagcggatcgcggcaaaaatcagcgaagcgaataaaccgctcgctgtccgggttttccggcatctcaattaactggttggcttgccagaactcagcaaatggcggcaattcaacctgctggcttgccccgcgctgccgggcaacgttataaaacgtttccagccattgcagctcactttttccttccgtaaaacgtgcataaccgcccttctcccagcgttcacttaactcggcaaaaacatcaaaatcattacgcgcttcatagcgtggcggcaccacttgcttcatcggcaccagatgctgattactgtaatcaccggtcatggtgagatcattacgctcaaaagaggtagtcgcaggcagaacgatatccgcgtgtttcgccgccgccgtccagaagcattcagagatcaccaccagctccggtttttgccaggcacggatcagacgattggtatcctgatgatgagtaaagttggcaccgcccgcccaccagataaaacgaatatccgggaaatgtcggttcataccgttgtgttgatatgcgccaccagggttttccagtgcttcaacaatgcgggcaacagggattttatccaccgcatcgcagccacccggcaagctgccctgcatggaagagagcaccgcagaacgccgcgtggggttaccaccattggcaaaatgataagaaagaccaaaaccgccgccgggtgtgccgatttgccccaacattgccgccagcgtgacgatcatccagtgtttttgctcaccaaactgttggcgctgcattccccagccagccatcagcatggtcgtgttttggtggaaaagagccgccagctcgcggattttcgctgcgttaaccccacaaatctctgccgcccattcggcgtttttcgctattccgtcactctcgcccagcaaataagaggcgaagacggcataacctgtggtgcaacgcgtcagaaacgcttcgtcgtgccaaccattttccaccagcgtatgggcgatccccagcatcagcgcaacatcggtgcccatgtgcggtgccacccactccattttatcgccaaagaaatcgacggtttccgatcgcattggatcaatacagatcagctttttcccgctgtcacgcagtgcggaaaagtaagaaagcccctgctcatcagatgcattccacgcaattttcagcgtattgagtgggttagcactccacaacaccacgacatcgctatgttccagcaccagcggccaactggtttgctgttgataaacttcgctaccacccacgacatacggcatgatcgcctgtgccgcgccggtcgaataatcccccagatgcccggtataaccgcctgccagcgccatatagcgttgtaataatgtcgaggccttatgcagcacgccgtttgaacgccagccgtaggaaccagcaaaaatcgatgccggaccataagcctcacgaatgcgtttatgttgttggtgaataagatccagcgcctcatcccaactcacgcgaacaaattcatcctgcccacgaatgccttgcggattttccggtgacgcaagaaagcctttgcgcaccattggaaatcgtacccgtgtattgctgtgaacctggtcgcgaaccgcgctctgcaaggagttttccattcctgtggctaacgcgccatgcgagctaaacacggtttcgccgtcggtttcaaccagcatgggcccccaatgggcggcagtcagaacggaatatcgtgaggatgagttggccaaaccgaaaactcctgaaaggttagatgtattgagcagttaaatattacttacaaatttccgagtattcccaggaataatcttcatgttcacgcggcataatctcccgccacggaacccgtggcaaagaataaaaaggttattaaggattaacaatgaagaaacgtgtttatcttattgccgccgtagtgagtggcgctctggcggtatctggctgcacaactaacccttacaccggcgaacgcgaagcaggtaaatctgctatcggcgcaggtctgggctctctcgtgggcgcgggtattggtgcgctctcttcttcgaagaaagatcgcggtaaaggcgcgctgattggcgcagcagcaggcgcagctctgggcggcggcgtgggttattacatggatgtgcaggaagcgaagctgcgtgacaaaatgcgcggcactggtgttagcgtaacccgcagcggggataacattatcctcaatatgccgaacaatgtgaccttcgacagcagcagcgcgaccctgaaacctgcgggcgctaacaccctgaccggcgtggcaatggtgctgaaagagtatccgaaaacggcggttaacgtgattggttataccgacagcacgggtggtcacgacctgaacatgcgtctctcccagcaacgtgcggattccgttgccagcgcgttgatcacccagggcgtggacgccagccgcatccgtactcagggccttggcccggctaacccaatcgccagcaacagcaccgcagaaggtaaggcgcaaaaccgccgtgtagaaattaccttaagcccgctgtaatccctttcatgccaggtgatgcagaaatcacctggcattcttcagttttccttcatcatatttcaggctaaggtgatcgccttatcagtgaatggagagaagcatgaagccgtccgttatcctctacaaagccttacctgatgatttactgcaacgcctgcaagagcatttcaccgttcaccaggtggcaaacctcagcccacaaaccgtcgaacaaaatgcagcaatttttgccgaagctgaaggtttactgggttcaaacgagaatgttgatgccgcattgctggaaaaaatgccgaaactgcgtgccacatcaacgatctccgtcggctatgacaattttgatgtcgatgcgcttaccgcccgaaaaattctgctgatgcacacgccaaccgtattaacagaaaccgtcgccgatacgctgatggcgctggtgttgtctaccgctcgtcgggttgtggaggtagcagaacgggtaaaagcaggcgaatggaccgcgagcataggcccggactggtacggcactgacgttcaccataaaacactgggcattgtcgggatgggacggatcggtatggcgctggcacaacgtgcgcactttggcttcaacatgcccatcctctataacgcgcgccgccaccataaagaagcagaagaacgcttcaacgcccgctactgcgatttggatactctgttacaagagtcagatttcgtttgcctgatcctgccgttaactgatgagacgcatcatctgtttggcgcagaacaattcgccaaaatgaaatcctccgccattttcattaatgccggacgtggcccggtggttgatgaaaatgcactgattgctgcattgcagaaaggcgaaattcacgccgccgggctggatgtcttcgaacaagagccactgtccgtagattcgccgttgctctcaatggccaacgtcgtcgcagtaccgcatattggatctgccacccatgagacgcgttatggcatggccgcctgtgccgtggataatttgattgatgcgttacaaggaaaggttgagaagaactgtgtgaatccgcacgtcgcggactaagccgcgactgcgtgaagtaaagcccgataatcgctcgggcttttactctttattgggttgcagtaactgctgtagtccaggcctgattaaacgcctgatgttgtgccggtaatggcgcaatcagtttgttatattcacttgcctgctgtgaagtcgggaactggatgccatttgcgacaaagctcacctgagtaccttgctgagcaatgtagtctccaaccatcaccagttgttgcgtgaaagtttgtgcagccggaatcaacggttgcaatgcatcagctggcgtcgttaccactttggtgaatgcctgatcaaagaccggtttcaaatcatcggtctgttttagcgcagagtgcgcagcatcggcctgcaacttcgcattttgcagttgttgcgccagcacacccagcgaaccgttcatttcacgcagcggaccgctttgcgtaacgtaatcctgcggtacgcgaattgcgttaacgctgtctacgaccgggcgcagaccggaatccatcgcctgattcacctgctgagaataaccatacagaatcgcgtaatcagagacaaaaggaccaaactgttttttctgatcggcagtcagggttggtagacgttcaccgctacgcatcactgtattctgcaggaagtcgataaacgctttacgctgatcgccttctttatcaaaacacccactcaggctaactaccattaataacgccgcaagaggcgcaaaccagcgagagcaggactttcctgtcgccattttcttactcctttcacccaaaaaaagcgcacaacgacacacgcgtgtctgacgtgacaaggatagtccaggacaggcttgcaggataccctttctacgtaatcttcctggtaaaatcatggagaaaatgaaacaaggttaatttgttgtttcattgttaaaaaatgatagtgccgttgccttttttgtagccagagatttacgccttcgcagaaggttagattttcgaaatctttacaaaacaggagtggtaagagatatatcggcatttatcagatcgttaggtggctataagtcacgctaaatgacaggctgaatcgaatcatagccagagcatgccctgacttcaccccgctgtgtctgcttttcccgactattcttaatgagcttcgatgcaattcacgatcccgcagtgtgatttgaggagttttcaatggaatataaagatccaatgcatgagctgttgagcagcctggaacagattgtttttaaagatgaaacgcagaaaattaccctgacgcacagaacaacgtcctgtaccgaaattgagcagttacgaaaagggacagggttaaaaatcgatgatttcgcccgggttttgggcgtatcagtcgccatggtaaaggaatgggaatccagacgcgtgaagccttcaagtgccgaactaaaattgatgcgtttgattcaagccaacccggcattaagtaagcagttgatggaatagacttttatccactttattgctgtttacggtcctgatgacaggaccgttttccaaccgattaatcataaatatgaaaaataattgttgcatcacccgccaatgcgtggcttaatgcacatcaacggtttgacgtacagaccattaaagcagtgtagtaaggcaagtcccttcaagagttatcgttgatacccctcgtagtgcacattcctttaacgcttcaaaatctgtaaagcacgccatatcgccgaaaggcacacttaattattaaaggtaatacactatgtccggtaaaatgactggtatcgtaaaatggttcaacgctgacaaaggcttcggcttcatcactcctgacgatggctctaaagacgtgttcgtacacttctctgctatccagaacgatggttacaaatctctggacgaaggtcagaaagtgtccttcaccatcgaaagcggcgctaaaggcccggcagctggtaacgtaaccagcctgtaatctctgcttaaaagcacagaatctaagatccctgccatttggcggggatttttttatttgtttttcaggaaataaataatcgatcgcgtaataaaatctagtattatttttgtgaaaaataaatttgggtgcaatgagaatgcgcaacgccgtaagaaaggcgggaataacttcccgccgaagactcttactcttttaaattgcaggctaaaaatgccgccagctcataactcccctgtttaatatgcaattcacacagtgaatctcttatcatccaggtgaaaaataaaagcgtgaaacaaatcactattaaagaaagtaatctatatttctgcggcattcccagccccctgtgttgatttccaacgagtaagaggctaaccttatggtgttcaggcatagggtagcctcactttgatttatagtcaggtggggcttttctctgtctgcctttcggtgaatacctgagacaaacagtctcaagcacccgtggctattctagcttaataagtttgtttcttctccttgatataatcctaaaaaaacctcataaaattaatatatgagataatctttattcagcagaagattattaaaggttgctgtattatttagcgataataaaaaaacctgccagatggcaggctttttaataacggcgttattactgcaacagcgaaatatccgcaacgcgcaggaacagttcgcgcagtttctccagcatggtcagacggttgagacgcaattctttgtcatcaaccatgaccatcactttatcgaagaaagcatcaaccggctcacgcagctctgccagttcgaccagcgcatcctggtaacgaccttccgcaaagtacggctccagcttgtcacgtagcaccacaacctgcatcgccagtttaatttcttccggctctttcagggtagaggcattcacgcggtcgctcagcacttcgtcagatttcgccagaatgttagatacacgtttgttcgccgccgccagtgcagcagctgcatccagggtacggaaatgcgataccgctttcatacgggcatcgaaatcagccggacgagtcggacgacgcgccagtaccgcctggatggtgtcaacggtataaccttcgtcctgataccaggcgcggaagcgaccgagcataaagtcgataacatcatcaactacgttggcattagtcagcttatcgccatacagacgcaccgcttcttcggtcagcgtttgcagatcaaggttgaggttcttctcaacgataattcgcagcacgccaagtgcggcacgacgcagcgcaaacgggtctttgtcgcctttcggatgctggccgataccgaagatacccgccagagtatccatcttgtcagcaatcgccagcgcacaggctaccgggttagacggcaggtcatcaccggcaaagcgcggctgatactgctcattcagcgccaccgcgacatcttccgcttcgccatcgtgacgcgcatagtgcatccccataacgccctgggtgtcggtgaactcgaagaccatgttggtcatcaggtcacacttagacagcaggcccgcacgggttgcgtggttaacgtcagcgccaatctgttcagcaatccagccagccagcgcctggatgcggtcagttttgtcacgcagcgtacccagctgttgctggaacagcacggtttgcaggcgcggcaggttatcttccagacgttttttacggtcggtgttgaagaagaactcggcatccgccagacgcggacgaacgactttctcgttaccggagataatctgctgcggatctttcgattcgatgttggcaacgaagataaagttcggcagcagtttgccgtcgttcgcatacaccgggaagtatttctggtcacctttcatggtgtaaaccagcgcttcagccggcaccgcgaggaatttctcttcgaattttgcggtcagaacgaccggccactccaccagcgaagccacttcttccagcaggctttcgcttaagtcagcgttaccgccaatcttacgcgctgcttcttcggcatcggctttaatcttcgctttacgttcttcgtaatcggcgatgactttcccgcgctcacgcagaatttccggatactgatcggcgttgtcgatggtgaattccggttcgcccataaagcggtggccgcgaatcacgcgatcggactgaatgcccagaatggttgccggaatgactttgtcgcccagcagcagggtcacggtgtgcaccggacgcacgaagtgcacgtcgcttgcgccccaacgcatcagtttcgggatcggcagtttcgccagagaagtcgcaaccatattcggcagcagtgcttcggtgctttcgcccttcacatgggcgcgatacagcagccattcgcctttatcggtagtcagacgctcagcctggtcaacggtaataccgcaaccacgcgcccaaccttctgccgctttgctcggtttgccttcagcgtcgaacgcctgggcaatcgccgggccgcgtttttcgatttcacgatccggttgcgcttccgccaggttagctactttcagcgccagacgacgcggagcagcaaaccattgaacggtgccgtgtgcgaggccagcgttatccagctccgcagtaaaattcgcagcaaaggactcagccaggctgcacagtgcttttggtggcagctcttcagtgccgatttccaccagaaaagttttctcagacatagccgcctcttacttatctttgttgcacatcgggaagccgagggcttcacgggaagcgtagtatgcttctgccactgctttggtcagggtgcgaatgcgcagaatgtagcgctgacgctcggtgacggagatggctttacgcgcatccagcaggttgaagctgtgggcggctttcagaatacgctcgtaggctggcagcggcagcggattttccagcgccagcagctgctgcgcttctttctcgtactgctcaaagcaggtgaacaggaagtccacatccgcgtattcgaagttgtaagtggactgctccacttcgttctgatggaacacgtcgccgtaggtggttttacccagcgggccgtcgctccagaccaggtcgtaaacgctgtctacgccctgaatgtacatggccagacgttccagaccgtaggtgatctcgccggtaaccggtttacactccagaccaccaacctgctggaagtaagtgaactgcgtcacttccatgccgtttagccacacttcccagcccagtccccaggcacccagagtcgggttttcccagttatcttccacgaaacggatgtcgtgaatagtcgggtccatgcccagctctttcagagaaccgaggtacagctcctgaatattgtccggcgatggcttaatgaccacctggaactgatagtagtgctgtaaacggttggggttttcgccgtagcgaccatcggtcgggcgacgagaaggctgaacataagcagccgccatcggttctggccccagcgcgcgcagacaggtcattgggtgagaggttcccgcgccgacttccatgtccaatggttgaacaatggtgcagccctggcgagcccagtaatcctgtaaggtcaggatcaagccctggaaggtcctggtatcaaacttttgcatattatttcgtgctggatacgtgtggatttaaaggaagggatcagtatacccgctggatggaagatatacagtacgaaacgggaaaaagcagggcttaacgcatggaaagatgcaaaaaatggccatctgcgtcaaaagaacagacaaactgctctttacggaaggtataaccgcgcatttcatagcttccctggaactgttcgaaggcggtgacgtcgattttttgctcgccggtgttataacgttttgccgcctgatccttgcataacgcttccatattcaacgaacgcagaggatcaacctttacccgttgtgctttctgcacgggtgacggtgtagaacaacccactagcaccataagcgccattgccggaaagaaagcgttcatcatcattaaattaccgtctggtttgcaggtgagtcttattatttatatcggtatagtggctgatatcttacgaatttccttaagcctctataagctgtagtgataaaactcagattattccagtgcgccaactgaatgatttatcggtcagactttttttaaccagatacagagacacagatgcagcccaaaatttactggattgataacctgcgagggatagcgtgtttaatggtggtgatgattcacaccactacctggtatgtgaccaatgctcatagtgttagccccgtcacctgggatatcgccaatgttctgaattctgcctctcgtgtcagcgtgccgctatttttcatgatttccggctatctcttttttggcgaacgcagcgcccagccgcgccatttcttgcgtatcggcttatgtctgattttttatagcgcaatcgcactgctctacattgcgctgtttacctccatcaatatggagttagcgctgaaaaacctgctgcaaaagccagtgttttaccacttgtggtttttcttcgcgattgcggtgatttatctggtttcaccgctgattcaggtgaagaacgtcggcggaaaaatgttgctggtgctaatggtggtgattggcattatcgctaacccaaacacagtgccgcagaaaattgacggttttgaatggctgccaattaacttatatatcaatggcgatactttttactacattctgtatggcatgttgggccgcgctatagggatgatggacacacagcataaagcactgtcgtgggtgagcgccgcgctgtttgcgacgggggtttttattatctctcgcgggacattatatgaattgcagtggcgcggaaattttgccgatacctggtatctttactgtgggccgatggtttttatctgcgcaatcgcgctattgactctggttaaaacacgctggatacgcgtaccattcgcggacttggcttaatctcccgccattcattgggtatatacggattccacgccttgattatccatgcgctgcgcacccggggaattgagcttaaaaattggccaacactggatattatttggatcttttgcgcgacgttggcagcgagtttgttactttctatgctggtacaacgaatcgacagaaacagattagtgagttaagtaaaagcccgttcacattggactgaccgggcttacgtgaattattcgctgtattcttcctgggtaacctgtgtttcttttggcgggtttattccggtatcacgaatattcttctgcaccgctactgcaccaaacaagcttaagaagaaagccagtccataaaaacctttttcactgagtaataatgtcgcattccacagacctaccatcagtaatgcaacagagataataaagacagtcaggcaggtcatataataaatggaagtggtcggtatgccttcatacttgtcccgaacggtcttttgataagacgcagcagaaaacagtcctaacaccagtacggcaaaataataccctttttcatttaactgcatctctgcattccatagccctaacagataggtaacgataccaccaacgagagctatccatgacacaatactaaaggccggtgaataggttgatattttgttgtccatcacagtattcctttcattcctgaatgtgtaagagctttatgttgctcataccgagcgaaacaaacgcatttgaccaaacaagcagacaaaaaaggcgatggggtagatcaccatttcataagcattgataggtgcatttaaaacaccgataaacaagagaccgatagtgattaacgcaactaactggcagatatgggtaaaaaaattatccagttgcccgagtttttctgcgcgaagatatgcatagttaccaaaagttgctgtcattaacacgccaagaaaatagccttttccacttagcaatgggcatgagatccatagcccaaccagataaaccagcgccccgacaacaaataatagttttgccacagtttttgaggttttcataacgatctccatatctaccagcgatacattacgagtaaccaacgaaagacaaaactgaaaaatgccattaacaaatgattttcagaataaattcatactaaatattaattaattagtgagatatatagatgtgaattatcccccacccggtcaggcaggggataacgtttacgccattaatggcagaagttgctgatagaggcgacggaacgtttcacgtcgtggctgataagcggcataacgctgcgcatctggtagatgcgactgttctaacggtagctgcggcaacaactcaatgagcgatttctctggattcgccgcaatctgcgccagccttgctgcgcccagtgctggccccacatccccccccgtacggtaatcgagctgctgaccgctgatatccgccagcatctgacgccagtactcactacgcgccccgccaccaatcaacgtaacactttgcggtttaatgccgcaggcatgcacgacatccatgccatctgccagcgcataacccacgccttccagcactgctcgcgccagttcattggggccatgttgatgagtcaaaccaaagaaaacccccttcgcctggggattattgtgtggtgtacgctcgccggaaagataaggcagaaaccaaactggctcggcactttcatcagcctgttgagctgcagcgattaaagctgggacattgcacaggccggttaatttcgcgacccaatccagacacgatgctgcactcagcattacagacattaaatgccaacgctgcggtagcgcatggcaaaagctgtgtacagcgctttctggcttgcttaagaacccttcgctgacagcaaaatagacccccgacgtccccagcgataacattgcctgattagcatcaaccattcccacaccaactgcaccagctgcattgtcgccaccgcctgcgacaactggcaccgtcgccataccccacgctttcgcaacttcaggtaacaaagcaccagtaatttcgctgccttcatataatgcgggcatctggtcacgagataagtcgcaagcctgcagcatgacgtcactccagtcacgctttgcgacatccagccacatggtgccagctgcgtcagacatatcgctggcaaactcccccgtcatacgcagacgcaagtaatctttcggtaataatactttgtcgatttgacggaatatctccggctcatgccgctgaacccatagcaatttaggcgcagtaaatccgggcatcatcaggttgccggtaatcactcgtgattgcggaactctcgcttccagcaaagtgcactcttgcgcacagcgcccgtcgttccacaaaatggcagggcgcaatacccgttgttgagcatccagtaaggttgctccatgcatctggccggcaatacccaatgctttaacgtcctgcagagaatgctgatcgcccagagctttcattgcgcgatcagttgcctgccaccactgttccgggtcttgttccgaccagagtggatgcgggcgcgaaacggtcagcttttccgtttgcgaagcaaccacctcaccctgctcgttgagcaaaataacttttacgcccgaggtgccaagatctatcccgatatacatatcgatcgttccttaaaaaaatgcccggtatcgctaccgataaccgggccaacggactgcacagttagccgttatttgtcgaacagataatgatttaccagattttccagttgctcctggcgaccactctgatgcaccggagacaaattatgttcctgagcatatttggctaaatctgccagtgacatttggcctttcaggatttgctggcccaattcgctattccagccggaataacgctgcgcgatgcgtttatccagctcgccatcttcaatcatgcgcgctgcaattttcagcgccagtgccatcgtatccatcgcgccgatatgaccgtaaaacagatcatatttatcagtactttgacgacgtactttggcatcgaagttcagaccaccggtggtgaaaccgcctgctttgagaatttcatacatcaccagcgcattctcttccacactgttcgggaactggtcggtgtcccagcccagttgcgcatcgccacggttggcgtcgacagaaccgaacaggccaagcgcaatggcggtggcaatttcatgatggaaagagtgacctgccagcgtcgcgtggttagcttcaatgttcagtttaatctctttttccagaccaaactgtttcaggaagccatagaccgtcgcggcatcgtaatcatattgatgtttggtcggttcttgcggtttcggttcgataagcaacgtgccctggaaaccgattttatgtttatgctcaaccaccatctgcataaagcggcccagctgttcacgctcctgacgcaagtcggtatttaacagcgtttcgtaaccttcacgaccgccccacaggacatagttttcaccgcccaatttatgggttgcttccatcgctgtaacaacttgcgttgccgcccaactgaagacttcaggatctgggttcgtcgccgcacccgcgccatagcgagggtttgtaaagcagttagcggttccccacagcagcttcacgccgctctcttcttgcttgcctgccaggacatcaaccatttgcgcaaaattattgatgtactcttttaacgacgcgccctcaggggaaacatccacatcgtggaagcaataaaatggcacatgtaacttgtggaaaaactcaaatgcgacatctgctttacgcttcgccaacgccagtgcctcaccaggctgctgccacggacgattaaacgcccccacaccaaacatgtccgccccgttccagcagaatgtgtgccagtagcaggcggcaaaacgcaagtgctcttccatacgcttgcccaacaccagttcgtcgggattgtagtgacggaatgctaacgggtttgaggattttgagccttcataacgaacgcgatcgagctggtcaaaataggcttgcatattgaactccataatcaggtaatgccgcgggtgatggatgatgtcgtaatattgggcactccctttcagttgctcaattatgttatttcacactgctattgagataattcacaagtgtgcgctcgctcgcaaaataaaatggaatgatgaaactgggtaattcctcgaagagaaaaatgcaataagtacaattgcgcaacaaaagtaagatctcggtcataaatcaagaaataaaccaaaaatcgtaatcgaaagataaaaatctgtaattgttttcccctgtttagttgctaaaaattggttacgtttatcgcggtgattgttacttattaaagctgtcctctaactacagaaggccctacaccatgaaaataaagaacattctactcaccctttgcacctcacttctgcttaccaacgttgcggcacacgccaaagaagtcaaaataggtatggcgattgatgatctccgtcttgaacgctggcaaaaagatcgagatatttttgtgaaaaaggcagaatctctcggcgcgaaagtatttgtacagtctgcaaatggcaatgaagaaacacaaatgtcgcagattgaaaacatgataaaccggggtgtcgatgttcttgtcattattccgtataacggtcaggtattaagtaacgttgtaaaagaagccaaacaagaaggtattaaagtattagcttacgatcgtatgattaacgatgcggatatcgatttttatatttctttcgataacgaaaaagtcggtgaactgcaggcaaaagccctggtcgatattgttccgcaaggtaattacttcctgatgggcggctcgccggtagataacaacgccaagctgttccgcgccggacaaatgaaagtgttaaaaccttacgttgattccggaaaaattaaagtcgttggtgaccaatgggttgatggctggttaccggaaaacgcattgaaaattatggaaaacgcgctaaccgccaataataacaaaattgatgctgtagttgcctcaaacgatgccaccgcaggtggggcaattcaggcattaagcgcgcaaggtttatcagggaaagtagcaatttccggccaggatgcggatctcgcaggtattaaacgtattgctgccggtacgcaaactatgacggtgtataaacctattacgttgttggcaaatactgccgcagaaattgccgttgagttgggcaatggtcaggaaccaaaagcagataccacactgaataatggcctgaaagatgtgccctcccgcctcctgacaccgatcgatgtgaataaaaacaacatcaaagacacggtagttaaagacggattccacaaagagagcgagctgtaagcgttacgccccggcgcggagcgggggcgtgatttctctccatgccgcgtgaatgaattggcttaggtggagtcgttatgccttatctacttgaaatgaagaatattaccaaaaccttcggcagtgtgaaggcgattgataacgtctgcttgcggttgaatgctggcgaaatcgtctcactttgtggggaaaatgggtctggtaaatcaacactgatgaaagtgctgtgtggtatttatccccatggctcctacgaaggcgaaattatttttgcgggagaagagattcaggcgagtcacatccgcgataccgaacgcaaaggtatcgccatcattcaccaggaattggccctggtgaaagaattgaccgtgctggaaaatatcttcctgggtaacgaaataacccacaatggcattatggattatgacctgatgacgctacgctgtcagaagctgctcgcacaggtcagtttatccatttcacctgatacccgcgttggcgatttagggcttgggcaacaacaactggttgaaattgccaaggcacttaataaacaggtgcgcttgttaattctcgatgaaccgacagcctcattaactgagcaggaaacgtcggttttactggatattattcgcgatctacaacagcacggtatcgcctgtatttatatttcgcacaaactcaacgaagtcaaagcgatttccgatacgatttgcgttattcgcgacggacagcacattggtacgcgtgatgctgccggaatgagtgaagacgatattatcaccatgatggtcgggcgagagttaaccgcgctttaccctaatgaaccacataccaccggagatgaaatattacgtattgaacatctgacggcatggcatccggtcaatcgtcatattaaacgagttaatgatgtctcgttttccctgaaacgtggcgaaatactgggtattgccggactcgttggtgccggacgtaccgagaccattcagtgcctgtttggcgtgtggcccggacaatgggaaggaaaaatttatattgatggcaaacaggtagatattcgtaactgtcagcaagccatcgcccaggggattgcgatggtacccgaagacagaaagcgcgacggcatcgttccggtaatggcggttggtaaaaatattaccctcgccgcactcaataaatttaccggtggcattagccagcttgatgacgcggcagagcaaaaatgtattctggaatcaattcagcaactcaaagttaaaacgtcgtcccccgaccttgctattggacgtttgagcggcggcaatcagcaaaaagcgatcctcgctcgctgtctgttacttaacccgcgcatcctcattcttgatgaacctaccaggggtatcgatattggcgcgaaatacgagatctacaaattaattaaccaactcgtccagcagggtattgccgttattgtcatctcttccgaattacctgaagtgctcggccttagcgatcgggtactggtgatgcatgaagggaaactaaaagccaacctgataaatcataacctgactcaggagcaggtgatggaagccgcattgaggagcgaacatcatgtcgaaaagcaatccgtctgaagtgaaattggccgtaccgacatccggtggcttttccgggctgaaatcactgaatttgcaggtcttcgtgatgattgcagctatcatcgcaatcatgctgttctttacctggaccaccgatggtgcctacttaagcgcccgtaacgtctccaacctgttacgccagaccgcgattaccggcatcctcgcggtaggaatggtgttcgtcataatttctgctgaaatcgacctttccgtcggctcaatgatggggctattaggtggcgtcgcggcgatttgtgacgtctggttaggctggcctttgccacttaccatcattgtgacgttggttctgggactgcttctcggtgcctggaacggatggtgggtcgcgtaccgcaaagtcccttcatttattgtcaccctcgcgggcatgttggcatttcgcggcatactcattggcatcaccaacggcacgactgtttcccccaccagcgccgcgatgtcacaaattgggcaaagctatctacctgccagcactggcttcatcattggcgcgcttggcttaatggcttttgttggttggcaatggcgcggaagaatgcgccgtcaggctttgggtttgcagtctccggcctctaccgcagtagtcggtcgccaggctttaaccgctatcatcgtattaggcgcaatctggctgttgaatgattaccgtggcgttcccactcctgttctgctgctgacgttgctgttactcggcggaatgtttatggcaacgcggacggcatttggacgacgcatttatgccatcggcggcaatctggaagcagcacgtctctccgggattaacgttgaacgcaccaaacttgccgtgttcgcgattaacggattaatggtagccatcgccggattaatcctcagttctcgacttggcgctggttcaccttctgcggagaatatcgccgagctggacgcaattgcagcatgcgtgattggcggcaccagcctggctggcggtgtcgggagcgtggctggagcggtaatgggggcatttatcatggcttcactggataacggcatgagtatgatggatgtaccgaccttctggcagtatatcgttaaaggtgcgattctgttgctggcagtatggatggactccgcaaccaaacgccgttcttgattttgataaaaattttctcgaagccggtaacgtattaccggttttgagtttttgcatgattcagcaggaaaagaaccatgtttactaaacgtcaccgcatcacattactgttcaatgccaataaagcctatgaccggcaggtagtagaaggcgtaggggaatatttacaggcgtcacaatcggaatgggatattttcattgaagaagatttccgcgcccgcattgataaaatcaaggactggttaggagatggcgtcattgccgacttcgacgacaaacaaatcgagcaagcgctggctgatgtcgacgtccccattgttggggttggcggctcgtatcaccttgcagaaagttacccactcgttcattacattgccaccgataactatgcgctggttgaaagcgcatttttgcatttaaaagagaaaggcgttaaccgctttgctttttatggtcttccggaatcaagcggcaaacgttgggccactgaacgcgaatatgcatttcgtcagcttgtcgccgaagaaaagtatcgcggagtggtttatcaggggttagaaaccgcgccagagaactggcaacacgcgcaaaatcggctggcagactggctacaaacgctgccaccgcaaaccgggattattgccgttactgacgcccgggcgcggcatattctgcaagtatgtgaacatctacacattcccgtaccggaaaaattatgcgtgattggcatcgacaacgaagaactgacccgctatctgtcgcgtgtcgccctttcttcggtcgctcagggcgcgcggcaaatgggctatcaggcggcaaaactgttgcatcgattattagataaagaagaaatgccgctacagcgaattttggtcccaccagttcgcgtcattgaacggcgctcaacagattatcgctcgctgaccgatcccgccgttattcaggccatgcattacattcgtaatcacgcctgtaaagggattaaagtggatcaggtactggatgcggtcgggatctcgcgctccaatcttgagaagcgttttaaagaagaggtgggtgaaaccatccatgccatgattcatgccgagaagctggagaaagcgcgcagtctgctgatttcaaccaccttgtcgatcaatgagatatcgcaaatgtgcggttatccatcgctgcaatatttctactctgtttttaaaaaagcatatgacacgacgccaaaagagtatcgcgatgtaaatagcgaggtcatgttgtagcgatgatgagaattgtcggcgtcacatcaggtaacgctgcgtggttgtcggatgcggcgtgaacgccttatccgacctacccgccaggcatgataaaacgcaccaacaacgcttcaggctcgtagctcaactgcctgagacaaagtaaaaagccttatccgactgacaagtcggataaggctcaaggaaatgcaattacatatgcgccgcgattaaccgttggttatcctggtacattgcgaacaggtagttgttataactcttccctttggtcgagtagcccttcagcttgtgaatcatcgctgtggcagtcacttcctgatccgctttacgcagctgcgcacgcgatttacggaacgaagagtaagccgggtgcgtattcaggttagtgacataggcgctcaccgattctttgacagaactaaactgtgagtaccctttcactttacctggcgcattggtacaacgtcctttcatgcatttcatgccgaacaggttgttgttgttgcgcgccagcttcgacgttccccaaccgctttctgctgcagccatcgtcgccaccatactggtggggataatgtctacgcgttcaagcaaggtattccacgggatttttcgcgtattaccagaccacttcaccttgtagcgtttggcgatgtctttcagacgcgcacgctcagcaggtgaccattggccctgatactgttttgaaatcagccagttacgttctgcagcaatggctgcattttggctggtaatgtaaggcattacggtccggagaaacgcctttttccttggtgttccggaagggtattttcgcaaatcaggaagtgaactactctttgcactattgcgagaatactcttgtttactgcttacctgtttattactagctttagttaagtgggacttttgactcgctgttgttgtgtgcgtcttcgctaacacctcactcgaaaacaccagagtgagtaacataagaatcatcgccccatatcgtcgtatgggagtcaaaatcatcaggtctcctggtcggatttaatcattccaacaccttatatttttcacaaatttgagagttgaatctcaaatcatatcaaaaatagctgtcaagagcaccccaaggaatagtccaaatctgaaactatgtcacgtgttaacgattaagattggcgctaaatcgcagaaaatgtggggtttatcgcaaaattcagccgttttttgcgcgagatcgctcacccttgcttctcatcctgtggacttaccgctcagggatgagttttgtctggcttatcgctggcaaactgtctgaaatcgcagcaataaggactcatccaccatgaaactcgccgcctgttttctgacactccttcctgcttcgccgttgccgccagctggacttctccggggttccctgcctttagcgaacagggaacgggaacatttgtcagccacgcgcagttgcccaaaggtacacgtccactcacgctaaattttgaccaacagtgctggcagcctgcagatgcgataaaactcaatcagatgctttccctgcaaccttgtagcaacacgccgcctcaatggcgattgttcagagacggcaaatatacgctgcaaatagacacccgctccggtacgccaacattgatgatttccatccagaacgccgccgaaccggtagcaaacctggtccgtgaatgcccgaaatgggatggattaccgctcacgctggatgtcagcgccactttcccggaaggagccgccgtacgggattattacagccagcaaattgcgatagtgaagaacggtcaaataacgttacaacccgctgctaccagcaacggtttactcctgctggaacgggcagaaactgacgcccctgcccctttcgactggcataacgccacggtttactttgtgctgacagatcgtttcgaaaacggcgatcccagtaatgaccagagttacggacgtcataaagacggtatggcggaaattggcacttttcacggcggcgatttacgcggcctgaccaacaaactggattacctccagcagttgggcgttaatgctttatggataagcgccccatttgagcaaattcacggctgggtcggcggcggtacaaaaggcgatttcccgcattatgcctaccacggttattacacacaggactggacgaatcttgatgccaatatgggcaacgaagccgatctacggacgctggttgatagcgcacatcagcgcggtattcgtattctctttgatgtcgtgatgaaccacaccggctatgccacgctggcggatatgcaggagtatcagtttggcgcgttatatctttctggtgacgaggtgaaaaaaacgctgggtgaacgctggagcgactggaaacctgccgccgggcaaacctggcatagctttaacgattacattaatttcagcgacaaaacaggctgggataaatggtggggaaaaaactggatccgtaccgatatcggcgattacgacaatcctggattcgacgatctcaccatgtcgctagcctttttgccggatatcaaaaccgaatcaactaccgcttctggtctgccggtgttctataaaaacaaaacggatacccacgctaaagccatcgacggctttacccctcgcgattacttaacccactggttaagtcagtgggtccgcgactatgggattgatggttttcgggtcgataccgccaaacatgttgagttgcccgcttggcagcaactgaaaaccgaagccagcgccgcgcttcgcgaatggaaaaaagctaaccccgacaaagcattagatgacaaacctttctggatgaccggtgaagcctggggccacggcgtgatgcaaagtgactactatcgccacagcttcgatgcgatgatcaatttcgattatcaggagcaggcggcgaaagctgtcgattgtattgcgcagatggatatgacctggcagcaaatggcggagaaattgcagggtttcaacgtgttgagctacctctcgtcgcatgatacccgtctgttccgtgaagggggcgacaaagcagcagagttattactattagcgccaggcgcggtacaaatcttttatggcgatgaatcctcgcgtccgttcggtcctacaggttctgatccgctgcaaggtacacgttcggatatgaactggcaggatgttagcggtaaatctgccgccaacgtcgcgcactggcagaaaatcagccagttccgcgcccgccatcccgcaattggcgcgggcaaacaaacgacactttcgctgaagcagggctacggctttgttcgtgagcatggcgacgataaagtgctggtcatctgggctgggcaacagtgacttttccggcttcccgttcgtcagtacctcgggaagccgccaaccaggataaaatgtcagccctaatcagcgttgcaggataaagcaccgctcactcttcaacagaccgatttgcaccccagcaaatgtagcgttattgttaccttccttgctacagagttcgacagatatcccgctatgacattctccctttttggtgacaaatttacccgccactccggcattacgctgctgatggaagatctgaacgacggtttacgcacccctggcgcgattatgctcggcggcggtaatccggcgcagatcccggaaatgcaggactacttccagacgctactgaccgacatgctggaaagtggcaaagcgactgatgcactgtgcaattacgacggtccacaggggaaaacggagctactcacactgcttgccggaatgctgcgcgagaagttgggttgggatatcgaaccacagaatattgcactaacaaacggcagccagagcgcgtttttctacttatttaatctgtttgccggacgccgtgccgatggtcgggtcaaaaaagtgctgttcccgctggcaccggaatacattggctacgctgacgccggactggaagaagatctgtttgtctctgcgcgtccgaatattgaactgctgccggaaggccagtttaaataccacgtcgattttgagcatctgcatattggcgaagaaaccgggatgatttgcgtctcccggccgacgaatccaacaggcaatgtgattactgacgaagagttgctgaagcttgacgcgctggcgaatcaacacggcattccgctggtgattgataacgcttatggcgtcccgttcccgggtatcatcttcagtgaagcgcgcccgctatggaatccgaatatcgtgctgtgcatgagtctttccaagctggggctgcctggctcccgctgcggcattatcatcgccaatgaaaaaatcatcaccgccatcaccaatatgaacggcattatcagcctggcacctggcggtattggtccggcgatgatgtgtgaaatgattaagcgtaacgatctgctgcgcctgtctgaaacagtcatcaaaccgttttactaccagcgtgttcaggaaactatcgccatcattcgccgctatttaccggaaaatcgctgcctgattcataaaccggaaggagccattttcctctggctatggtttaaggatttgcccattacgaccgagcagctctatcagcgcctgaaagcacgcggcgtgctgatggtgccggggcacaacttcttcccagggctggataaaccgtggccgcatacgcatcaatgtatgcgcatgaactacgtaccagagccggagaaaattgaggcgggggtgaagattctggcggaagagatagaaagagcctgggctgaaagtcactaaaaattgcctgatgcgctacgcttatcaggcctacatgatttttgcaatatattgaatttggaagaatttgtaggccggataaggcgtttacgccgcatctggcataaacaaagcgcactattccggcgttgagaaacgccggaaaaacgtttcaaacaggctgctgccgtagccgatgccgctgcactttctcgacatccatgcactgcaacgcctttgtcgggcaggcttcaacacaggccggtcccgtctcccgatgccagcacagatcgcacttaatcgccctcgcctttttgcgcgaagaaacgacctccatcgcaccaaacgggcaagccagcatacagcttttacagccaatgcaacgtgtttgttcaacgaaaatatgcccatgttcgcggcttatcgcgtcaacagggcagacattcgcgcacggtgcatcttcacactgatgacaggctactgccgtggtccagctgtggtctttaatgacacgaatacgggaaataaactcgtctggtgacaacgcagcgcaatcctgattctcctgatgcgacactgcgcaagccacttcacaggtacggcaaccgatacatttcgtcgcatccgcaataataaaccggttcatgatcactcctttgcactaaaacagcagagtgccagagagcgcgtccctactgctttgatccaacgaaggaaatgttaaagttttggcacttgtccaaagcgttatgtgatcgcgcccaggtcatccctgacagtaaatcccagttcattagaaatagcctgcgcggtttcacgcagtggtttcaggagatttttctctcccacctgtttcagacgtgatgtcgaaagcgaaatcgacacggcgtacggcacccgcccatgaatatcaaacaccggaacagcaatacaggagacgccgagttcgttttcttctctgtccatcgccgctccgctttcacgaatgtgcgccagttcgtcgaacatcgcgggcagctcggtaatggtattgcgggttaacggctggatctcatgctgatggttttcccagtatgacttcacgtagtccgggtgaccaaacgccatgtagatcttgcccattgcggaacagtagagcggcatatgctggccaatataggcacgggttcgcagcatcccggttgtgggttccagcttataaatcaaaatagcgtgatcgtcttcgcggctggagaagttaatggtttcaccagtggcgatgttcagtgcctcaagatgcggagcggcgatatgaatgatattcagcgaagacagcgccttctgcccgacggcaataaatttggtagtcaggcggtaactccctgcggcgggcgcggtggtcacatagccgcaggactgtaatccctgcaataagcgatggacggtactcttatttaaaccagccagctccgaaagatgcgccaacggacaaccgtttggatagttgctcaaaatctcaatcagcatcaacccgcgaaacagactctggcttccggctggacgctctttttcctgcgccatctcgttctctttttttcccatcacttctttccccattttgtcgcgtcctgatggtagcgcaaagtgtgccgtagttcacgatctcgacagataatttataaccacttgatttttatgtcttttgaaattcatcaatcagattgctttgttaaaaagtgatcgatatatttgaaatcaagtttcgcatattgaaattttaagccaaaaaagcgatcaaaaaaacaaggaagcctgggatgaaagtgacatttgagcagttaaaagcagcctttaatcgggtcttaatttcacgcggcgttgacagcgaaacggctgacgcctgtgcagagatgttcgcccgcaccaccgaatccggcgtttattctcacggcgttaatcgtttccctcgtttcattcaacaactggaaaacggcgatatcattcctgatgcccaacccaaacgtataaccagcctcggcgcaattgaacagtgggatgcccagcgttcgatcggcaacctgacggcgaaaaagatgatggatcgcgccattgaactggctgccgatcacggtattggtctggtggcacttcgtaatgccaaccactggatgcgcggcggcagctacggctggcaggcggcggaaaaaggctatattggcatttgctggaccaactccatcgccgtaatgccgccgtggggcgcaaaagagtgtcgcattggcactaacccgctgatcgtcgccattccttccacgccgatcaccatggtcgatatgtcgatgtcgatgttctcttacggcatgttagaagttaaccgcctggcgggccgtcagctcccggtcgatggtggctttgatgatgagggcaatttgaccaaagaacctggcgttatcgagaagaatcgccgcattttgccgatgggctactggaaaggttctggcatgtcgattgtgctggatatgatcgctactctcctttccgacggcgcatcggttgccgaagtcacccaggacaacagcgacgaatacggcatttcacaaatttttattgccattgaagtggacaagcttatcgacggtcccacccgcgatgccaagctgcaacgtatcatggattacgttactaccgctgaacgcgctgacgaaaaccaggccatccgcttacccggccacgaatttactaccctgctggccgaaaaccgccgtaacggtattaccgttgatgacagcgtgtgggccaaaatccaggcgttataaggagataagtcatgatttttggacatatcgcgcagcccaatccgtgccgtttgcccgccgccattgaaaaggcgctcgattttctgcgcgctaccgatttcaacgccctggagccgggcgttgtcgaaatcgacggcaaaaatatttatgcgcaaattatcgatttaaccacacgcgaagcggtggaaaaccgtccggaagtgcatcgtcggtatatcgatattcagtttctggcgtggggtgaagagaaaatcggcattgctattgatacgggaaataataaagtcagcgaatcactattagagcagcgcgatattattttttatcatgacagtgaacatgaatcatttatagaaatgataccgggcagctacgcaattttctttccgcaggatgttcaccgaccaggttgtattttgcaaacagcctctgagatacgaaaaattgtggttaaagtcgcattaacggcgctgaattaatcgaataatcgtctacgccagaacgactgggtaatgttattgctctaactatattaataatttaggttgctgcacatgcaacttgaattatgacagacatagcctcaaggaatagctatgaaaaaaatacttgaagcaatactggcgattaatctcgccgtactttcctgtattgtgtttataaacattattttaagatatggttttcagacaagcattttatctgtagatgaattgtcacgttatttatttgtctggttaacatttattggcgcgattgtggcttttatggataacgcccacgttcaggtcacctttctggtggagaaactctcccccgcatggcaacgacgagtcgctctggttacccattccttaatcttatttatttgtggcgcactggcctggggcgcaacgctaaaaacaattcaggactggagcgattattcaccgatcctcggtttacccatcggcctgatgtatgccgcttgtctgcccaccagcctcgttatcgcattctttgaactgcgtcatttatatcaactcatcacgcgtagcaattctctaacgtcgccaccgcaaggagcttaatcatggctgtgctgatttttctgggctgtctgttgggtggtattgctatcggtttgcctattgcctgggcactgttgttgtgcggggcggcgttaatgttctggctggacatgtttgatgtccagatcatggcacaaacgctggtgaacggagccgatagcttctccctgctggcgattccgttctttgtgctggcgggtgaaatcatgaatgcgggcggcttgtcaaaacgcattgttgacctgccgatgaaactggtggggcataaaccaggcgggctgggctacgtcggcgtgctggcagctatgattatggcgagcctttctggttctgccgttgcggataccgccgccgttgccgctctactggtgccgatgatgcgcagcgccaactacccggtcaaccgggcggcggggctgattgcctctggcggcattatcgcgccaattattcccccttccattccgtttattatcttcggcgtttccagcggattatccatcagtaagctgtttatggcgggcattgcccctggcatgatgatgggcgcaacgctgatgcttacctggtggtggcaggccagtcgccttaatttaccccgccagcaaaaagcaacgatgcaggaaatctggcactcttttgtctccggtatctgggcgctgtttcttccagtcatcattattggcgggtttcgctccggtctgtttacccctaccgaagccggggccgttgctgctttctatgcgctgtttgtcgccacagttatttaccgtgaaatgaccttcgccacactttggcatgtactcattggcgcggcgaaaaccacctcagtggttatgtttctggtggcctcggcacaagtttccgcctggctgattaccattgctgaactgccgatgatggtttctgatttactgcaaccgttggtcgattcaccgcgtctgctgtttatcgtcattatggtggctatcctgattgtcggcatggtcatggatttaacgccgacggtattaattcttaccccggtattaatgcctttagttaaagaggcaggaatcgatccgatttatttcggtgtcatgtttatcattaactgctcaatcggcttaattacaccgcctatcggtaatgtacttaacgttatttcaggggtggcaaaactcaaattcgatgatgcagtcagaggcgttttcccttacgtcctggttttatattcattattagtcgtatttgtttttattcccgatctcatcatcctccctttgaaatggattaattaaaaggaaaatattatgaaattacgctctgtaacctacgcattattcattgctggcctggctgcattcagcacatcttctctggcggcgcaatctttacgtttcggttatgaaacctcacaaaccgactcgcaacatattgcggcgaaaaaattcaatgatttattgcaggagagaaccaaaggcgagctgaaattaaaattgtttccggatagcaccctcggtaacgcgcaggcgatgatcagcggcgtacgtggcggcaccatcgatatggaaatgtccggctcgaataactttgccgggttatcaccagtgatgaacttgcttgatgtccctttcctgttccgcgataccgctcacgcgcataaaacgctcgacggcaaagtcggtgatgatctgaaagcctcacttgaaggtaaaggactaaaagtactggcctactgggaaaacggctggcgcgatgtcaccaactcgcgcgcaccggttaaaacccccgacgacctgaaagggctgaaaattcgcaccaacaatagcccgatgaatatcgccgcattcaaagtctttggcgctaacccgatcccgatgccgtttgccgaagtctataccgggctggaaacccgcactatcgacgctcaggaacacccgatcaacgtcgtctggtcagcaaaatttttcgaagtgcagaagtacctttctctgacgcaccacgcctattccccgcttctggtggtgatcaacaaagcgaagtttgatggcttaagcccggagttccagcaagcgctaatttcatctgcgcaggaagcgggtaactaccagcgcaaactggttgccgaagatcagcaaaaaatcatcgacggcatgaaagaagcgggcgtggaagtcatcaccgatctcgaccgcaaagcctttagcgacgcactgggtactcaggtccgcgacatgtttgtaaaagatgttccgcagggtgctgatctactgaaagccgtggatgaggtgcaataaaccatgacgcaatactggctggggttagattgtggcggtagctggctgaaagccgggctgtatgaccgcgaaggccgggaggcaggcgtgcagcgcctgccgctgtgcgcattaagcccgcagccaggttgggcagagcgcgatatggcagaactgtggcaatgctgcatggctgtcattcgcgaactgcttacccattccggcgttagcggggaacaaattgtcggtatcggtatctccgcacaaggaaaaggcttgtttttgctggataaaaacaacaagccgctcggtaacgccattttatcctcggatcgccgggcgatggaaatcgttcgtcgctggcaggaagatggcatcccggaaaaactctacccgctgacccgacaaaccttgtggaccgggcatccggtatcgctgttacgttggcttaaagagcacgaaccggaacgctacgcgcaaattggctgcgtgatgatgacgcacgactacctgcgctggtgtttaaccggcgtcaaaggctgtgaagagagtaatatttccgagtccaatctctacaacatgagtcttggggaatatgacccgtgcctcaccgactggctggggattgctgaaatcaatcacgccctgccgcctgttgtcggatctgccgaaatctgcggggagatcaccgctcagacagccgtactgaccggtctgaaagcgggtacgcccgttgtcggcggcctgtttgatgtggtttccaccgcactctgcgccgggatcgaagacgaatttacccttaatgcggtgatgggcacctgggcggtgaccagcggcataacccgcggtttacgtgacggtgaagcgcatccgtatgtctatggtcgctacgttaacgatggtgaatttatcgttcacgaagccagccccacctcttccggcaacctcgaatggtttaccgcacagtggggagaaatctcgtttgatgagatcaaccaggccgttgccagcttgccgaaggccggtggcgatctctttttcctgccgttcctgtacggcagcaacgccggactcgagatgaccagcggtttctacgggatgcaggccattcacacccgcgcacacctgttgcaggccatttatgaaggggtggtgttcagccatatgacccatctcaaccggatgcgcgaacgttttactgatgtgcacaccctgcgcgtcactggcggcccggcgcattccgatgtctggatgcaaatgctggcggacgtcagcggtctgcgtattgagctgccgcaggtggaagaaaccggctgctttggtgcagcacttgccgcccgcgtcggcaccggggtttatcgcgatttcagcgaagcccagcgtgatttacagcacccggtgcgcaccctgctgccggatatgaccgcccatcagctttaccaacaaaaataccaacgctatcagcatctcattgccgcacttcagggctttcacgcccgcatcaaggagcacatattatgagccgaccacttctgcaactggcactcgaccactcatcacttgaagccgcacagcgcgacgtgacgcagttaaaagacagcgtcgatattgtcgaagcgggcaccattctctgtttaaacgaagggcttggcgcggtgaaagccttgcgcgaacagtgccctgacaaaatcatcgttgccgactggaaggtcgccgacgctggtgaaacgctcgcgcaacaggcatttggcgcaggcgctaactggatgaccatcatctgcgccgcaccgctcgcgacggtggaaaaaggccacgcgatggcgcaacgctgcggtggtgaaattcagatcgagctgttcggtaactggacgctggacgacgcccgcgactggcatcgtattggcgtgcggcaggcgatttatcatcgcggtcgtgatgcacaggccagcgggcaacagtggggcgaagccgatctggcacgcatgaaggcgctttccgatatcggccttgagctttccattaccggcgggattacccctgctgacctgccgctgtttaaagatattcgcgtgaaagcgtttattgccgggcgagcactggcaggctcagcaaatccggcgcaggtggctggcgatttccatgcgcaaatcgacgctatctggggaggcaagcgtgcgtaatcatccgttagggatttatgaaaaggcgctggcgaaagatctctcctggccggagcggctggtgctggcaaaaagctgcggttttgattttgtcgaaatgtcggtggatgaaaccgacgaacggctttcacgtcttgactggagcaccgcacaaaggacttcgctggttgccgcgatgatcgaaacgggtgttgggatcccgtcgatgtgcctgtccgcacatcgtcgctttccttttggtagccgtgacgacgcggtacgccagcgagcacgggagatcatgagcaaagcgattcgtctggcacgcgatctcggcatacgcaccatccagctggcgggctacgacgtctattacgaagaccacgatgaaggcacccggcaacgttttgctgaagggctggcgtgggcggtcgaacaggcggcggcatcacaagtcatgctagcggtggagattatggacaccgcgtttatgaactccatcagtaaatggaaaaagtgggacgagatgctcgcctcgccgtggttcaccgtctacccggacgttggcaacctcagcgcctggggcaatgatgttcccgccgaactgaaactgggcattgaccgtatcgccgcgatccacctgaaagacacccagccagttaccgagcaaagtcccggacagttccgcgacgtgccgtttggcgaaggctgcgtcgatttcgttggcatcttcaaaacgctgcataaactgaactatcgcggttctttcctgattgagatgtggaccgaaaaagccaaagagccggtgctggagattattcaggcgcggcgttggattgaagcgcgtatgcaggaggctggatttatatgttagagcaactgaaagccgacgtgctggcggcgaatctggcgcttcccgctcaccatctggtgacgttcacctggggcaatgtcagcgcggtagacgaaacgcggcaatggatggtaatcaaaccttccggcgtcgagtatgacgtgatgaccgccgacgatatggtggtggttgagatagccagcggcaaggtggtggaaggtagcaaaaagccctcgtccgacacgccaacgcatctggcgctttaccgtcgctacgccgaaatcggtggcattgtgcatacccactcacgccacgccaccatctggtcgcaggccgggctggatctccccgcctggggcaccacgcacgctgattatttctatggtgccatcccctgcacgcgacagatgaccgcagaggagattaacggcgaatatgaatatcagaccggcgaagtgatcattgaaaccttcgaagaacgtggcaggagtccggcacaaatcccggcggtgctggtgcattctcacggcccgttcgcatggggtaaaaacgccgccgatgccgtgcataacgccgtagtactcgaagaatgcgcctatatgggcctattctcgcgccagcttgcgccgcagctccctgcgatgcaaaacgaactgctggataagcactacctgcgtaagcatggggccaatgcctattacgggcagtaatccctcacgccggggcttcatcgccccggcactacgaattgatatgttccttgctgtaacgccgcttccacgctgctggcgttaaaccggtgtgcttgcgaaaaatctgccggaaatagccaacgtcattaaaccgtattgcatggagcaggccgacaacgtcgagtcactgcataacctgttgctgcccgccgatgcgccatttacgacatttgaaggcaagggattgttcagccataagatcctgattcagacgccaggttcccggtatgaacagagcaatccagagcaacaacctttgtggcattacgacggagcaccagccgcaccgacatccaccggtgaattaaaaacgccagctcacgccggtgataaaggtaaaactctcattacgatcaatcatcgggctgttggtaatctcttccggcagctcgctgtatcctgcgctcgccatcaatacgacgtgctctcctatcgggtattttgccgtcaggctgacatagggcacccaggcatcctgcgcggaataacttgccagaccgctacgacgggactcactctctgaaatgccatagtaatagtcactgaaattctcgtcataatagagaacgcccagcgcaggtgtcagcgacaggcgacctatctgcattttgtggaataccgatagctcccccacccagccgttgctgttatccagaacgtccgcagccgcagaggctttcacggttccccaacgctcgtggtgataccaggcaacccccgccatagccgtactatcacgcttatcaagctgttgcatggcataatcgtcattatcggcagggtcaaattccagcggcatccaggatgcggtcaggctaagttcatttttttcactttgcgacagaataaaacctaatgtggtctgacgaacataaaaagaatcaccttcataactaatcagcggaattgcctttgtattttcattataaccgcgataaggcgattcattataagctgcaccagcaccaatggataattcagaagcagttgcgcttgccataaaaggcaacgcaaataacgccacaatattgcgattaattaacatgtccggtattccattttaaaataagataaaaaagagtcggcataataatgcttacaatttctccggtgcaagattcatatttatatagtaatatataaaattatatataattgggctgttgcgatgacaaaattacaacttaagtaccgggagttaaaaattatctcggtaatcgctgccagtgaaaatatcagccatgccgcgactgtacttggcatcgcacaggccaacgtcagcaaatatcttgctgattttgaatcaaaagtgggtttaaaagtttttgaccgaaccacccggcagctgatgctcacaccttttggcaccgcgctgttaccgtacatcaacgacatgctggacagaaacgagcaacttaataattttattgcagattataagcatgagaaacgtggtcgggtcaccatctacgccccaaccggcataattacctatttatccaaacatgtaatcgataaaattaaagatatcggtgatatcaccttatcgctaaaaacctgcaatcttgagcgtaatgccttttatgaaggcgtcgaatttcctgatgattgtgatgttttaatcagctacgctccaccaaaagatgaatcgctggttgccagttttattacccaatatgccgtaaccgcttatgccagccagcgctatcttgagaaacatcccattagccgtcctgacgaactcgaacatcactcctgtattttgatcgactcgatgatgatcgacgacgcgaatatctggcgcttcaacgtcgccgggagtaaagaggtgcgggattatcgcgtgaagggaaattacgtttgcgacaacacgcaatctgcgctggagctggcacgaaatcacctggggattgtgtttgcgccagacaaaagtgtgcagagcgacctgcaagacggcacgctggtgccctgctttcagcaaccctatgaatggtggctggatctggtggctatcttccgtaaacgggaataccagccctggcgggtccagtatgtgctggatgaaatgctgcgtgaaattcgccaccagcttgctcagtcgcagcaactgcggcctgaacaagcggcggaaagcgaagattaatgatcgagataaaggtaatgcacccagctggtcatgcgtaatagcactttgcgcatcaccgagacatggctgaaatgatcagagtaaaccgccacctgggcgtaaataccgtctggtaaagcgctcaaatcagtgtgctcatccagttcaatggtcgcgataacgccatctgaacccggcgctgtgtttaacgtctgtaaggtgccggtcgactgataagctccgccgggaacggctggactaatggctgccagcttaccgctgaataccttacctggcagagcattaaacaccacttccgcatcgtcgccaggagccagtcgcagcaaggagttctgacggaactgcgccacgatttgtcgtttctgatcgggtataaacaccatcaccggacgtagcggcagcgacgcggcataggtacccggacgaatcagtacctgggtcacataaccatcgctcggcgcacgcactatcgtctgctcaaggttatattttgcttccgcgagctgtgctttcaggctggcgatttgagaatgttcacccaacaccaggctatccagctggctctggatctgtttttgttccgccgccgatgacttcacggaggcttcctgcgccagataattttgccgcgccacatcgatatcgcgttctgaaaacgggtttactttcgcctggctgccacgtgcgtaacgcttatactctttagcgaatttatcccgcgtggcctttgcctgctgagtattcgccgccatctcatctaactctgcgcccaacgcccgctgtttatgttctgcggtaacgatatccgccatcagccgatccacccgcgcctgataacgcgtcgggtccagtcgaaatagcacctcaccttttttaatcagcgtatttttcttatccgtcacttcgatcaccacgcctgtcacctgtgggacaacaggaatagaaataaccgctttttgcgctttgaaggtatacggatggttatagttcattaacagaattaaaccactgacaataaatatgccacccagggccgctgtgggaatggtccatttatttacaggaattttgaagatcttaaacattgcccatgcaaaagccacataggtcaaaataatcagtaaatccataagtattactcggcagaagaggatttgatgtcggcgagctgtttctccagcccggcaatacgctgttgtagttgcacaacggaggagtcatggttttgcattccccatccccgctccgggcggtaaagcgtggcccaaatccacaaaaatggccagataacatgcagcgtaaaaagactcacccaaccagcaacatgaatggcgtcggcatgaggatgattacgttttttagcaatcaggtagggaatatcatgtaaaataataatcccatagaatatcaccagaaatacaaaaataagcactcccagtgcaaaataatccagaaacatatttccctcagagaatataaaaaagaacaattaacgcatattatgaaatcccatgatgcagtgcaatttccttatttatataacggcatattgttttttatatactttctgaagtgtgctgcgtggcttttcaacaggtcgaggtttatcatattgaaataatggaactattgaccaagctaatgaataactccagtaaaacatccacagtacagataaagcgtattaaaccttcaattatctaccgtttattgctgattggcctcggaacgccaatggtgatttacggcctggtttgcccgctcaccatcgaaacgcgagagtaaactcctggcaaaacacgccccagaaacgcacttctgttggcgtagtctgggttattgcgcacgtaggtttaaaacgtaaattgtaacaacgtgcgctttgtttatgccggatgcggcgtgtacgccttatccggcctacggtcaggttcccgtaggcatgataagacgcgtaagcgtcgcatcaggcaatgaatacccaatgcgaccagcttcttatatcagaacagccccaacggtttatccgagtagctcaccagcaggcacttggtttgctggtaatgctccagcatcatcttgtgggtttcgcgaccgatacctgattgtttgtagccaccaaacgcagcatgtgccgggtaagcgtgataacagttggtccacacgcgcccagcctgtatgccgcgccccatcttataggccagattaccgttgcggctccagacgcccgcgcccaggccatattgcgtatcgttcgccagctccagcgcttcttccatcgttttgaaggtggtcaccgccagcaccgggccaaaaatctcctcctggaacacccgcatattgttctgaccaaacagaatcgtcggttcgaggtagtagccgtctttcagttcaccttccagcagcttgcgccgcccgccggtgagcacgtctgcgccctcttttttaccgatatcaatgtagttgaggatggtttccagttgcccgtgagaaacctgcgcgcccatttgcgtcacgctgtcgagtgggttaccgctgcgaatgctttcgacacggcggatggcgcgttccataaagcgttcgtagattgactcctgcactaaggcacgactcggacaggtgcaaacttcaccctggttaaaggcaaacagtgcaaagccttccagcgctttatcgaaaaaggcatcttcttcatccatcacatcagcaaagaagatatttggcgatttgccgcccagctccagcgtcaccggaataatgttttgcgtggcgtattgcataatttgttggcccacttccgttgagccggtaaacgccactttggcgatgcgtttcgaggtcgccagatattcgccaatttccccacctgcgccgttgaccacgttcaccacgcccggcggcagtaaatcaccgacgatttccattagcagcagtacagaaagcggggtaagacgtgcgggtttcagcaccacacagttgcccgccgccagcgcgggagccattttccagctcgccatcagcagcgggaagttccacgggataatctgccccaccacgcctaacggttcatggaaatgataggccacggtttcgctatcaacttcactgatcccaccttcctgcgcccgaatacacgaggcgaaatagcggaaatggtcaatcgccagcggtacatccgcagcactggtttcgcgaatgggtttgccgttatcccaggtttcagctgtcgctaacagctcgaggttttgttccattcgatcggcaatcttaaacagaatcgccgcgcgatcctgcaccgaggtgtgcgcccatttatctttcactttgtgcgcagcatccagcgccagatcgatgtctcgtttgcccgaagacgccacttcgcacagcagctgcccggtcaccggcgtcagattctggtaatactcgccgtcggcaggggctacccattcgccgccaataaagttgtcatagcgggcttttaacttgagggggaaaccatactcgccgggcttaatctgtgctgaagggggattattggtcatgatcgtctccttgcggtgtgaggtataacaagggtagacgtgactggcgaaatcttcgccagtcggtaacagctttacgacagctatcacgaatttacgggcaagggttacagagatagttgaaaaagcggctgacaatttgccagccgttgtggaaatgatgattacatcgctgcgcgataaatcgccacaatttcttcgtgagttgcctggatcgggttagtaaaaccacaggcatctttcagggcattagtcgccagaaccgcgaaatcttcttctttcacgttcaggtcgcgtaggcctgccgggatatccactttcttcgccagttcacggatggcgttaatgcaggcttcagcaccttccgcatcgtttttacctgtcacgttcacgcccattgcagcggcacagtcacgcagacgtgcggcggcgactttgctgttgaatacctgaacatgcggcagcaaaacggcgttacatacaccgtgtggcaggttgtagaaaccgcccagctggtgcgccatcgcatgaacataacccagagaagcattattgaacgccataccggcgaggaactgggcataagccattgcttcacgcgctttcgcattactgccatcttcaacggctaacggcaggttttcggcaatcatggtcacggctttcagtgcacaagcgtcagtgatcggcgtggcggcaatagaaacatacgcttcgatagcgtgcgttaaggcatccatacccgttgcggcggtcagtgacttcggcataccaatcatcagagaggagtcattgacagaaagcagcggagtgacatgtttatcaacaatcgccattttgatatgacgcgcttcgtcagtgatgatgcagaaacgggtcatttcagaggccgtacccgccgtggtattgatggcgatcatcggcagctgcggttttgcagagcggtcaacgccttcgtaatcgcgaatatcgccgccattggctgccaccagcgcaataccttttgcgcagtcgtgtggagaaccaccgcctaaggagatcacgctatcgcaattattctctttaagtaatttcaaacctgcggcgacgttttccgtggtggggttaggttgggtgccatcataaataacgctaaaaatattgcgttcttccagtgctttttgcacatcgcccgccatacctaatttcgttaacatactgtcagtgacaattaaggtacgggtaaatccataatctgccatcatattcattgcatcagtcaatgaatcagcgccgatgacattcacagaaggaataaagaaagttgaagatgccataacacactcctgaaagtgtaaaaaagggtgggcagcttactgaggattttcattcgaaaacatgatcattattattgattatcaaaattaatctaataaaaagcacattgtattcattaaacaatgtgctttttttaaaatcataagaaatttgtattaatttattttaaaaattaattaatcatttccttatttttccggaaataataatgcgtcgcgcaataaatgatcatttccacgacgacgcgtaaagccaatgcggtcaaaatattccagaatctgaattgccagctttcggcctacgcctaagcgatcgcggaaatccgccgcgcaggttgaaccacactcctgatcgagatcgcggatcatattggcaaattcgacaatccgatcgttacggtaataacgatctttgacgatcgcggtaattattccttgctgcgccgcctggcgtagcgtcaggcgcattgcctgctcgtcggtacccgtctcttttgccagatcacgcacccaccacggctcgtcaccaaacagcggctctgctttttgccagatggcctgctgctcttcgctgaagcccgctttgtgatccggcagatgcagccaaccgtgatgactgaggatgtcgccgctttcgcgcatcttttcaatcagcaacagtactagcgcttcatcttccattggcaacgccatacgtcgcagacgttcgcgcccaggcccaggttcatcgcgatgttgctcatgataagtcgctaatgtgtcgagaattttccgttgccagcgagcggcaaccggcgcattcaacaagctataaccagcctgaatatagccaggctgttgcagcaattcgcgcatcccttcgccgttgagctggcgcgcccaggcgaaatccgcaaggttaaccgcgccgcgttccagatgaacagataacgcatcggcatcgctctgcgcccgtgcaagagacgccagccattgcagatattccggcttacgtttaccgcgacgcggcgggttaagcatcaccacacgcgcccccgccagcgtgttgcgggccgagatatcgcgcagcactaagcgatcgttatccgccagccacagcggcgtgtcgaacaccagctcggcaaggttatcttccagcagcgaaacgcgtcccgtaacgtggctggcggcgtggtgaatatgcagcggctgccactgggtcagcggcgtatgggtttgaagctcgacaatcacccgtgtgaacggctctggcggcgcatcggcaagcagccagtcgccacggttaatctgctctttttccgcatcacccgcgatgttaagcgcgatacgctgcccggcatgggcggtttctgttggctggttttgtgcatgcagcgcacgtacacgcatcggtttatttacaccagtcagccagagtgaatcgcctaccttcacttccccgcttaacgccgtaccggtgacgaccagcccggcaccttttacggtaaatgcgcggtcgatcgcgaggcggaaactatgttggctggcgtgttcacgtcctggtaactgaagcagatgctcgcgcagggcatcaattccccgaccttcggttgctgcggtgataaacagttttgcctcagcaaaaccgtattcccgcagcacctcctttacctggcgttcaacctcatcaacacgcgcttcgtccacgcgatcggccttggtcagcgccactgtcagcatcgggttaccggtcagctgcaaaatcgccagatgctcacgggtctgcgccatcacgccgtcatcgcacgccaccaccaacagcgcgtgatcgataccaccaacgcccgccagcatgttggaaagaaacttttcatgaccgggtacgtcgataaaaccaggcacgcgaccatccggctgcggccagtaggcatagccgagatcgatggtcatgccgcgctttttttcttccggcagacggtcagcatttacgccagtaatcgcctgcaataaggttgttttgccgtggtcaacgtgtccggcagtcgcaataatcatttcaacaacatctccaaaaaccgttgctcatcttcaaggcagcgtaaatccagccacaatcgtccgtcataaatacgaccaatcaccggcactggcaattcacgccagcgggcggctaatgactcaaggtggctaccgcgtccatcatggggtgtaaacgttaatgccgcgctcggcaggcgatcaaccggcagcgaaccactgccaatctgcgaaagacatggcataacctgtaccgcaaactccgcgccgtaatgtgcggcaaggggagcctgtaaacgttgtgcctggatttgaatgacctctgcgctgcgggtaagcaggcgcagggtcggtaatttttcactcagagcttcagggtgtaaataaagacgcaacgtggcttccagcgccgcgagggtcattttatccgcgcgtaatgcacgcttcagcgggtggctttgcaggcgggcgatcatctcttttttaccaacaataattcctgcctgcggcccgcctaacaacttgtcgccggagaaactcaccagactgacgcccgccgcaatcaactcctgcggcattggctctttcggcaaaccgtactggctaagatcgaccagcgagccactgcctaaatcagtcactacgggaacatccagctctttgccgagcgccaccagttccgcttcatctatcgctttggtgaacccctgaatgctgtagttactggtatgtactttcatcaacagtgcggtattttcattcaccgcctgacgataatcattcgcgtgcgtgcggttggtggtccctacttcgtgtagggtgcaacctgcctgacgcataacatcgggaatacgaaacgcgccgccaatctccaccaattcgccgcgagatactaccacctctttcccgctggcagtggccgccaacatcaataacaccgccgccgcattgttattgacgatacaggcatcttccgcccccgtaatacggcacagcagttgcgccagcgcccgatcgcgatgtccgcgtccggcgtcgtccagatcgtactcgagggtcactggcgaacgcatagcctgcgcaacggcttccaccgcggcttccgcctgtaaagctcgtccaaggttggtatgcagcacggttcccgtcaggttgatcaccggacgcagcgcgctctgcgcttctttcgtcaaccgggcatcgacttcttgcgcccagttttcacaccacgcaggcagcgtctggctgccacgaatcacttctcgcgcttcgtcgagcatctgacgcaacaattccaccacgcgggtgtgaccataagtatcacgcaaagaaaggaaggagctatcgcgcaataagcgatcaatagccggaagttgactatagagggaacgcgtttcggttgtcataggaaacctggctgatcaaggccctctcacacggagaagggcgtttaacataaccacggattgtaacgtgagatgggtcaggaggacatatcgcgcatcaagcctttggcggttcggtgcgagcaaaactttcgcggctaaacaggttttcgaccagtttgactaagtgtgggcggtcgacacaccaacctggcgcaacgcggcggaaattgagatatccgacggcacaggcaatggcgatagtcgccagattgaccgtatcggttttgagtgtgccatcgaccagatatccttccagcacatccagactgcggttgattttctcccgctggcgtaacaattcatcttcagactgctgcgccgctggacgcgcctgttcacgcaccgataccagcccggcatccataatgccatccgccagtgcctcaattttgcgcacccgcaacgactccagcggatcgcgcggcaacatcgccggagcgacattcattaattcaatatattcagcgatgatcggcgaatcaaaccaacattcgccctcttcggtcaccagcaccggcacttttcctaacgggttaaattgcgccacgccgttgtccgcgttatagggcagttcattaataaattcgaaagttatgcccttttctaacaacagaatagaaagtttgcgtacaaacgggctggtgtagctaccgacgagtttcatgccgagtcctttgtgcgaggaaaaatatcagtatggcctggtgatgggaaaaagggcagaaaatgttgatggtttgttacttccaaataaatcacatatttatcatggtgatataaatattttcctaattgtttctatctgatggatatctcacttaaggctttcttataaatctgtagggttttgcctggaagcagacaaataacccgataaaacaaggatgagcagatgagcggaaaaccggcggcgcgtcagggcgacatgacgcagtatggcggtagcattgtccagggttcagccggggtgcgcatcggtgcccccaccggcgtggcctgttcggtgtgccccggcggagtgacgtccggccatccggtcaatcccctgctcggtgcaaaggtccttcccggtgaaaccgacatcgccctgcccggcccgctgccgttcatcctctcccgcacctacagcagttaccggacaaaaacgcccgcgccggtggggagcctcggccccggctggaaaatgcctgcggatatccgcttacagctgcgcgataacacactgatactcagtgataacggcggcagaagcctgtattttgagcacctgtttcccggtgaggacggttacagccgcagcgagtcactgtggctggtgcgcggcggcgtggcgaaactggatgaaggtcaccggctggccgcactctggcaggcgctgccggaagaactccgcttaagtccgcatcgttatctggcgacaaacagtccgcaggggccgtggtggctgctcggctggtgtgagcgggtgccggaagcggatgaggtgctgcctgcgccgctgccgccgtaccgggtactgaccgggctggtggaccgcttcgggcgcacacagacgttccaccgcgaagccgccggtgaattcagcggcgaaatcaccggcgtgacggatggtgccgggcgtcacttccggctggtactgaccacgcaggcgcagcgggcagaagaagcccggcagcaggccatttccggcgggacggaaccgtccgcttttcctgataccctgccgggttacaccgaatatggccgggacaacggcatccgtctgtctgccgtgtggctgacgcacgacccggaatacccggagaatttacctgccgcgccgctggtgcgctatggctggacgccacgcggcgaactggcggtggtgtatgaccgtagtggcaaacaggtgcgcagctttacttacgatgataaataccggggccggatggtggcgcaccgtcacacgggccggccggaaatccgttaccgttacgacagcgacgggcgggtgacagaacagcttaacccggcaggcttaagctacacgtatcagtatgagaaagaccacatcaccatcaccgacagcctggaccgccgtgaagtgctgcacacgcagggcgaagccgggctgaagcgggtggtgaaaaaggaacacgcggacggcagcgtcacgcagagtcagtttgatgcggtgggcaggcttaaggcacagacggatgccgcaggccggacaacagagtacagcccggatgtggtgacgggcctcatcacgcgcatcaccacgccggatggcagggcatcggcgttttactataaccaccacagccagttaacgtcagccaccgggcctgacgggctggaaatacgccgggaatatgatgaatccggccgtctgattcaggaaaccgcccctgacggcgatatcacccgctaccgttatgataatccacacagtgacctcccctgcgcaacggacgatgccaccggcagccggaaaaccatgacgtggagccgttacggccagttgctgagcttcaccgactgttccggctaccagacccgttatgaccatgaccgcttcgggcagatgacggcggtgcaccgcgaggaagggctgagccagtaccgtgcatacgacagccgtggacagttaattgccgtgaaagacacgcagggccatgaaacgcggtatgaatataacgccgccggtgacctgaccaccgtcattgccccggacggcagcagaaacgggacacagtacgatgcgtggggaaaggccatctgtaccacgcagggcgggctgacgcgcagtatggaatacgatgctgccggacgggtcatccgcctgaccagtgaaaacggcagccacaccaccttccgttacgatgtactcgaccggctgatacaggaaaccggctttgacggccgcacacagcgttatcaccacgacctgaccggcaaacttatccgcagcgaggatgaggggctggtcacccactggcactatgacgaagcagaccgcctcacgcaccgcaccgtgaatggcgaaaccgcagagcagtggcagtatgacgaacgcggctggctgacagacatcagccatatcagcgaagggcaccgggtgacggtgcattacgggtatgatgagaaaggccggctgaccggtgagcgtcagacggtgcatcacccgcagacggaagcactgctctggcagcatgagaccagacatgcgtacaacgcgcagggactggcgaaccgctgtataccggacagcctgcccgccgtggaatggctggcctacggtagcggttacctggcaggcatgaagctcggcgacacaccgctggtggatttcacccgcgaccgcctgcaccgggaaacgctgcgcagcttcggccgttatgaactcaccaccgcttacacccctgccgggcagttacagagccagcacctgaacagcctgctgtctgaccgcgattacacctggaacgacaacggcgaactcatccgcatcagcagcccgcgccagacccggagttacagctacagcaccaccggcaggctgaccagcgttcacaccaccgcagcgaatctggatatccgcatcccgtatgccacagacccggcaggtaaccgcctgcccgacccggagctgcacccggacagcaccctcagcatgtggccggataaccgtatcgcccgtgacgcgcactatctttaccggtatgaccgttacggcaggctgacggagaaaaccgacctcatcccggaagggggtatccgtacggatgatgagcgcacccaccggtaccattacgacagtcagcaccggctggtgcactacacgcggacacaatatgcagagccgctggtcgaaagtcgctatctttacgacccgctgggccgcagggtggcaaaacgggtgtggcggcgtgaacgggacctgacgggctggatgtcgctgtcacggaaaccgcaagtgacctggtacggctgggacggcgaccggctgaccacaatacagaacgacagaacccgcatccagacgatttatcagccggggagcttcacgccactcatcagagttgaaaccgccaccggtgagctggcgaaaacgcagcgccgcagcctggcggatgcgcttcagcagtccggcggcgaagacggtggcagtgtggtgttcccgccggtgctggtgcagatgctcgaccggctggaaagtgaaatcctggctgaccgggtgagtgaggaaagccgccgctggctggcatcgtgcggcctgaccgtggagcagatgcaaaaccagatggacccggtgtacacgccggcgcgaaaaatccacctgtaccactgcgaccatcgcggcctgccgctggcgctcatcagcacggaaggggcaacagcgtggtgcgcagaatatgatgaatggggcaacctgctgaatgaagagaacccgcatcagctgcagcagcttatccggctgccggggcagcagtatgatgaggagtccggcctgtattacaaccgccaccgctattatgacccgctgcaggggcgatatatcactcaggatccgattggactgaaggggggatggaacctgtatggatatcaattgaatccgatatcagacatcgaccccctgggtttatctatgtgggaggatgcaaaatcgggggcatgtactaatggtctttgcggcacactatccgctatgacaggtccagataaatttgattctatagatagcaccgcatatgacgccttaaataaaataaatagccaatctatttgcgaagataaagagttcgctggtttaatatgtaaggataatagtggcagatatttctcaacagcacctaaccgaggagaatgaaaaggatcatatccattcaatagcccttgccctaatggtactgagaaagtatcagcttatcatactcatggtgcagatagtcatggagaatattgggacgaaatattttcaggtaaagatgagaaaatagttaaaagtaaagataacaatatcaagtaattttatttaggtacgcccagtggtaattttaaagcaatagataaccacgggaaggaaataacaaacagaaaaggattacctaatgtctgcagagttcatggtaatatgtaaaaaaatattgtttaggaactgtgtcattgtatctttgtttgtttttacatacaacacatgggcgcagtgtaataataatattaaaataatgcgcaagtatgaaagtgaaggtaaatataccgttagaaatttggttaaaaataaagctatagcattggaattagctgagatatatgttaagaatcgttatggacaggatgccgcagaagaagaaaaaccatacgaaatcactgagttaacaacaagttgggttgttgaaggtaccattcactcagaccaaattgctggtggggtttttattatagaaataggcaaaaatgatgggagaattctgaattttggccacggaaaataagtatgtaaggataatcaaacatcgtgtgcgctgatggcagagtaggtggaggactccagacagtcaaacgatagaaaaagatagcctttatggaggttcctgcaatgtcaaatacataccagaaaagaaaggcaagtaaagagtatggtttatataatcaatgtaagaaactaaatgatgatgaattatttcgcttacttgatgatcacaattccttgaaaaggatttcatctgccagagtattacagttaagaggtgggcaagacgctgttagattggcaattgagttctgctctgataaaaattatatccgtagagatatcggagcatttatactcgggcaaataaaaatttgcaaaaaatgcgaagataatgtttttaatattttgaacaatatggcattgaatgataagagcgcttgcgttcgagctacggcaatcgagtcaacggctcagcgatgcaagaaaaacccaatttattcacctaaaatagtagaacaatctcaaattactgcttttgataaatcgactaatgtcagacgtgctacagcatttgctatttctgttatcaatgataaagcaacaattccactattgattaatctgttaaaagatccaacttattgatagtgttttatgttcagataatgcccgatgactttgtcatgcagctccaccgattttgagaacgacagcgacttccgtcccagccgtgccaggtgctgcctcagattcaggttatgccgctcaattcgctgcgtatatcgcttgctgattacgtgcagctttcccttcaggcgggattcatacagcggccagccatccgtcatccatatcaccacgtcaaagggtgacagcaggctcataagacgccccagcgtcgccatmgtgcgttcaccgaatacgtgcgcaacaaccgtcttccggagcctgtcatacgcgtaaaacagccagcgctggcgcgatttagccccgacgtatccccactgttcgtccatttccgcgcagacgatgacgtcactgcccggctgtatgcgcgaggttaccgactgcggcctgagttttttaagtgacgtaaaatcgtgttgaggccaacgcccataatgcgggcagttgcccggcatccaacgccattcatggccatatcaatgattttctggtgcgtaccgggttgagaagcggtgtaagtgaactgcagttgccatgcyyymcsscagttgagagcagagatagcgctgatgtccggcggtgcttttgccgttacgcaccaccccgtcagtagctgaacaggagggacagctgatagaaacagaagccactggagcacctcaaaaacaccatcatacactaaatcagtaagttggcagcattccactattgattaatctgttaaaagatccaaatggagatgtcagaaactgggccgcatttgcaataaatatcaataaatatgataatagtgatattagggattgttttgtggagatgcttcaggataaaaatgaggaagtccgtattgaagcaataatcggactttcctacagaaaagataaaagggttttatctgttttatgcgatgagttaaaaaaaatactgtttatgatgatatcattgaagctgcgggtgaattaggtgataaaacgctacttcctgttttagatactatgttgtacaagtttgatgacaatgaaattataacttccgctattgataagctgaagcgttcatagcgtgagttgcctatgcacagtgggggattcccgccggcacggtgcagatgctcgaccggctggaaagtgaaatcctggctgaccgggtgagtgaggaaagccgccgctggctggcatcgtgcggcctgaccgtggagcagatgaaaaaccagatggacccggtgtacacgccggcgcgaaaaatccacctgtaccactgcgaccatcgcggcctgccgctggcgctcatcagcacggaaggggcaacagcgtggtgcgcagaatatgatgaatggggcaacctgctgagtgatgagaacccgcatcatctgcagcagctyattcgcctgccgggtcagcagtatgatgaggagtccggcctgtattacaaccgccaccgctattatgacccgctgcaggggcggtatatcactcaggatccgattgggctgaaggggggatggaatttttatcagtatccgttgaatccggtcataaatgtagatccgcaaggtttggttgatataaatttataccccgaaagtgatcttatccattctgtagctgatgagattaatatcccaggcgttttcacaatcggggggcatggtacccccacatctattgaatccgcaacgcgcagtatcatgacagctaaagatctagcatatctaattaaatttgatgggaattataaagatgggatgacagtttggttattttcttgtaatacaggtaaaggacaaaattcatttgctagccaattagctaaagagttacatacaaatgtaataggacctgacacgctatggacgtggtgggggcgaggaactaatggtaagttaaaaatggatacagtgctaacagcaccaacgaaccttaattcaaataaggatctaatggctataacaacaaaagaccttggtaattggataacatatgggccatctgggcaccccatttctaatatgcaaggtacgccagaaaaacccagtgatataagataggttgtagatgtatgaaagcatgcttgttactattttttatttttctcttattggtcaattgcatggtgctgatgtgaaaataaaagaaaacgaaagtgtgatgggatctacagcaatgacctatgatttaagtgaagaaaagctgatgaaactgaagtataaatcacaacatggtgattcagaggcatcatttcgactatatcaatattactgctttactaaaaataatattgataaacaattgcgattcttggaaagatcagcatctcaggggaatgttacagcgcagtttaattatggggtctttttatcagatacaaatccaacattatcagaatattataatttgaatagagctatttattggatggaattcgctgtaaataacggtaatattgatacaaagagcaaacttcaagagctcaaaaagctaaagcgaatggatagaaggaagaataaggagaatccgtaaaagcaatagttcatcagactgccgcagcagtagtatgatgatgaatcagggctgtactataactattatcggtaacattaaccgcagcaggggcggtataacactcaggctccgattgggctggaaggtaggtggaatttttatcagtatccgttgaacccgatttctggaatcgatccccttgggattagccacctgtttatacagtataactttaggtatgctttcgtgtgtttcagatataccatgtgatgataatttttatgatgtgcttagtattccagtcgcttctggtaataatatgcaatgtaaaaataatccccgttgtacacatttataaatagatggccaatacctcaaggcctatggagttggaatgttaatgacccgggagcaagcaatagaaaacctgacggcatacgattagtaccgtcagttaatacaggaacttataatcgcaatggattttcaatacatagttgtttaaacgcttttggtccgtctttaggacctcgattctgttccgagggttgtataactggtttatctaatgacatgcaaaaattaaatgagttaatattttcagagccagatagcacattaacagttacggactaaaaaatatggcaaggttattaacaattgtatttttttctctatttctgcgagtgcagttactgcaagacaatttcagagagagttagatttggcagacaaagcaatattatgggcactaatatcagccagtaataaagagggacgaaaagcgtgttcactaagctattttgcctgtaaggccgcagaggctgaactcggactggcatatatggctgcgaatgataacaaggaatttctcacatccttatctaatataatgaggtacaaaatagatgctggactttccgaatcctatacatgctatttattaagtaagggaaagatcataagaccatatctgaaaaatctaaatccactccaacttgccgctgattgcattgaaacagtaaataaaatataagaataaaaaaatcattgatataaattcagttaatatttgtagtgatgataaaaatataaaattgagagttaatagtactattatggccattgatgattctataaagtgcatcgatgaatgataacttaattttatttaaaaatatattaataactcactctccaggagttttttaacttagttttataatgaatacgataattaaaagtgaagaagaaaatagttgtatacatatattccatgaccctacattgtgatctatagattaaatattttttaaatgtgactgtcatccttcagataataaagccatcatcgcaatagatggaaaagcactcctgctcttttttgattagagccgtcgcaggaggaacaactcatatcatcattgcgatctcgacgatgtatagtctcatcctgcggcagaacaagacggataaaaatccaatgagagtacactcatccagaacttattaacataatgaatattaaagaaaaatcatcgcagctaatgaagtaatatgcaaaaataattagtccttacaaggagcaaagttccataatctccccctccccctcaatgatccaaataaagataatgcatccagctggtcattcttagcagcactttccgcatcaccgaaacatggctgaaatggtcggagtaaaccgccacctgggcgtagatgccgtcgggtaaggcatcgatatcatcgttagggtccagttcaatggttcccagcacaccgtccgtgccgggcacgaccgttaatgattgcaataccccctgcgcctgataagaaccgcctggcacgacaggtaaaatactagtcagtttgccgtgaaacacctgcccaggtagcgcgttaaacaccacttccgcatcatcgccgggtttcagacgtaacagcgagttttgccgaaattgggcgacaatttgccgtttttgctcggggatgaagaccatcaccggacgcagcggcaaggcagctgcgtatgtacctgggcggatcagtacctgagtaacgtagccattgctcggcgcgcgaatgacagtctgctcaaggttatattttgcttcagtaagttgcgctcttaagctcacaatctgcgattgctcgccgttaaccatactgtcgagctggctctggatctgcgcctgctccgccaccgagcctttcaccagcgcatcctgcgcgaggaaattttgccgcgcatcgtcgatgtcacgttccgagaacggattcaccgccgcctggctgcctttcaagtaacgttgataatttttaaacagacggtcgcgctccgctgaaacctgggtggtgttggcctgcgcttcagtgagctgcgcacgcagcgtctttatattatgcgtcgccgtcatcaggtcagcctgaagtctgtcaactcgcgcctggtaacgaaccgggtcgagcttaaaaagcacctcgcccttttgaataagctgattattcttgtcagtgacttcagtaacaattcccgtcacctgtggcgtgatagggatcgctatcactgccttttgcgcggtaaaagtgtaagggtggttgtagttcatcaacaaaattaaaccactcaccagaaacacgcctcccagcgccgccgtcgccagcgtccactgatttaccggaatgcggaagattttaaagaccgtccacgccagcgccacgtaagttaaaacaatcaatagatccataattagatctccgggaacgtggaatagtcagtctttttctcggcggcgagttgatgctccagccgggaaattcggtcagaaagtgaggcgatttccgggtcagtcgctttctcctgcgacgcaacatgtgactgcataccccagccacgctccggttgatagagcgtcgcccagatccacagaaacggccagataacatgcagagtaaacaggctcacccagcccgccgtatgaatagcgtcggcatgggggtgattgcgctttttggcaatcagataagggatgtcatgtatcgcgatgattccataaaaaatcaccagaaagacgaagatcagcactcccaacgcgaaatagtttagaaacatatctgcctcggattcacgtttatcagtgttgtttttgggctggcagccagaagggagtcaggctgatattttgacaataatccgggttcgcgattctcgccataacaccaaagaataatttttagaggtgatgagttgcttagttacataacgattgtatgacgaaggcataacatgctgtagatcacatcaggtgaacgccgtaagaaaatatcttgtgattcagatcacaaagattcaacaaaccatcaaaacaaaaatgtgacactactcacatttaaatgccatttttagcgaaaatcgccgtcttgttgcttttttacacaagcgttttgtgatgagtatcacgtcaattacctctctaccccctatatttatgtgactgatatcacacaaaaggccgtcgactggacagttaaccgattcagtgccagatttcgcagtatctacaaggtccggctacctctgccgccacattaacaaaaaacctcgggcttccagcctgcgcgacagcaaacataagaaggggtgtttttatgtcatccgatattaagatcaaagtgcaaagctttggtcgtttcctcagcaacatggtgatgccaaatatcggcgcgtttatcgcgtggggtatcatcaccgcgttatttattccaacagggtggttaccgaacgagacgctggcgaagctggtcgggccgatgatcacttatctcctgccgctgctgatcggttataccggtggtaagctggtaggcggcgaacgtggcggcgtagtcggtgccatcactaccatgggcgttatcgtcggcgcagacatgccgatgttcctcggttctatgattgcaggtccgctgggcggctggtgcattaagcacttcgaccgctgggtagacggtaagatcaaatccggttttgagatgctggtgaataacttctccgcaggcatcatcgggatgatcctcgccattctggcatttctcggcattggcccgattgttgaagccctgtccaaaatgctggctgcgggcgttaacttcatggttgtccatgacatgctgccgctggcgtctatctttgttgaaccggcgaaaatcctgttcctcaacaacgccattaaccacggtatcttctcgccgctgggtattcagcagtcccatgaactgggtaaatccatcttcttcctgattgaagctaacccaggtccaggtatgggcgtgctgctggcgtacatgttctttggtcgtggtagtgctaaacagtctgcgggcggtgcggcaatcatccacttcctgggtggtatccacgaaatctacttcccgtatgtgctgatgaatccgcgtctgatcctggccgttatcctcggcggtatgactggcgtgttcacgctgactatcctgggcggtggtctggtttctccagcatctccggggtctatccttgcggtactggcgatgacgccaaaaggtgcttacttcgctaacatcgcgggtgtgtgtgcggcgatggctgtctccttcgttgtctctgctattttgctgaaaaccagcaaagtgaaagaagaagatgatattgaagcagcaactcgtcgtatgcaggacatgaaagctgagtctaaaggcgcatctccgctgtctgctggcgatgtgactaacgacctgagccacgtacgtaaaatcatcgttgcctgtgacgccggtatgggttccagtgcgatgggcgcaggcgttctgcgtaagaaaattcaggatgcaggtctgtcgcagatttctgttactaacagcgcgatcaacaacctgccgccagatgtggacctcgtcatcactcaccgtgacctgaccgaacgcgctatgcgccaggttccgcaggcacagcatatttcgctgaccaacttcctcgacagcggcctgtacaccagcctgaccgaacgtctggttgctgcccaacgccacacggcaaacgaagagaaagtaaaagacagcctgaaagacagctttgacgattccagtgctaacctgttcaagctaggcgcggagaacatcttcctcggtcgcaaagcggcaaccaaagaagaagcgattcgttttgctggcgagcagctggtgaaaggcggttacgttgagccggaatacgttcaggcgatgctggatcgtgaaaaactgaccccgacttatctgggtgagtctatcgcggtgccacacggtacggttgaagcgaaagatcgcgtactgaaaacgggcgtggtgttctgccagtacccggaaggcgtgcgcttcggtgaagaagaagatgacattgcccgtctggtgattggtattgcagcccgtaacaacgagcacattcaggttatcaccagcctgaccaatgcactggatgatgagtccgtcatcgagcgtctggcacacaccaccagcgtggatgaagtgctggaactgttggcaggtcgtaagtaatccaatcccaccctctccacatggagaaggtggggttaattgcctgatgcgctacgcttatcaggcctacaggatgcatcacgatttgttgaatttgcacgttcttgtaggccggataaggcgcttacgccgcatccggcgctgcccctctcctcacggagagggtttgggtgagggaaaagcctcaccccagcctctcgggtaaaaacattgatgaaggttaatactatgaaagcattacattttggcgcaggtaatatcggtcgtggctttatcggtaaactgctggcagacgcgggtatccaactgacgtttgccgatgtcaatcaggtggtacttgatgccctgaatgcccgtcatagctatcaggttcatgtggttggtgaaaccgagcaggtagataccgtttccggcgtcaatgctgtcagcagcattggtgatgatgtcgttgatctgattgctcaggtcgatttagtcactaccgccgttggcccggttgtgctggaacgtattgctccggctatcgccaaagggctggtgaaacgcaaagaacaaggtaatgaatccccgttgaacatcatcgcctgtgaaaacatggtacgcggtaccacgcagctgaaaggccatgtgatgaacgccctgccggaagacgccaaagcgtgggtagaagaacacgttggctttgtcgattccgccgttgaccgcatcgtaccgccttcggcttcggcaactaacgatccgctggaagtgacggtagaaactttcagcgaatggattgtcgataaaacgcagttcaaaggcgcactgccgaacatcccaggcatggagttaaccgacaacctgatggcatttgtcgaacgtaaactcttcaccctgaacacgggtcatgctataaccgcgtacctcggaaaactggccggtcatcagaccattcgtgacgctattctcgacgagaaaatccgcgcggtggtaaaaggtgcgatggaagaaagtggtgcggtactgatcaagcgctacggctttgacgcagacaaacatgcggcgtacatccagaaaatcctcggtcgttttgagaacccgtatctgaaagatgatgtagagcgcgtaggccgtcagccgctgcgtaaactgagtgctggcgaccgtctgatcaagccattgctcggtacgctggaatacagccttccgcacaagaatctgattcaggggattgctggtgcaatgcacttccgcagtgaagatgatccgcaggctcaggaactggcagcactgatcgctgacaaaggtccgcaggcggcgctggcacagatttccggtcttgatgccaacagcgaggttgtatccgaggcggtaaccgcttataaagcaatgcaataatggtggaccaggcgcaggacaccctgcgcccgaataacagattgtcagatatgcaggcaacaatggaacaaacccaggcctttgaaaaccgtgtgcttgagcgtctgaatgctggcaaaaccgtgcgaagctttctgatcaccgccgtcgagcttttgaccgaggcggtaaatcttctggtgcttcaggtattccgcaaagacgattacgcggtgaagtatgctgtagaaccgttactcgacggcgacggtccgctgggcgatctttctgtgcgtttaaaactcatttacgggttgggcgtcattaaccgccaggaatacgaagatgcggagctgctgatggcattgcgtgaagaactaaatcacgacggcaacgagtacgcctttaccgacgacgagatccttggaccctttggtgaactgcactgcgtggcggcgttaccaccgccgccacagtttgaaccagcagactccagtttgtatgcaatgcaaattcagcgctatcaacaggctgtgcgatcaacaatggtcctttcactgactgagctgatttccagaatcagcttaaaaaaagcctttcaaaagtaagcaacgtctgcttactgcccctctacctgcttcggccgataaagccgacgataatactccagacgttgtagatataacggcacgctttcatcgggtattccggacggaatcgcgttacggggaggaagttttttcagatactcccggaacgcctggcttgatgccatgaaatctacggctttatcgataagaagcggaacgttttcacctaatttgcccatgatgatatctccgtattaccccgcgccgggaatgcgcggccgccaattttagtttaggttcccggtaaagatgacattaaggaaaacgtgctgaatcctcaataatcatccgctgctgtttattatcttttttctatagatttcttaattaatcaataaattgcgtagtttttaagcatgttaatgattacgttacagaactattgcaatgtcatcagttgtgaacaaagcacctggtcgcgcatactaggggctataaatttatctttatcagaagccatcacatgaaagaagtcgaaaaaaacgaaatcaaacgtctcagcgatcgtctggacgccatccgccaccagcaggccgatctgtcgctggttgaagccgcagacaaatatgccgagctggaaaaagagaaagccacgctggaagcagaaattgctcgcctgcgtgaagttcatagccaaaaactgagtaaagaagcacagaagctgatgaagatgccgtttcagcgcgcaattaccaaaaaagagcaggctgatatgggcaagctgaagaaaagtgttcgcggactggtggttgtgcacccaatgaccgcgctgggccgtgaaatgggcctgcaggagatgactggattctctaagactgcgttttaagcgcctcagacgactggttcgatcatatcaacccgcatctggcttgccttagctggtcaatgcggggactctcctgtctactcgcctaattaccaaacaattcactccctttacttcgatttaccgctggttgatattctgaaaatgcatttttaccgtaatagccatctataaacaataaaaatatatagaagatatcatttgttaattaacaagcatttacgtctctttttttcggatttaattgtgaaattttaatcatcatattcacaaaatcaattatctgtaaaatttttcccagacatggtttctttcatatttgacatttattaataatcatcattagaatctacgaaaaataatatattcatacaaacacagacatcttttgaaacgaatgatacatttttatgatgaatgcttaaaacaatatttaatcgacacacatcactgtcattaatgtaaagcaacatagctcaccaataatacaatggacaactctaccggcattgatcgctggtcggaggaaataaggatttttacatgaacttgaagaagatttttttcagtgctgtcactgtttcagttctctgcgcattaacgggatgtgactacattgaagaaggcaagccagaaagtagtttactgaaacaacaagaagaacataataataaaattgtgctacttgaaaaacaacaagcacagctaaagagtcaactcgaaactattcaaaaacaacaaactggcataataaacagtacaaagactttaactcacgtaattaaatccgttaaagaccaacaaaatacttttatttttaccgagtttaacccagcaaaaacgaagtatttcatcctgaacaacggttcggtggctttagcgggtcgagtgttatccattgacgccacagagaatggtagtgttattcatatctcactggtcaacttattaagtacacctatctcaaacattggttttaatgcgacatggggtggtgaaaaacctgtcgatgccaaagagtttgcccggtggcaacaattacttttcaacacatcaatgaaatccacattgaaattattaccaggtcaatggcaagacattaatttgaccctgaagggtgtatcgcccaataacctgggatatctgaagttagccatcaacatggaaaatattcagttcgacaatcttccctctgctgaaaatcggcagaaaagaagcaaaaaataaatgcagttagtacgcttataacaaggaatagcgagcatcattaatgaacaaaatatttaaagttatctggaaccctgcgacagggaattatactgttaccagcgaaacggcaaaaagccgtggcaagaaatctgggcgcagtaagctgttaatttctgcgctggttgcgggtggaatgttgtcgtcgtttggggcattggcgaatgccgggaatgacaacggtcagggtgttgattacggtagtggatcagctggcgacggctgggttgctataggcaaaggggcgaaagcaaatacttttatgaacaccagtggttccagtactgctgtgggttatgacgctatagctgaaggccaatatagctctgccatcgggtcaaaaacccatgcgattggcggtgcatcaatggcctttggggttagtgcaatatcagaaggcgatagaagtatagcactgggtgcctcttcgtattcattgggccaatactcaatggccctcggccgttattcaaaagcattgggtaaattgtctattgctatgggggactcttccaaagcggaaggagcaaacgccattgccctgggaaatgccactaaagctactgagattatgagtattgctcttggcgacaccgccaatgcgtcaaaagcgtattcaatggcgctgggagcaagtagcgtcgcatctgaagaaaacgcaattgccctggggcgtagcagtgtagctagcggtactgacagcctcgcatttggcagacaatcacttgccagcgcagcgaacgctattgcgataggtgctgagaccgaagccgctgaaaatgcaactgctattggcaataatgcgaaggcaaaagggactaatagcatggcaatggggttcggaagccttgccgataaagtcaatactatcgcattaggaaatggcagccaggctctggcagataatgcaatcgccataggccagggcaacaaagctgatggcgtggatgccatcgctctgggtaatggtagccagtcgagaggcttaaacaccattgccttaggcacagccagtaatgcaactggtgataagagtcttgcgcttggtagtaatagcagtgccaacggtattaactctgtcgcgctgggcgcagattccattgcggatttagacaataccgtctctgtcggcaatagttcattaaaacgcaagatcgttaatgtgaaaaatggcgcgatcaagtctgacagttacgatgccattaatggttcacagctttatgccattagcgactcggtagcaaaaaggcttggaggaggggctgcagtagatgttgatgacggtactgttacagcaccaacctacaatttaaaaaatggtagcaaaaataacgtaggggctgcgctcgctgtacttgatgaaaacaccctgcaatgggaccaaaccaaaggcaaatacagcgctgctcatggtactagtagcccaactgccagcgtaatcaccgatgttgcggatggcacgatttcagcctccagtaaggatgcggttaacggttcccaactgaaagctaccaatgacgatgtcgaagccaataccgccaatatcgctactaataccagcaacattgccacgaatacggcaaatattgccaccaataccaccaatatcaccaacctgacggattccgttggtgaccttcaggctgatgccctgctctggaacgaaactaaaaaggcattcagtgcagctcacggccaggataccaccagcaaaatcaccaacgttaaagatgccgacctgacggctgacagcactgatgctgttaacggctctcagctgaaaaccaccaacgatgctgtggcgacgaataccaccaatatcgccaataacacttccaatattgccactaacaccaccaacatctctaatctgactgagacggtgactaatcttggtgaggatgcgctgaaatgggataaggacaatggtgtattcacggcagctcatggcaccgagaccaccagcaaaatcaccaacgttaaagatggcgacctgacgactggcagcaccgatgccgttaacggctctcagctgaaaaccaccaacgatgccgtggcgacgaataccaccaatatcgccactaacaccaccaacatctctaatctgactgagacggtgactaatcttggtgaggatgcgctgaaatgggataaggacaatggtgtcttcactgcagctcatggcaacaataccgccagcaaaatcaccaatatcctggacggcacagtcactgcaaccagttccgatgccattaacggtagccagctttatgacttaagcagcaatatcgccacctacttcggcggcaatgcttctgtgaatactgacggtgtgtttaccggtccaacctacaaaatcggtgaaacaaattattataacgtcggcgatgcactggctgcgattaactcctcatttagcacgtctctcggcgatgctctgctttgggatgccaccgcaggtaaattcagtgccaaacacggtactaatggtgacgcaagcgtgatcactgatgtcgcagatggtgaaatttcagactccagttctgacgcagtaaacggctcacaactccacggcgtgagcagttatgttgttgatgcgctggggggtggtgccgaagtcaatgcagacggcaccatcactgcgccgacgtacaccattgctaatgctgattacgataatgtcggtgatgccctgaatgctatcgataccactcttgacgacgctctgctctgggatgcggacgccggtgaaaatggtgcatttagcgccgctcacggaaaagataaaactgccagtgtaatcactaacgtcgctaacggtgcaatctctgctgccagcagcgacgcgattaacggctcacaactctataccaccaataagtacatcgctgatgcgctgggtggtgacgcagaagtcaacgctgacggcaccatcaccgcaccgacttacaccattgcgaacgccgagtacaacaacgtcggtgacgccctggatgcgcttgatgataacgccctgctgtgggatgagactgccaatggcggtgctggagcctacaatgccagccatgacggtaaagccagcatcatcactaatgtcgctaatggcagtattagtgaggacagtaccgatgcagtgaacggttctcagttgaatgcgacgaatatgatgattgagcagaacacccaaattatcaatcagctcgctggtaacaccgacgcaacctatatccaagaaaacggtgcgggtattaactatgtgcgtactaacgacgacggcttagcgttcaacgacgccagcgcacagggtgttggcgctacagctataggttataactctgtcgccaaaggcgatagcagcgtagctattggtcagggcagctacagcgacgttgatacgggtatcgccctgggtagcagctctgtttccagccgagtgattgccaaaggctcccgtgacaccagcataacggaaaatggcgttgttattggttacgacaccacggatggcgaactgctcggtgcattgtctatcggtgatgacggtaaatatcgtcaaatcatcaacgtagccgatggttccgaagcccatgacgccgttacggttcgtcaattgcagaatgcgattggtgcggtcgcaaccacgccgactaaatacttccacgctaattcaacggaagaagattcactggcagtgggaactgactcgctggcaatgggtgcgaaaaccatcgtgaatggcgataaaggtattggtatcggttatggtgcctacgtggacgcgaatgcacttaacggcattgccattggtagcaatgcgcaagtcattcatgtcaacagtattgcgataggtaatggttctacgaccactcgtggcgctcaaaccaattataccgcctacaacatggacgcaccgcagaactctgtcggtgaattctcagtcggtagtgcggatggtcaacgtcagatcactaacgtcgcagcaggttcggctgataccgatgcggtcaacgtgggtcagttgaaagtaacggatgcgcaggtttcccagaatacccagagcattactaacctggataatcgggtaacgaatcttgattcacgcgtcaccaatatcgaaaacggtattggcgatatcgtcaccaccggtagcaccaagtacttcaagaccaataccgatggtgtagatgccagcgcgcagggtaaagatagcgtcgcgattggttctggctccattgctgccgcggataacagcgtcgcactgggtaccggttccgttgcagaggaagaaaatacaatctctgtaggttcttctactaaccaacgccgtatcaccaacgtagctgccggtgttaatgccaccgatgcggttaacgtgtcgcagctgaaatcttctgaagcaggcggcgtgcgttacgacaccaaagctgatggttctatcgactatagcaatatcaccctcggtggcggcaacggcggtacgactcgtatcagcaacgtctccgctggcgtcaacaacaacgacgcggtgaattacgcgcagttgaagcaaagcgtgcaggaaacgaagcaatacaccgatcagcgaatggttgagatggataacaaactgtctaaaactgaaagcaagttgagcggtggtatcgcttctgcaatggcaatgaccggtctgccgcaggcttatacaccgggtgccagcatggcttctattggtggcggtacttacaacggtgaatcggcagttgctttaggtgtatcgatggtgagcgccaatggtcgttgggtctacaaattacaaggtagtaccaatagccagggtgaatactccgccgcactcggtgccggtattcagtggtaatgatccattaagttagtgtgactaagggcaaacgccaaattgcctgatgcgttacgcgcatcaggcaagataaggcgctccgggtcaacaatctaagggcaattctctgatgaggattgccctttttctttaccagacatctccccccacaagaattggccctaccaattcttcgcttatctgacctctggttcacaattccccaattaaaactcacatcaatattgccaatacataacatttagttaaccattcattgtcattatccctacacaacacaattggcagtgccacttttacacaacgtgtgacaaggagatgagcaacagactcattacacgatgtgcgtggactccaggagacctgcaatgaatctctggcaacaaaactacgatcccgccgggaatatctggctttccagtctgatagcatcgcttcccatcctgtttttcttctttgcgctgattaagctcaaactgaaaggatacgtcgccgcctcgtggacggtggcaatcgcccttgccgtggctttgctgttctataaaatgccggtcgctaacgcgctggcctcggtggtttatggcttcttctatggtttgtggcccatcgcgtggatcattattgcagcagtgttcgtctataagatctcggtgaaaaccgggcagtttgacatcattcgctcgtctattctttcgataacccctgaccagcgtctgcaaatgctgatcgtcggtttctgtttcggcgctttccttgaaggagccgccggctttggcgcaccggtagcaattaccgccgcattgctggtcggcctgggttttaaaccgctgtacgccgccggactgtgcctgattgttaacaccgcgccagtggcatttggcgcgatgggcattccaatcctggttgccggacaagtaacaggcatcgacagttttgagattggccagatggtggggcgtcagctaccgtttatgaccattatcgtgctgttctggatcatggcgattatggacggctggcgcggtatcaaagagacgtggcctgcggtcgtggttgcgggcggctcgtttgccatcgctcagtaccttagctccaacttcattgggccggagctgccggacattatctcttcgctggtatcactgctctgcctgacgctgttcctcaaacgctggcaaccagttcgcgtattccgcttcggtgacttgggggcgtcacaggttgatatgacgctggcccacaccggttacaccgcgggtcaggtgttacgtgcctggacaccgttcctgttcctgaccgctaccgtaacactgtggagcatcccgccgtttaaagccctgttcgcatcgggtggtgcgctgtatgagtgggtgatcaacattccggtgccgtacctcgataaactggttgcccgtatgccaccagtggtcagcgaggctacagcctatgccgccgtgtttaagtttgactggttctctgccaccggcaccgccattctgtttgctgcactgctctcgattgtctggctgaagatgaaaccgtctgacgctatcagcaccttcggcagcacgctgaaagaactggctctacccatctactccatcggcatggtgctggcgttcgcctttatctcgaactattccggactgtcatcaacactggcactggcactggcgcacaccggtcatgcattcaccttcttctcgccgttcctcggctggctgggggtattcctgaccgggtcggatacctcatctaacgccctgttcgccgcgctgcaagccaccgcagcacaacaaattggcgtctctgatctgttgctggttgccgccaataccaccggtggcgtcaccggtaagatgatctccccgcaatctatcgctatcgcctgtgcggcggtaggcctggtgggcaaagagtctgatttgttccgctttactgtcaaacacagcctgatcttcacctgtatggtgggcgtgatcaccacgcttcaggcttatgtcttaacgtggatgattccttaatgattgttttacccagacgcctgtcagacgaggttgccgatcgtgtgcgggcgctgattgatgaaaaaaacctggaagcgggcatgaagttgcccgctgagcgccaactggcgatgcaactcggcgtatcacgtaattcactacgcgaggcgctggcaaaactggtgagcgaaggcgtgctgctcagtcgacgcggcggcgggacgtttattcgctggcgtcatgacacatggtcggagcaaaacatcgtccagccgctaaaaacgctgatggccgatgatccggattacagtttcgatattctggaagcccgctacgccattgaagccagcaccgcatggcatgcggcaatgcgcgccacacctggcgacaaagaaaagattcagctttgctttgaagcaacgctaagtgaagacccggatatcgcctcacaagcggacgttcgttttcatctggcgattgccgaagcctcacataacatcgtgctgctgcaaaccatgcgcggtttcttcgatgtcctgcaatcctcagtgaagcatagccgtcagcggatgtatctggtgccaccggtttttcacaactgaccgaacaacatcaggctgtcattgacgccatttttgctggtgatgccgacggggcgcgtaaagcaatgatggcgcaccttagttttgttcacaccaccatgaaacgattcgatgaagatcaggctcgccacgcacggattacccgcctgcccggtgagcattatgagcattcgagggagaaaaacgcatgattatttccgcagccagcgattatcgcgccgcagcgcaacgcattctgccgccgttcctgttccactatatggatggtggtgcatattctgaatacacgctgcgccgcaacgtggaagatttgtcagaagtggcactgcgccagcgtattctgaaaaacatgtctgacttaagcctggaaacgacgctgtttaatgagaaattgtcgatgccggtagcactggcaccggtgggtttgtgtggcatgtatgcgcgtcgtggcgaagttcaggcagccaaagcggcggacgcgcatggcattccgtttactctctcgacggtttccgtttgcccgattgaagaagtcgcgccagccatcaagcgcccaatgtggttccagctttatgtactgcgcgatcgcggctttatgcgtaacgcgctggagcgagcaaaagcagcgggttgttcgacgctggttttcaccgtggatatgccgacaccgggcgcacgctaccgtgatgcgcattcaggtatgagcggcccaaatgcggcaatgcgccgctacttgcaggcggtgacgcatccgcaatgggcgtgggatgtgggcctgaacggtcgtccacatgatttaggtaatatctcagcttatctcggcaaaccgaccggactggaagattacatcggctggctggggaataacttcgatccgtccatctcatggaaagaccttgagtggatccgcgatttctgggatggcccgatggtgatcaaagggatcctcgatccggaagatgcgcgcgatgcagtacgttttggtgctgatggaattgtggtttctaaccacggtggccgccagctggacggtgtactctcttccgctcgtgcgttgcccgctattgcagatgcggtgaaaggtgatatcgccattctggcggatagtggaattcgtaacgggcttgatgtcgtgcgtatgattgcgctcggtgccgacaccgtactgctgggtcgtgctttcctgtatgcgctggcaacagcgggccaggcgggtgtagctaacctgctaaatctgatcgagaaagagatgaaagtggcaatgacgctgactggcgcgaaatcgatcagtgaaattacgcaagattcgctggtgcaggggctgggtaaagagttgcctacggcactggctccgatggcgaaagggaatgcggcatagtcgtttgagccccctcaccctaaccctctccctcagggagtggggaccgttcggcgctgtatgtactccctcactctgaaacgacaccgcactctttttttctccctcgcccctccggggtgaggggaaaaggccgcactgctcaccaattttctgctatcctgcccccgcactaagggggcagtatgctaaacatcgtactttacgaaccagaaattccgccaaatactggcaatatcatccgtctttgcgctaataccggctttcgtctgcatatcatcgaaccgatgggatttgcctgggacgataagcgcctgcgccgcgcggggctggactatcacgagtttaccgccgttacgcgtcatcatgactttcgcgcgttcctcgaagcagaaaatccccagcgcctgtttgccctcaccacgaaaggtacgcctgctcacagcgccgtaaactatcaggatggcgattatctgatgttcggcccggaaacacgcggcctgccagcgagcattcttgatgccctgcccgctgaacaaaaaattcgcattccgatggtgccggacagccgcagcatgaacctgtccaatgcggtgtcagttgtggtgtatgaagcctggaggcagctgggatatccgggagcgttgttgagagattagttactgtatgccggatagatgattacatcgcatccggcacgatcacaggacatcagatcccatccccatactcaaatgtatggttaataccgttgaaatgctggtccatatccattgatggcttatcgctgtctggtttaccgacaatacgagccggaacgccagcggcggttgtatgcggcggcaccggttgcagcaccacggaacctgcgccaatcttcgcgccgcgaccaacttcaatattgccgaggattttcgcgcccgcgccaatcatcacaccttcacgaattttcgggtgacggtcaccaccagatttacccgtaccgccaagcgtcacagattgcagaatcgatacgtcgttttcaattaccgccgtttcacccacaacgatgcccgtggcgtggtcgagcataatgccacggccaatttttgctgccgggtgaatatcgacctggaacgtcacagaaacctggttttgcagaaagattgccaatgcgcgacgcccctgattccacaaccagtgaccgatgcgataggcctgcaaggcatgaaaacccttcaggtataacaacggggttgagtatttatcgactgccgggtcgcgggtacgcaccgcctgaatatcacaggccgcagaggcgatcatttccgggtcagcggcgtaggcttcttccaccacttcacggatagcaatagcaggcataattggcgatgacagcttgttcgccagcatgtagctcagtgcactaccaaggttttcgtgcttgagtagcgtcgcgtggtaaaaactggccagcattggctcacagtccgccagcgttctggcttcggctttaatattgttccagacaatttccagttcttcacacgacattgcttactccacacgatgagataatgaccggcccgttctgcgcgggccgggtcatagcggtaacaaaggttccctggggttagtggctgctgcgctcgtccttgcgtgcacgacctaataacgtcaatgctgcctcgcgcgcgttttttccgcaatataatacttgataaatttcctcggttattggcatttcaacgccgaagcgatgcgccagttcgcggacttctttcgtattgcggtagccttccaccacctgaccaatcttctcctgcgcgctttgtacatccatgccctgaccgagcatcatgccaaaacggcggttacgcgactggttgtcggtacaggtaagcaccagatcgccaagccccgccatgcccataaaggtggcaggatcggcacccagcgccgcaccaagacgcgacatttcagccagcccacgggtgatcagcgccgtacgcgcattcgcaccaaaaccgataccgtcggacatccccgcgccaatggcaatgacgtttttcaccgcaccgccaagctgcacaccgatgaaatccgggttgctgtaaacgcggaaacttttgccacagtgcagcaattgttggagatcatcggcaaaggtctggtcggtagaggccaacgaaatagccgtcggtaaacctgccgccagttctttcgcaaacgttgggccagagataaccgccagcggaatttgatcgcctaaggcctcacgcgccacgtcctgtaacagacgtccggtttccgcttccagccctttggtcgcccacaccagacgcgcatcaggacgcatcagcggtttaatctggcgcagcacttcaccaaagacatggctgggtacgacgacgagaatattacggctggctgccagcgcagtggcgagatcgctttcaagatggagcgtatcgggaaaaggcacatcggggagaaacgcggcgttacagcggtcgcgttcaagcgttgcgatatgttcagggtcatggccccagaggacaacctcgtggccatttcttgccagggtaatggcaagagcggtgccgtacgagccggcaccgatcacagtcattgaagcattacgttggttcatcaggcatcctgatgttcttcagtaccttcgccagcctgctgctgcaaatagttcatgaacagcgcatcgaagttaaccggcgcaaggttcagttgcgggaatgtaccgcgggataccatgctggtgatgcactcacgagcatacgggaacagaatgttcgggcagtatgcgcccaggcaatgtgccatctgggtgccttcgatacccgcgatggagaaaataccgccctgctgaacttcacacaggaacgcggtttcttcgcccagggaggccgttacggtaacacgcagtaccacttcgtatacgtcatctgccagttgggaagatgccgtatccagatcaagtttaacttctggttgccaatctttctggaaaacgtgcggcgcgttcggcgcttcgaaagagatatccttggtataaatacgttggatctggaaagtcatttcagtgttgttttgttctgacatgtgtagaaaacccttaagtgttgtccttaaatactgcgcaatgtaatgccaacgttcacacgttatttcagcaggggatccagtccaccacgtgcatccaatgcatacaagtcatcacagccgccaatgtgctgtgcgtcaataaaaatctggggaaccgtggtgcgaccgctgcgtttgatcatctcttcacgcttggcggcattgccatcgatcggcagctcctggaaactcacgcccttgctgctcagcagtgcttttgcacgatggcaatacgggcaggtttctttggtatagatttcaacattggccataaattagctcctgtttttttaccctgaaatttcatgttgcagggcggcagcaaaatggagtgtccccagaagcttataacaataagtcgctgggggcctaattgcagctaacggcctgcatcatgaaagacgacaggtaaattatttgccgcgcaccagaggcaagttttcgccagcccagccagcaacgccctctttcagcacgaatacttgcgcaaaaccagctttcgtcagcgcgtttgcaggctcctggcactgcatgccagaaccgtctaccacgataaccggtttgtctttgtgcttctcaagctcaccaacattgttggctttgatttcactcggcaacagattgatagaacctgcgatatggcctttacggaagtcatcacgctgacgtaaatccacaaccacagcgtcttctttgttgatcagacgcgtagcttcaccacgagtaatcaccttcactttcgaggtcaggctcttaaacgtagtcacaagaaccgccaccagtaacgcgatccaggcgatactcagtatgggatgacggccaacaaattgcataatttcttgcatggggggtaacaactcccgacgtagtgattaaaaaaaccaggaaaggagtatacctgcgcggtgcggcaaatacagccagcgcgttaactggaatgcaattttgcggggcacgacgaaaaaaagcgcaaatctggcatcggcttgccgcgagcggtcgtatattttgatcttcagaggctattttatcgattcagctgtagtaaaattacgcaaattttgactcttgagtatgaggttgtcgcaatgtcggtttctaaaaaacctatggtactggtgattctggatggctatggctatcgtgaagaacagcaggataacgccatttttagtgctaaaaccccggtaatggatgcactgtgggccaatcgtccgcataccctgatcgacgcttccggtctggaagtcggtctgcctgaccgtcagatgggtaactccgaagtaggccacgttaacctgggtgccggccgcatcgtgtatcaggacctgactcgtctggacgttgaaatcaaagatcgcgctttctttgctaatccagtgctgactggcgcggtagataaagcgaaaaacgcaggtaaagcagtacacattatgggtctgctctccgtaggcggcgtacacagccacgaagatcacatcatggcgatggtagaactggcagctgaacgcggcgcagaaaaaatctacctgcacgcattccttgacggtcgcgacaccccgccgcgcagtgctgaatcctcgctgaaaaaatttgaagagaaatttgctgcgctgggtaaaggccgcgtagcgtccatcattggtcgttactacgcgatggaccgcgataaccgttgggatcgcgttgaaaaagcctatgacctgctgactctggcgcagggtgagttccaggccgatactgccgttgctggtttgcaggcagcttatgctcgcgacgaaaacgacgagttcgtgaaagcgaccgttattcgtgcagaaggtcagccagatgcggcaatggaagacggcgatgcgctgattttcatgaacttccgtgctgaccgcgcgcgtgaaatcactcgtgcattcgtgaacgctgatttcgatggcttcgcgcgtaagaaagtggttaacgtcgatttcgtgatgctgaccgaatacgccgctgacatcaaaactgcggttgcttacccacccgcttccctggttaacaccttcggcgagtggatggcgaaaaacgacaaaactcagttgcgtatttccgaaaccgaaaaatatgcccacgttactttcttcttcaacggtggcgtagaagagtcgttcaaaggcgaagatcgcattctgatcaactcaccgaaagtggctacctacgatctgcaaccggaaatgagctccgcagagctgaccgaaaaactggttgcggccatcaagagcggcaaatacgacaccattatctgtaactatccgaacggcgacatggtaggtcacaccggggtgatggaagcggcggttaaagcggttgaagcactggatcactgcgtggaagaagtcgcgaaagcggttgagtccgtgggtggacaactgctgatcaccgctgaccacggtaacgctgaacagatgcgcgatccggcaacgggtcaggcacacacggcacacaccaacctgccagttccgctgatttatgttggtgataagaacgtgaaagcggttgaaggcggcaaactttctgacatcgcgccgaccatgttgtcgctgatgggtatggaaatcccgcaagagatgactggtaagccgctgttcatcgtggaataatccctccccatgaggggaaaggcgattaataccatgacacgggccgtgaaaccgcgcaggtttgcaatcaggcccatcatctacgccagcgttcttagcgctggcgtattgttgtgcgccttttccgcccacgcggatgagcgtgaccaactcaaatctattcaggccgatatcgccgcaaaagagcgcgcggtacgccaaaagcaacaacaacgcgcaagcctgctcgcacaattgaaaaagcaggaagaagcgatctctgaagccacccgtaagctgcgcgaaacgcaaaacacgctcaatcaactcaataaacagattgatgagatgaacgcgtcgattgccaaactggagcagcaaaaagccgcccaggagcgcagcctcgccgcgcaactggatgccgcattccgtcagggcgagcataccggtattcagctaattctcagcggtgaagaaagccagcgtggacagcgtttacaggcttatttcggctatctcaaccaggcgcgacaagaaaccattgcccagttgaagcaaacgcgtgaagaagtcgccatgcagcgtgctgaactggaagagaaacaaagcgagcaacaaacgctgttatatgaacagcgcgcccaacaggcgaaactgactcaggctctgaacgagcgtaaaaagacgctggcggggctggaatcttccatccagcaaggtcagcagcagctaagtgaactgcgtgccaacgaatcccgtctgcgtaacagcattgcccgtgcggaagccgcggcgaaagcgcgtgctgaacgagaagcgcgtgaggcccaggcggttcgcgaccgccagaaagaagcgacgcgcaaaggcaccacctataaaccgaccgaaagcgaaaaatcgctgatgtcccgaactggtggcctgggtgcgccgcgtggtcaggcattctggccggttcgcgggccgacgcttcatcgctatggtgaacagctacagggcgaactacgctggaaaggaatggttatcggtgcctctgaaggtactgaagttaaagcgattgccgacggtcgggtgattctggctgactggctgcaaggttacggtctggtggtggtggttgagcacggtaaaggcgacatgagtctttacggctataatcagagcgcactggtgagcgttggttcgcaggttcgcgcgggccagccaattgcactggtgggcagcagtggcggtcagggtcggccttcactctatttcgaaattcgccgccagggtcaggcggtcaatccacagccgtggttgggaagataagttttgtttccatttcgtcgtaacgttcttgcatttgccgctctgttggcgctctcctcccccgtacttgctggcaaacttgccatcgtcattgatgattttgggtatcgcccgcacaacgaaaaccaggtgctggcgatgccctccgctatctccgtcgctgtattacccgattcaccgcacgccagagagatggcgaccaaagcgcataacagcgggcacgaagtgttgattcatctcccgatggcaccactgagtaaacagccgctggagaaaaatacgctgcgcccggagatgagcagcgacgaaattgagcgcattattcgtagtgcggtcaataacgtgccctatgccgtggggatcaacaaccacatgggtagcaagatgacctctaacctgtttggtatgcagaaagtgatgcaggcgctggagcgttacaatctttacttcctcgacagcgtaaccatcggtaatacccaggcgatgcgcgccgcgcaaggcactggcgtgaaggtgatcaaacggaaggtattcctcgacgattcgcaaaatgaagcggacatccgtgtgcaatttaatcgcgcaattgatctggcgcgtcgcaacggttcaaccattgccattgggcatcctcacccttcaacggtacgcgtgctacaacagatggtttataacctgccgccagacattacgctggtgaaagccagcagcttgctgaatgaaccgcaggttgatacgtctacaccgccgaaaaacactgtgcccgacacaccgcgtaatccgttccgtggcgtgaagctgtgcaaaccgaagaaaccgatagaacctgtttatgctaatcgcttctttgaagtattaagcgaaagcatcagccagagcacgctgatcgtttacttccagcatcagtggcaaggctggggcaaacagcccgaagcggcaaaacttaacgctagcgcaaattaaaggcgctacgcgtaatgcgatggtgcgaccgcgttttgtcgcgccattgccataagcggaaagaccacagtaacgcctggtaacccaccttcacgctgcgcacattggtaatcaggcgtttatacataccggaagtaaatatctcggcaatcatccgttggcgggtaagaatatccggctctttgcgcaccgcatggcaaacacgcaatgcttcgtaagttatttgctgatgaaattccggataaatcgtaattttgtcggcataatttcgatttaatttctccagcaggcgggtaatcttaatatagtgacgttgataattaaggtttttattcccttgtctatgcaaccgactcactgacgtattatgcagataatatttatataatgattgctcggtatatcgcgcacgcagcgcattaaacatgaattctgttgtccagacaatatcctgatgatgtaatccggcaataaatttaatgttatttttaacaataacatcgcggcgataaacccccatccagacaacgtgagtccaacggcgcgaagaaagccccatccgcagccagtccgggccggttaatacaccggttgagcgaaggcgatcgctggggatggattgccaggtttctcccgtttcacgaaaagaccagtcagcgttgcactgcgccacgtcgaggtcgtcctctaacgctatggtcatcagcgtttcgtacatggtgggatagacttcatcgtcagcatcgacaaaagcgacatatttgcccgttgccacttcaatcccacgattacgcgccaccgatgcgccagcattcgcctgatgcaacaaacgaacgtgcggatagttttctgcgtaatgctttgctatttcaacagaattatccgttgaaccatcgttaataataatgatttccagagcagtccaggtttgcgtaattaaagattccatacaagtgcggaaatcatcgcccgcattatataacggaataataacactaagtttattggtgctgttcatcataaattaccgacgacctctgaagttatcctgacgttttacaggctttgtattaagaaactattaagcctgtgagatattatttttacaggtgagagagtcacttcagggtagagagataatgagagcagctatataagagatcagcgcaattacgatatctttattacactgacaggattttacatatttaacggattatcctcaggcaaaagggctggaataccagcccttgttcgtgttaatcccaactcagaattactttcccggactggcccgaacgcatagcgtcaaagcccttctggaaatcatcgatagagaaacgatgggtaatgatcggcgagagatccagacctgactgaatcagcgccgccatcttgtaccaggtttcaaacatctcacgaccgtaaatacctttaatgaacaagcctttaaagattactttggtccagtcgatagacatatcggacggtggaatacccagcatcgcaatacgaccgccgtggttcatggtatcgagcatggtacgaaacgctggcggcgcgccggacatttccagaccgacatcaaagccttcggtcatgcccagttcagccatcacatcattaaggttttctttcgcgacgttaaccgcacgggtgatacccattttgcgcgccagctcaaggcggtattcgttaacatcggtgatcaccacattgcgtgcaccaacgtgtttcgccaccgccgcagccataatacctatcggacctgcaccagaaaccagcacatcttcgcccaccagatcgaacgacagcgcggtatgcacggcgttaccgaagggatcaaaaatggaagccaggtcgtcggagatattgtctgggattttgaaggcgttgaacgccgggatcaccagatattcggcgaagcagcccggacggttaacgccgacgccgatcgtgttgcggcacagatgggtacgaccgccacgacagttgcgacagtgaccgcaggtgatatggccttcgccagaaacgcgatcgccgattttgaagcctttcacttcctgaccaatacctaccacttcaccgacatattcatggcctacgaccatcggcaccgggatggttttttgcgaccactcatcccagttatagatgtgaacgtcagtcccgcagatggctgttttacggattttaatcagcagatcgttatgcccgagttccggtacaggaacgtcggtcatccagatgccctcttccgctttcagtttggataacgctttcatctcacatcctcaggcgataacgcccagttgtttaccaatacgcgtgaatgcttctactgcacgcgtaatttgctcaggggtatgcgccgcagacatctgggtacgaatacgcgcctgacctttcggaacgaccggatagaagaaaccggtgacgtaaatgccctctttttgcagctcacgggcaaatttctgcgccactactgcatcgccaagcatgaccggaataatggcatgatcggctcccgccagggtaaagcccgccgccgacatttgctcacggaactggcgcgcgttcgcccacagacggtcacgcagttcgctgcccgcttcgaccatctccagtactttgatggacgcggcaacaatggccggtgccagcgagttggagaacaggtacggacgagaacgctggcgcagccactcaaccacctctttgcgcgccgcggtataaccaccagaagccccgcccagcgctttaccaagtgtgccggtgataatatcgacccggcccatcacatcgcagtattcatgggaaccacgaccgttttcaccgacaaaaccgaccgcgtgggagtcgtctaccatcaccagggcatcgtatttatctgccagatcgcaaacgcccttcaggttggcaatcacgccgtccatcgagaacacaccatcggtggcaatcagcacatgacgcgcaccggcttcacgcgcttctttcagacgagcttcaagctcctgcatatcgttgttggcatagcgatagcgtttagctttacacagacgcacaccatcaataatagacgcgtggttcagtgcgtcggagataatggcgtcttccgcgcccagcagcgtttcaaacaggccaccgttagcatcaaagcaggaagagtagagaatcgcatcttccatccccaggaatgccgccagtttttgttcaagctctttatggctgtcctgagtgccgcaaataaaacgcaccgaagccatgccgaaaccgtgagaatccattcccgcctttgccgccgcaatcagatacggatgattcgccagcccgagatagttattggcacaaaagttaatgacgtggcttccatcagccacagtgatatctgcttgctgcgcagacgtaataatgcgctcttctttaaacaacccttccgcccgtgcggtttccagatcgttggttaactgctgataaaattctccacgcattgcgattctccagacagggcaaattccagcacatattacccaaacttataggtcgcgacgagatgacgcgttaacacttctgcaaaattcaggataaataacgtgtaacttgatgtctctcaacacctacagatagtagaaaaactgtacagttttggctgggcataatgatgattgattttactgcattgatataaaaagaaaaaatgatgccaaagcatcattttcctatctcagttggtatcaaaacgctacccactaatggagggaaacctattttcttgaaaggaaaattctcagcgcctgcatttttgcccctaaagtgttactcctgaagcagcgaaacaaatcgaaccattttcctctccccagatagtttaggttgaagagatcggggcgtttgtaatagcacatgacaaaaatgccctggtcatcatccacaatgttattatttagtgttattttttgactttccagaactaatttatagaattctttccatttatgctgtgaaccaacaattgcgcccccaataatatatacatgattgccaatcatgaaatcaaaaacctgttgttgagatgtgacagtaagccctttttttatagtgaaaagatgcatcttactttcatcaaatgggaaatcccaaattttcaatcctcgagttacatttggcttacggcaatagccaaaatctatccacgcaacaagaggcgttttcactaagcccatgttgatagctttatttacaaaataggccttaaggttacataccaaaacatactctggtgaccagtactctgggttttttaattgtcgaggctcaagtctatttgtaaacgactcatctttttgaattttttcgatacgacttctgatatatctaaatttcttttttatatcgataacgataaccgttgttggttttccgttgcgaatcgcttcaacccttggtttcaaatcgggagaagtgaaaataatcatctcattttcaagtgcggccagacgctcaaagtaactaaaataaacatcaactgaacgagctagtttttcacggaaccctttattagcagtccaatcccctctaccaatgtcaaaatatgcagtgataattgtggtggatgatttcattactaataagaccattaatataaaaaaagaattatatcataaatattaacagaatgtatactgtatattatccattcaaatgcttccgttatttatcatacatcggaatattgatactaaagcactattcacatgcaaaaccaacatccgccatgaaggactagctaaaagccaaactagtttgttgcaattagcatccttgcacctctatgtaaagggctgaagggattcggatgtgatggtatgattacagacattcgtgtctgagattgtctctgactccataattcgaaggttacagttatgatcatcgttaccggcggcgcgggctttatcggcagcaacatcgttaaagccctgaatgataaaggcatcaccgatattctggtggtggacaacctgaaagacggcaccaagtttgtgaacctggtggatctgaatatcgcagactatatggataaggaagacttcctgatccagattatggctggcgaagagttcggcgatgtcgaagcgattttccacgaaggcgcgtgctcttccaccaccgagtgggacggcaagtatatgatggataacaactatcaatactccaaggagctgctgcactactgcctggagcgtgaaatcccgttcctgtacgcttcttccgcagccacctacggcggacgcacctccgactttattgaatcccgcgagtacgaaaaaccgttgaacgtctacggttactcaaaattcctgtttgatgaatatgttcgccaaatcctgccggaagcgaactcgcagattgttggcttccgctatttcaacgtttatggaccgcgtgaaggccataaaggcagcatggcgagcgtcgctttccatctcaacacccagcttaataacggtgaatcaccgaagctgttcgaaggtagcgagaactttaaacgcgacttcgtctatgttggcgatgtggcagatgtaaacctgtggttcctggaaaatggcgtttccggcatcttcaacctcggcaccggtcgtgcggaatccttccaggctgtagctgatgctacgctggcttatcacaagaaaggccagatcgaatacattccgttcccggataagctgaaaggccgctaccaggcgttcactcaggcagatctgacaaatctgcgcgcggcgggttacgacaaaccgttcaaaaccgttgctgaaggtgtaacggaatacatggcctggctgaatcgcgacgcataagagctctgcatgaaaatactggtgatcggcccgtcttgggttggcgacatgatgatgtcgcaaagtctctatcgcacgctccaggcgcgctatccccaggcgataatcgatgtgatggcaccggcatggtgccgtccattattatcgcggatgccggaagttaacgaagctatccctatgcctctcggtcacggagcgctggaaatcggcgaacgccgcaaactgggtcatagcctgcgtgaaaagcgctacgaccgcgcctacgtcttacctaactccttcaaatccgcattagtgcctttcttcgcgggtattcctcatcgcaccggctggcgcggcgagatgcgctacggtttactcaacgatgtacgcgtgctcgataaagaagcctggccgctaatggtggaacgctatatagcgctggcctatgacaaaggcattatgcgcacagcacaagatctgccgcagccattgttatggccgcagttgcaggtgagcgaaggtgaaaaatcatatacctgtaatcaattttcgctttcatcagaacgtccgatgattggtttttgcccgggtgcggagtttggtccggcaaaacgctggccacactaccactatgcggagctggcaaagcagctgattgatgaaggttatcaggtggttctgtttggctcggcgaaagatcatgaagcaggcaatgagattcttgccgctttaaataccgagcagcaggcatggtgtcggaacctggcgggggaaacacagcttgatcaagcggttatcctgattgcagcctgtaaagccattgtcactaacgattctggcctgatgcacgttgcggcggcgctcaatcgtccgctggttgccctgtatggtccaagtagcccggacttcacaccgccgctatcccataaagcgcgcgtgatccgtctgattaccggctatcacaaagtgcgtaaaggtgacgctgcggagggttatcaccagagcttgatcgacattactccccagcgcgtactggaagaactcaacgcgctattgttacaagaggaagcctgacggatgcgggttttgatcgttaaaacatcgtcgatgggcgatgttctccatacgttgcccgcactcactgatgcccagcaggcaatcccagggattaagtttgactgggtggtggaagaagggttcgcacagattccttcctggcacgctgccgttgagcgagttattcctgtggcaatacgtcgctggcgtaaagcctggttctcggcccccataaaagctgaacgcaaagcgtttcgtgaagcgctacaagcagagaactatgacgcagttatcgacgctcaggggctggtaaaaagcgcggcactggtgacacgtctggcgcatggcgtaaagcatggattggactggcaaaccgctcgcgaacctttagccagcctgttttacaattgtaagcatcatattgcaaaacagcagcacgccgtagaacgcacccgcgaactgtttgccaaaagtttgggctatagcaaaccgcaaacccagggcgattatgctatcgcacagcattttctgacgaacctgcctacagatgctggcgaatatgccgtatttcttcatgcgacgacccgtgatgataaacactggccggaagaacactggcgagaattgattggtttactggctgattcaggaatacggattaaacttccgtggggcgcgccgcatgaggaagaacgggcgaaacgactggcggaaggatttgcttatgttgaagtattgccgaagatgagtctggaaggcgttgcccgcgtgctggccggggctaaatttgtagtgtcggtggatacggggttaagccatttaacggcggcactggatagacccaatatcacggtttatggaccaaccgatccgggattaattggtgggtatgggaagaatcaagtagagtgtcgttctacaagtatgtctcttgcagatttgccagctcaaaccgtttttcaaaatttaaatcttgaaataataaccaataagttgacatcggagataagatgacctcaacattatttttctctctcgagaaaaaaactggatagcgtactggaacagagctctcgtattcttattcattaccacctattttttgggtgggattacaaggtataaacatcttattgttattcttatgacaataacgacaatcgtctatctctgcaaacggccaaaacactatctctcactatttaaaacatttctttttggtagtgttgccatattaactattgctgcattgctgtcacttcttcaatcccctgatgcaggtgctagcatgaaggaaattttcaaagctattattgagaatactttactatgcacaatagcaataccgatcatattgagagacgagaaaagagaagatgtcgaaaaaatcgttttcttctcatttattagtgcgttgggcttacgctgtttttctgaattgattacctattataaggactatcaacaagggataatgccattcgcagattatagacaccgtagcatttctgactcgatggtctttttattccctgcattgttaaatctctggcttatcaaatcagcaaaataccgcatttcttttgtggttctaagcgttatttttatttttctgatattaggaactttatccagaggggcctggctttccgtgttagtcattggattaatatggattctgatgtttaaacaatggaagttactattagtaggagtaatggttgccatcattgcattgtcggttattttcacacataaggagatgaccgcaaagctaacgtataaacttcaacaaactaatagttcttatcgctatgcaaatggtactcaaggcagcgcactcgatctaatattagaaaatcctgttattggttatggttacggtaacgttgcatataaagatgtctataataaacgtgtcattgattatccagaatggacctttagacaatcaatagggccacataattttgcgctattcatctggtttggcactggtttattagggctggtaagtcttatgatgctatactgtgcaatattgaaagagtgtataaaaaatggcgtcaagaataaatatcgctcaccatataatgcatattatataatcttactatcttttataggttattttgttatccgtggaaacgtagaacaaattgaaccaaatttattaggcgtttacgccggcttattattagcgatgaaaaacaagtaaaaaataaaaaaggctgcataatgcggcctttttatttattcaaaccaattatgaataacctcttcgaatctttgagttacgccatcccaactgtagtgttcaaacacaaagtcctgaccttgctttgcaactgctgttaattcaggattcgctaacgtttttaaaatatcgctgcttatggagtctgcagtcataggttcttttaaatggaatcccgtagtattttctttgacaaattccgtcatccccccacgcgtactcactaaaacaggcttaccagcacccatagcttcaattgccaccatgcaaaatggttcctggaactgggaaggaatgacgactaaatctgccagtgggtaataacaatgcatcttttcaggcggtatgcttcctaacataatgcaacgatccttcaaacgttttgcaatttccctgacattgcgttgatatgcacctttgtcacttttactcatttctgtataatcaccaatcacaactaattttaaatttttgtgagcagcggccaatttttcgaatgattgcatcaacagcaatatgcctttgtcagggacgatacgcccagcataaaaaataattttctcttcaggggagatattaagttcgcttctagtgatcggctgaaaattagattgataggtttctaaatcaattccatttggtacaatctcaatatctgcatttgctaaataagattggtaatactttttcaagtataaactaggcactatcattttaacattttgctcaagcaattttggttcaaatgcattatgcatatgtataaccactcttgcctgaggagctcgcttacgaatttgagtgtatagcttcatgctattatgaactacaataacactttctttcgttataggaaaatcatgtgcaatattcaatattctctgtgaatatggaagaggatcaagtcttgtccatttttgaaataaccgcttatatatgcgactgaatccaaccctatgaatactacaattatcattaacaaaggtgtaatttgagtatcctggatttttgatacaaacaatacgatttggaaaattggtacgctgagcaacctgatacatccacgtttcaacagcagccgctccgcgaggaggaattgaaaaaataggagtaaccgtaaatattattttatcaaccatctcgtatattaacctttcataacattatatttaattgctgtaaaaacaccatcgagaaattttttctggtaaagcaagtgtttatatttttctttgtactcatgttttttaacagcttttttataaggtatatttctccatggtgatatattataaatattacgaaaataatctgcagaggcgtagttcgcccaatcatgccatggcttagttataccagtataatgtatgaaaacagtgtcatcattaataaaccgggtgtaatattcactatttttttcttcaaattctgactttatagtataaatacaattatatttyyysgktwawtattttagcaatgatgtagaaacattaagtttaaaatatcttgatccgggtactttaattttttataattgactcatctgataatagatcaaagaatttttccgttagtctttgttttaaccattcccgtaaattaatatacattacaccagagttaaaatagctaccgttaaaatcctcattacacaaacgctcagcgcttttactttgcatagcatctacatcaattaccactgccccatattcatctttaaactctaatgctattaactcgttcaatgaacccttacagacgatatcagcatcaagatataataatgaatccaatcgcgcagaaaaataatcaaatgaaagcaaacgataataaatagatactggccagatatttgattgaggtagcgccttcaatggctcagaatcaatatgatataatttaattactgtttgatacttcgttgctaattgtgataataattcaatatactctttgtctaagtaatcagcgattatgtgaaaggtaaatttgttttgtttattattttcaagaattgaagcaattgaaatcgcagccccaacctggtagttctcatcaataccccatgagacattaaacgtttcccgttcatcaagtttaacggggcgcttgtccagttcaattatatctttaaattgagtaagatgtttaaaatccaatttaattacccttcatcataatcattatttgctctttaatcctagtttgacttttacatccctgattacttttttaattttctttttgaatataagatatgtatagccaaagtctttcaattcattttttatattatagtgccgttcaagatcaatgcgatcttttgcttttaaaacagcggttgtttttttacctgaaaggtcaattagtcttaaacctttttcggatactataaaatttcctttatgaggatcgccagacaccattccatgctgatgcaactcttttatcgattctgataattgatccttcagatcttcagaaatttccaaatactcatttaacccgacaccttcaatatactcaatgagcataatataataatgagcgaaatttaatgttttacgttcagctagcaaaaaatagtcattaattgattggatgccttcaccacgtacccgatcggtttgataaattaaattttcataataatctttttttatgcaagattttaagaaacgttcggtcattttatgctttggcgcataaactttaagtacaagaggtccacgagcagtgtcaataagaatgactttagtatcatcaatcgaacgaaaaacttttaatgttttaaccctgcaagttaaaaagtcatttagaacttgctcataaaagggatcattatcttttatgaaaactttcaacccatttatcgttttattatatatcataatgaattattttaaccttaaatctttagaagcatttttctttataatactttaaataattaaaaatgcctgccatataatgcttttgtttaaatttatgttttgcacaataccgatactgattgctatttacaggtttaagtaaatcttctttactccacggagaagctgctttggcgatcaaaaaactacgtgacaccggatagtcagcccactcatgccagggttttgtaggtcccacatagtgtataaacacggtgtcatcattgactggattatcaactttgtcttttaattcatagttaatactatatcgggtattatatttctccgaaataaacttcactttaccattcaataatacattcagtacatcttgatcaaggtgggtgattttacttacccaatctgggtcacgcaacatttcaatagcttttgacgaaatgttatttagattccactcatcaatatttatcagtaaaaaaccagcattgaaatatccagaagctaactgtggtgtagttaataccgaggctcgattttgccaccattcaacatctctttcagctacaactgcggcaatttcattagtagaaaattgataatctaagagttctttaatactacccttgcaagcaatatctgcatcaagatatagtattttttcatgtttatgatagaaataatctgcaattataaatcgaaaatatgttgcgtaagtccagtttttcgtgcttggtaatgacttcagcttatcacaattgataacataaatattaattcttgaattatattgttttgctaaatcagaaaaatataatttgtctttatcactgatataatctgtgaaaacatgaaattcacaagagatttctctattgtttaatagaatagatgcgatggctacaccacatccaaaaagaaaatttctgtcaataccaaatgctatatcaagagtatttttagatcttatattttgataatgaaaattatactcaaaaaggatgatgtcactatcattgagttgagacatatttattctgtatccaaaattttggcaaaaataagttacgggttacaacgattttcgaatcgttctttccctgatttttgtggcttttgcttctgcttgcgacagcagtccttgttcctgcttgagaatgtctttaagcggggcggcaaaatacactttcataaaccgccagatatcccgctgagtcaggccgatattcatcgaagaaaaataaagcccaataagatctttatcccgccaacgacgtggaacgcgcgtgcgaagctgcgcccggtgcaggtcaattaccgaaatttttaactcctcttccttaccggaaaaaggcaagtgcagcaggaaatgacagatataacagtcacggtggttaatgcccgcagcatgcatatcgcgcaccatcgtcgcgacacgcttaataagcatacgctttacgcgaacatctggagggttagtcgcccagtcagcactgtaatcttcaagacttatggttggtgtcagatcttcggtaataataaatgaagttctggtcagcggattcatgcctttttcgccaaatgccaccccatacatagtatcaacgccgacatcccgcagtcgatgaatcgcattccattcgcggtcagcgcctaatactggcatccgcaatgagagtaaatttttgattatctctttcagggtcgtgccgcgatgccatttgagaaaatagcttttgcccgccatttcaaagcgcagagtacggcgagtttccagttcacgaaatacctcaccctgcaaggttttaacttcctcaaaaggatctttgccgcgccataacgtggcaaacggctctttaagttcaaccatccagaccacccgttatgatatccgccgctttctctggcagactgtataaatcttgtgtatcagcataatgtcgcgcattttccgcccaggcctggcgcaatgaagattgcgttaacgctttgcgtaaaatctcattcaatgtttcctggcggaatggctcagcaatagcctcgccgcaattagcgtcgacaatataatgcgcatagccacaaacggctgttgttagtaccggtaatcctgcagtaatcgcttccagcagcacaattcccgccgcttcctggtaggcaggatgcagtaataaatccgccgccgccattaattccgagacatcattgcgccccgagaaaaagtgaacattactgcgcacgccgcgtttttctgccagcgcctcaaattttcgcggtttatcctgcccaacaacatatagcaatgtgttgtggcgcagcgaatccggtaacgaagcaagtgcttcaatggaacgatcgacacctttacgcgtgaagtctgaaccgacctgcaacaataaatattgttgttcggttattccattcttcttacggaagatttcacggctattggctggctgctggctatatttacgatcaggataaatccccggtggcagaatatgaaaacgctccgcttcagtctgataatgtttctggaaatcggcgatttgcttatctgtcagcatcagcagctgtgtcggcttgccctgttcgaaggttgcccgctcaaaggcggcataatggcgataacgtgacgtcaggcgatagaaaaagcctttttcctgcgctactttctcggcataacaaacatcagcggcataataaacgtccagccccggcattttgttgaatccaacgactttatcgacgggatgttcgcgtaaatgtttttgcacccaggcaaaatactccgcattgcgcccgtgattggtatgcgatttaaccggcactttgatcagttcaaatacatcagggcattcgccttcccacgactgggtataaacccgaacatgatgacctcgggcggcgactgtctgagcaatacgcataaaatcacgctgcaaaccgccaaagggaaaatatttatataaacaaaaagcaacgatcataacgacgtacctgtcgtggaggagggcagtaatttatcgacagcagcaatgacatctgccgccggaataaccgaaagatacatctcatttcggtcacgctgatcgcgcgttggcatttcccggtaatctcccgcccagaattgaatcatgttatttgaccagggacgccagaaaatatgatctgtcgcaccaaacagcgatatcagcggcgtattaactgcagcggcaatatgcgccggtgcggaatcaacgccaataaacagctgcgcatgatcgattaacgcaccaagttccgggaaggtcacctttccagccagcgccgttactggtggcgtctggcatccctgcgcaatttcattgacgcaggccagatcgtctttatctgggccggacgtcagaacgacttcataaccacgagcatgtaaggcatcaatcacagcggaaaacttggcgttgtcccagcatttgaagatttgccgcgccgtaggttggataaccacataattttgtccaacaccagcgtgatcaagttcgcgacgcatacgtttccagcttgcaggcgggtaactcatggttgtctgcttcaccaacgaatcaagtcccaatggtgtcagcacggataagttactttccaccacatttccaccctgcaacggcaccaaatgggtgaaacttttacgccaaaaagcagactgccgatgatgataatcctgggaaattttcacacgagcatttaataagcgaaccagtatagcaaccatccattgatcggtaagattgacgataaggtcatacttattggcacgtaataccttgatgagatgaaaaaagttggcaattttttctgaggcttttgcttttttattttttatgccgtagagcgcgttaatctctggattttcagacaggatcgggatggtgtcctgataaagcagcacatcgatttttgcgtcagggtaattttttttcagcgaactaatgacgggagtagttaataacatatccccatgaaaacgcatcttaatgagcaaaattcttcgaaatggcttatccacaagtaactctttttgttgagattatccgattaaggtgaagcagaaaaagcacgctaccgccccaggctcaacagctacctgaatactgataccgcactgatattgacgcgctagtgtatcacttctttcgcggcaatccgacccgaatgatttttaagcacattgttgattttcaataaagaaatcaatcaaataaaatcattagcaaccatattctttcactgttgctctgcgattccttcctgcacgtacagcagaaatcaatgaatcgcataaaaatacaaaaaaagtatagatgttcagcaagaattggcgggtaaattgctatttaagtcaaaaacgggaaaagtaatggtaaagccacagctaaatacatagaatccccagcacatccataagtcagctatttactatgctcgaattgctttacaccgcccttctctaccttattcagccgctgatctggatacggctctgggtgcgcggacgtaaggctccggcctatcgaaaacgctggggtgaacgttacggtttttaccgccatccgctaaaaccaggcggcattatgctgcactccgtctccgtcggtgaaactctggcggcgatcccgttggtgcgcgcgctgcgtcatcgttatcctgatttaccgattaccgttacaaccatgacgccaaccggttcggagcgcgtacaatcggctttcgggaaggatgttcagcacgtttatctgccgtatgacctgcccgatgcactcaaccgtttcctgaataaagtcgaccctaaactggtgttgattatggaaaccgaactatggcctaacctgattgcggcgctacataaacgtaaaattccgctggtgatcgctaacgcgcgactctctgcccgctcggccgcaggttatgccaaactgggtaaattcgtccgccgcttgctgcgtcgtattacgctgattgctgcgcaaaatgaagaagatggtgcacgttttgtggcgctgggcgcaaaaaataaccaggtaaccgttaccggtagcctgaaattcgatatttctgtaacgccgcagttggctgctaaagccgtgacgctacgccgccaatgggcaccacaccgcccggtatgggttgccaccagcactcacgaaggtgaagagagcgtggtcattgccgcacatcaggcattgttacagcaattcccgaatttattgctcatcctggtaccccgtcatccagaacgcttcccggatgcgattaaccttgtccgccaggctggactaagctatatcacacgctcttcaggggaagtcccctccaccagcacgcaggttgtagttggcgatacgatgggcgagttgatgttactgtacggcattgccgatctcgcctttgttggcggttcactggttgaacgtggtgggcataatccgctggaagctgccgcacacgctattccggtattgatggggccgcatacttttaactttaaagacatttgcgcgcggctggagcaggcaagcgggctgattaccgttaccgatgccactacgcttgcaaaagaggtgtcctctttactcaccgacgccgattaccgtagtttctatggccgtcatgccgttgaagtactgtatcaaaaccagggcgcgctacagcgtctgcttcaactgctggaaccttacctgccaccgaaaacgcattgaggttgttatgcaaaaacgggcgatttatccgggtactttcgatcccattaccaatggtcatatcgatatcgtgacgcgcgccacgcaaatgttcgatcacgttattctggcgattgccgccagccccagtaaaaaaccgatgtttaccctggaagagcgtgtggcgctggcacagcaggcaaccgcgcatctggggaacgtggaagtggtcgggtttagtgatttgatggcgaacttcgcccgtaatcaacacgctacggtgctgattcgtggcctgcgtgcggtggcggattttgaatatgaaatgcagctggcgcatatgaatcgccacttaatgccggaactggaaagtgtgtttctgatgccgtcgaaagagtggtcgtttatctcttcatcgttggtgaaagaggtggcgcgccatcagggcgatgtcacccatttcctgccggagaatgtccatcaggcgctgatggcgaagttagcgtagcgtttatgccggatggtatgccatccggcgcgcatgaattacttctggcactgccgacaataaaacgttgcccgctgcgcatgtttagtcgccacaatcggcgtaccgcacacccgacacggctcgccttttcgcccgtaaacctgcaattcctgagcgaaatagcccggtttaccatcactttgcagaaaatctttcagcgttgtaccaccctgctcaatcgaacgcagcaacaccgctttaatcacccgagctaacaattcacactctgccagcgacagtgatgacgccagccgatccggatggatccccgccgcaaacagtgattcgctggcatagatattccctacccctaccaccagcttgttatccatcagccacggtttaatcgccgtttttttcttcgcgcacttctgatgcagatactcaccattgaaatcgtcgctaagcggctccggtccaagatgggtcagcacattatgcccttccagctctttggtccacagccaggcaccaaagcggcgcggatcggtgtagcgcagcactttgccgttgctcatcaccaattccacatggtcatgcttttcagggggaagttcttctggaaggatgcgcaggctgccagacatccctaaatgaatgataatccagccctcaggcagctccagcagcagatatttagcccgccgctgcacgctaagcactggttggtcgcttaaacggtagatctcttctgaaaccggccagcgcaagcgtccgttgcgcaccactgcatgaagaatggttgcaccaacgagatgcggttctatgccgcggcggctggtttcaacttcgggtaattcaggcatagcatctccaggaatgaacagatgcagtcaatatgggggcaagcagataacaaaaaaccccgccggagcgaggttttttgttacatcaaagcgagaattatttgattttcgcttctttgtagatcacgtgctggcgaacaactggatcgaattttttcagttccagtttttccggcttagtacgtttgttcttcgtagtggtatagaagtgaccagtaccagcagaagaaaccagcttgattttctcacgaatacctttagccatgatttatttcctctaagtacttagtacttttcgccacgggcacgcagttcagccagaactgtatcgatgccttttttatcgattacacgcatacctttagcagatacgcgcagggtgacaaaacgcttctcgctctcaacccagaaacggtgagagtgcaggttcggcaggaaacggcgtttagtcgcgttcagtgcgtgggaacggttgttaccggtcaccggacgcttgccagtaacttggcagactcgggacatgtctattctccaaaaatcaaattagctcgagcttcgtatggggtattggcgcctcgtcaggctttacagcccggtcatcgcagttctatgtgaactctcgattgccaggcccaaatgccaaacccgagattctcaaaggtggcgtagtatacgctgactcagcgatgtgctcaagtcccgaacagacaaagatcccgaaggatcgcgcatagcgggttaaatccagccgcgttcggcaaaagaaacatactctccacgcccaatcacgatatggtcgagcacgcgtaaatccatgaactgacaactctttattatccgttcagtaatgagtttatccgctttactgggttcagcacaacccgaagggtgattatgtgcaaggatcagcgccgaggcgtttatttttatcgcttcgcggataatttcccgaggatggacttcaacatggtttagcgtgccggaaaaaagacggctatgcgttataacccggtgttgggagtcgagaaagatcaccataaagatctcccgctcctcacccgtgagctggctttgtaaaaattccctcgtcatctccgggctgagtaaagggctttcttcacgcatccgcacgttgtagtaacgccgcgccagttcagcaatcccctttaactgggcaaatttcgccacgccaattccatgaacgccactaaattgttcatattcagaggttaacaagccataaagagagccgaaattctccagcatctcttttgccagggttaatacatctttaccgcgcgttccggtacgcagaaatagcgccagcagctcgacatccgttaaggcgctaataccaaacttcagcattttttcgcgcggcatcaacagctgtgaattgtttttcaccttcacctcctttgtggtgctcgcatcctgtcatagccgtttcgttaaatcgacggccagttttcaatcctggaaagcgcctcgcaaagtgaatctcaggtgaaggcacgacaacaaaagtattgtgataaaatcgccaacttctggtgtcaccctacaggaaaaatcatcatgagcctggccggtaaaaaaatcgttctcggcgttagcggcggtattgctgcctataaaacccctgaactggtgcgtcgtttgcgcgatcgcggggccgacgtccgcgtagccatgaccgaagcggcaaaagcctttatcaccccacttagcttgcaggcggtttctggttatcccgtttccgacagtctgctggacccggcagccgaagccgctatgggccatattgagctgggtaaatgggctgatttagtgattctcgcccctgccacggcagatttgattgcccgtattgctgccggaatggcgaatgacctggtatcgacgatttgtctggctacacctgcgcctgtagccgtgctccccgccatgaaccagcagatgtaccgtgccgctgccacgcagcataatttagaggtgcttgcttcccgtggtatgctcatctgggggccagacagtggcagtcaggcttgtggtgatatcggtcctgggcgaatgctcgatccgttaaccattgtggatatggcggtggcgcatttttcgcccgtcaacgacctgaaacatctgaacattatgattaccgccggcccgacgcgtgaaccgctcgatccggtgcgttatatctctaatcacagctccggcaagatgggttttgctatcgccgccgccgctgcccgtcgtggcgcgaacgtcacgctggtatcaggtccggtttcactaccgacgccaccgtttgttaaacgtgttgatgtgatgactgcgctggaaatggaagccgccgtgaatgcttctgtacagcagcaaaatatttttatcggttgcgccgccgtggcggattatcgcgcagctaccgtggccccagagaaaatcaaaaagcaggccacgcagggtgatgaattaacaataaaaatggttaaaaaccccgatatcgtcgcaggcgttgccgcactaaaagaccatcgaccctacgtcgttggatttgccgccgaaacaaataatgtggaagaatacgcccggcaaaaacgtatccgtaaaaaccttgatctgatctgcgcgaacgatgtttcccagccaactcaaggatttaacagcgacaacaacgcattacaccttttctggcaggacggagataaagtcttaccgcttgagcgcaaagagctccttggccaattattactcgacgagatcgtgacccgttatgatgaaaaaaatcgacgttaagattctggacccgcgcgttgggaaggaatttccgctcccgacttatgccacctctggctctgccggacttgacctgcgtgcctgtctcgacgacgccgtagaactggctccgggtgacactacgctggttccgaccgggctggcgattcatattgccgatccttcactggcggcaatgatgctgccgcgctccggattgggacataagcacggtatcgtgcttggtaacctggtaggattgatcgattccgactatcagggccagttgatgatttccgtgtggaaccgtggtcaggacagcttcaccattcaacctggcgaacgcatcgcccagatgatttttgttccggtagtacaggctgaatttaatctggtggaagatttcgacgccaccgaccgcggtgaaggcggctttggtcactctggtcgtcagtaacacatacgcatccgaataacgtcataacatagccgcaaacatttcgtttgcggtcatagcgtgggtgccgcctggcaagtgcttattttcaggggtattttgtaacatggcagaaaaacaaactgcgaaaaggaaccgtcgcgaggaaatacttcagtctctggcgctgatgctggaatccagcgatggaagccaacgtatcacgacggcaaaactggccgcctctgtcggcgtttccgaagcggcactgtatcgccacttccccagtaagacccgcatgttcgatagcctgattgagtttatcgaagatagcctgattactcgcatcaacctgattctgaaagatgagaaagacaccacagcgcgcctgcgtctgattgtgttgctgcttctcggttttggtgagcgtaatcctggcctgacccgcatcctcactggtcatgcgctgatgtttgaacaggatcgcctgcaagggcgtatcaaccagctgttcgagcgtattgaagcgcagctgcgccaggtattgcgtgaaaagagaatgcgtgagggtgaaggttacaccaccgatgaaaccctgctggcaagccagatcctggccttctgtgaaggtatgctgtcacgttttgtccgcagcgaatttaaataccgcccgacggatgattttgacgcccgctggccgctaattgccgcgcagttgcagtaatatgacgccggatgacttttcatccggcgagtttctttaaacgccaaactcttcgcgataggccttaaccgccgccagatgttccgccatttccggcttctcttccagataggcaatcagatctttcagggtgatgatagagatcactttgcagttgtaatcacgctcaacttcctgaatcgccgaaatctcgccgcgcccccgttcctgacgatcaagcgaaatcaatacgccagcaagcgtcgcgccattagcctgaataatctccatcgattcgcgaatcgccgttccggcggtgatcacatcatctaccagcattacgcgtccttgtaacgcgctaccaaccagattgccgccttcaccgtggtcttttgcctctttgcggttaaagcagtacggcaggtcaaggtcatgatgctccgccagcgccacggcggtagtggtcgcaatcgggatccctttgtaagcagggccaaacagcagatcgaactcaatgccagaatccaccaatgcttcagcgtaaaaacggcctaacagtgccaggtcgcgcccggtattaaacagcccggcgttgaagaaataggggcttttgcgcccggatttcagcgtaaactcgccaaactttaacacctgcttgctaagcgcaaattcaataaactggcgctgatatggtttcatgccttcgctcctcatcttacttttctacagacaaaaaaaaggcgactcatcagtcgccttaaaaatcagtttgccagcgccgccttctgcgtcgctacaatggattcgattccccctcgggccagcgccaacaaggtgagtagctcttcatgggtgaacggctcgccttctgccgtcccctgcacttcaatgatgcgcccgtcttcggtcatcactacgttcatgtcggtctctgcggctgagtcttcaacgtattccagatcgcaaattgcttcaccgtttacaataccgacagaaactgcggctaccatccctttcatcgggttggttttcagcttgccgttttccaccagcttctgtagcgcatctgccagcgccacgcaggcacccgtaatcgacgcggtacgcgtgccaccatcagcctgaagcacgtcgcagtccagcgtaatggtgaactcacccagcgctttcaaatctactgccgcgcgaagagcacgggcgatcagacgctggatttccattgtgcgtccaccctgcttacctttcgccgcttcacgagcgttacgggtgtgggtagaacgtggcagcatgccgtactctgcggtgatccagccctggccctgacctttcaggaagcgcggcacgccttcttcaatagaggcggtacacaacactttggtatcgccaaattcgaccagcaccgagccttctgcatgttttgtatagttacgagtcagggtaacgggacgcacctgattattgctacggcctgctggacgcatattgaaatctccggcttgaaacaaatgtggctgcgcattatacggacttccggcggttattcctatcctgacaaggcatcgatggctataatccttccacctctccttttataaacaggaacgtctatgatccgcagtatgaccgcctacgcccggcgtgaaatcaagggtgaatgggggagcgcaacctgggaaatgcgctcggtaaaccagcgttatctggaaacttactttcgtctgccggagcagttccgtagccttgaacctgtcgttcgcgagcgtattcgttctcgcctgacgcgcggtaaagtggaatgtaccctgcgctatgagccagatgttagcgcgcaaggtgagctgatcctcaacgaaaaactggctaaacagctggtaactgccgcgaactgggtaaaaatgcagagtgacgaaggggaaatcaacccggttgatattctacgctggccgggcgtgatggcagcccaggagcaggatctcgacgcgattgccgctgaaattctcgcggcgttggatggtacgctggacgactttatcgtcgcgcgcgaaaccgaaggtcaggcgctgaaagcattgatcgagcagcgtctggaaggcgtcaccgccgaagtggtcaaagtccgcgcccatatgccggaaatcctgcaatggcagcgtgagcgtctggtcgcgaagctggaagatgctcaggttcagttggaaaacaaccgtctggagcaggagctggttctgctggcacaacgaattgacgttgccgaagaactggaccgcctggaagcgcatgtcaaagagacctacaacattctgaagaaaaaagaagccgttggtcgtcgtctggactttatgatgcaggaattcaaccgcgagtcgaacactcttgcgtcgaagtctatcaatgccgaagtgacaaactccgcgattgagctgaaagtgttgattgagcagatgcgcgagcagattcagaacattgaataactcgtaacgccaattcttacttttcagccttcacaaatgccgcccactcaaacagagcggcatttttcttccccgcaacttcaattctgttttgcgtgcctgctccagattttgcgatgtttttttgcccagcacactgagaacgtgagatactcacaactgtatataaatacagttacagatttactttctttgcaatcgatatcacatggagtgggcaatgaacgaacatcatcaaccttttgaagaaatacggcattatggcactgaagggcaagaattttggtcagctagagaattggcaccgttactggattatcgggactggcgcaattttcaaaaggtactggcccgcgcgactcaagcgtgcgaagccagcaatcaagctgcatctgaccatttcgttgaaaccaccaaaatggttgtattaggttcaggggctcaacgagaacttgaagatgttcatctctcccgctatgcctgttacctggtagtacaaaacggcgaccctgcgaaaccggttattgcggcagggcaaacttattttgctatccagacccgacggcaggagctggctgacgatgaagctttcaggcaacttcgtgaagacgaaaagcgtctttttctgagaaatgaattgaaagaacataacaaacaattggttgaggcagcgcagcaagctggggtagcgacagctatcgatttcgccatatttcagaatcatggttaccgggggctgtatggtggattagatcagaaagccatccatcagcggaaggggctgaaaaagagtcagaagatcctggatcatatgggttcaacagaactggcggctaatctctttcgagctacccaaacagaagaaaaactcaagcgggatggcgtgaattcaaaacagcaagctaataccacacactttgacgtgggtagcaaggtgaggcaaaccattcaggaacttggcggaaccatgcctgaggagttgccgaccccgcaggtcagcatcaagcagttggaaaacagtgtaaaaattacagagaagaaatagcagaaactaaaaactctttttgttgattgagatacccgatgcgtaagccaaagtccaggtgcggtgaacacaatggctaaacattgcacctttcttttccacccctcaattttaacctattttttcttatgcattttctcagacaagaagtcagaagaatgcatctacgctacagaaaatagcgatttcacataactacaagttatcaatttcccctcaccttaaaaaatctcaatcgtgacaatgcgcacaaatcgctaccctgccagacagatttttagggagagaaccatgctgttacacattttgtatttggttggcattactgccgaagccatgacgggggcgctggcggccggacgacggcgcatggatacatttggcgtaattattattgcgaccgccaccgcaattggcggagggtcagtgcgcgatattctgctgggccactatccgctcggctgggtcaaacacccggaatatgtgattatcgtcgctaccgccgcagtactcaccactatcgttgctcctgtaatgccttacctgcgcaaagtgtttctggtgctcgatgcgctcggactggtggtcttttctatcatcggggcacaggttgcactggatatggggcacggcccaattattgccgttgtcgcggcggtaaccaccggcgtgtttggcggcgttttgcgcgatatgttctgtaaacgtatcccactggtattccagaaagagttgtatgccggtgtctcatttgcctccgccgtgctgtacatcgcgctgcaacactatgtttctaaccatgatgtggtaattatctccaccctggtattcggcttttttgcccgcttactggcgctacgccttaagctgggattaccggtcttttactacagccacgaaggacactaaggttcaaaacctgtgatctgctgggcagccagccaactgcccagcttcttgatttgcgcattttccttccattcaataacctgtctggcgcgccccgatccagtccccggcagctgctgccagaactgctccgtgctaaataaaagttgcgaccaggaccgttcatcactggcattaagcgccgcccgggttagcggtattcccattgccatcacccagcgagtaaaaggctgcttacgagccagattaaactgatgccatagctgcgcacttttacttttcgcgatccccggcgtgttctgtaattgctctggcgttaataaaagccaggaaaagatatgctcaaagcgatgagtctgatgcagcgcgcgccagccggcctcaccaatgccatccagccccagaacctgttttgaccccagccagactaagcgtgaaatgaactgttcctgacaaacatcagaagcaaagtagcaggtcaacgagttaaagcggttttctggtggtgtcggttttgtacgttctgcaccgcgccagaccacatcatcaatgcgaggaataccctgaccggcaaggctgacgaggatctgatcaccaggcgcaatatcccactcctgccagcgcctgacggaaccaatattcacccgctggacttttttatcatccagcatgacaggtgcgagtgacgcaaccaccgatattttaccgctcttacccaccgcaaactgaatcgccttcacttcggcaacctgagctacaggttgatatttccaggccaccagccattctgcctggcctggtagccaatggcgggattcgggttctttcgcccctcgcacaaccacgccatcggtgacgaagggtaatttcgctttccaccactcattgcgtacgcgcgcaacctcatcagcatttttaaccgcacgggtatacctctgcgttagagtaaaacctgcggtagccagctcctttaaacgatcggtcattaactgcggtccatccggccatgcccagacaaaaacgcccagagaattcagcgtgtcgctatcgtcctggcgcatcatcaggccagcaacttttgcgcgggcatttattccccccatttgttgttggatatgcccctcgcgctggagaaatatttccccctgaagcgtactgttggctaaaggcccgctaacggtttgcggcacagcggaaattaagctaactttctgcgtccagtcctcgcctttcaggccattaccgcgactgattgctttgttcagtttcccgtcccgataaaccagggttaccgcaacgccatcaacttttggctgcacccaaagatcgctacgttctcgcatccacagacttaatgcgtttttatccaccattttgcgtacacccgtatgggcaaccggatgcataaccgcaccatttaaaggcggcatcatcacgtcgcggggctcgctcccaaagcagcgttgccactgcgtaagacgggcgcttaactgatcgtaaacaccgtcttccacctcactttttccttccttccagtagtcatcgtcccactgttttatttgctgttgcaggcgggaaatttcttcctgtgctctggctggcgaccaggccggacagaccgcccacacagatgattgccagcacaagatacttattaatatcgccatccatactttcatcttcacctccgctgtagtcaggctggcagatatacaacgtggtgaaggcaaagccgagtggcaaaaacggagtctgcgaggacgcttcctgagaatcgtctttattgcagtaaatcacaggcaaatgcggaaacagctacgcaaaacgcaacaactttgcgcaaaaagtgtgagcaagggctacgtcacatggccgcgccgtgtataataagctcgtatgtaggctttatttcgctaatcacatacgaaagatactcatggctcaaggcacgctttatattgtttctgcccccagtggcgcgggtaaatccagcctgattcaggctttattaaaaacccaaccgttgtatgacacccaggtttctgtttcacacaccacacgccaaccgcgtcctggtgaagtccacggtgaacattatttctttgttaatcatgatgaatttaaagaaatgattagcagagatgcgttcctcgaacacgcagaagtttttggtaattactatggcacttcgcgtgaggccattgagcaagtactggcgaccggtgtcgatgtttttctcgatatcgactggcagggcgcgcagcaaattcgccagaaaatgccgcacgcgcggagtatctttattttaccgccgtccaaaattgaactggaccgccgtctacgcggtcgcggtcaggacagcgaagaggtcattgcaaagcgtatggcgcaagctgttgcagaaatgagccattacgccgaatatgattatctgattgtgaatgatgacttcgataccgcgttgaccgatttgaagaccattattcgcgccgaacgtctgcgcatgagccgccaaaagcagcgtcatgacgctttaatcagcaaattgttggcagactgaacctgatttcagtatcatgcccagtcatttcttcacctgtggagctttttaagtatggcacgcgtaactgttcaggacgctgtagagaaaattggtaaccgttttgacctggtactggtcgccgcgcgtcgcgctcgtcagatgcaggtaggcggaaaggatccgctggtaccggaagaaaacgataaaaccactgtaatcgcgctgcgcgaaatcgaagaaggtctgatcaacaaccagatcctcgacgttcgcgaacgccaggaacagcaagagcaggaagccgctgaattacaagccgttaccgctattgctgaaggtcgtcgttaatcacaaagcgggtcgcccttgtatctgtttgaaagcctgaatcaactgattcaaacctacctgccggaagaccaaatcaagcgtctgcggcaggcgtatctcgttgcacgtgatgctcacgaggggcaaacacgttcaagcggtgaaccctatatcacgcacccggtagcggttgcctgcattctggccgagatgaaactcgactatgaaacgctgatggcggcgctgctgcatgacgtgattgaagatactcccgccacctaccaggatatggaacagctttttggtaaaagcgtcgccgagctggtagagggggtgtcgaaacttgataaactcaagttccgcgataagaaagaggcgcaggccgaaaactttcgcaagatgattatggcgatggtgcaggatatccgcgtcatcctcatcaaacttgccgaccgtacccacaacatgcgcacgctgggctcacttcgcccggacaaacgtcgccgcatcgcccgtgaaactctcgaaatttatagcccgctggcgcaccgtttaggtatccaccacattaaaaccgaactcgaagagctgggttttgaggcgctgtatcccaatcgttaccgcgtaattaaagaagtggtgaaagccgcgcgcggcaaccgtaaagagatgatccaaaaaatcctctctgaaatcgaagggcgtttgcaggaagcgggaataccgtgccgcgtcagtggtcgcgaaaagcatctttattcgatttactgcaaaatggtgctcaaagagcagcgttttcactcaatcatggacatctacgctttccgcgtgatcgtcaatgattctgacacctgttatcgcgtgctcgggcaaatgcatagcctgtacaagccgcgtccgggtcgcgtgaaagactacatcgccattccaaaagcgaacggctatcagtctttgcacacctcgatgatcggcccgcacggtgtgccggttgaggtccagatccgtaccgaagatatggatcagatggcggagatgggtgttgccgcgcactgggcttataaagagcacggcgaaaccagcaccaccgcgcaaatccgcgcccagcgctggatgcaaagcctgctggagctgcaacagagcgccggtagttcgtttgaatttatcgagagcgttaaatccgatctcttcccggatgagatttacgttttcacaccggaagggcgaattgtcgagctgcctgccggtgcaacgcccgtcgacttcgcttatgcagtgcataccgatatcggtcatgcctgcgtgggcgcacgcgttgaccgccagccttacccgctgtcgcagccgcttaccagcggtcaaaccgttgaaatcattaccgcaccgggcgctcgcccgaatgccgcgtggctgaactttgtcgttagctcaaaagcgcgcgccaaaattcgtcagttgctgaaaaacctcaagcgtgatgattctgtaagcctgggccgtcgtctgctcaaccatgctttgggtggtagccgtaagctgaatgaaatcccgcaggaaaatattcagcgcgagctggatcgcatgaagctggcaacgcttgacgatctgctggcagaaatcggacttggtaacgcaatgagcgtggtggtcgcgaaaaatctgcaacatggggacgcctccattccaccggcaacccaaagccacggacatctgcccattaaaggtgccgatggcgtgctgatcacctttgcgaaatgctgccgccctattcctggcgacccgattatcgcccacgtcagccccggtaaaggtctggtgatccaccatgaatcctgccgtaatatccgtggctaccagaaagagccagagaagtttatggctgtggaatgggataaagagacggcgcaggagttcatcaccgaaatcaaggtggagatgttcaatcatcagggcgcgctggcaaacctgacggcggcaattaacaccacgacttcgaatattcaaagtttgaatacggaagagaaagatggtcgcgtctacagcgcctttattcgtctgaccgcccgtgaccgtgtgcatctggcgaatatcatgcgcaaaatccgcgtgatgccagacgtgattaaagtcacccgaaaccgaaattaatgttttatgaacccaacacgttatgcacgcatctgcgaaatgctcgccaggcggcagcctgatctgaccgtctgcatggagcaggtccacaaacctcataacgtttctgcgattattcgtaccgcagatgccgttggcgtacatgaagttcacgccgtctggcctggtagccgcatgcgcaccatggcttcggcagcggcgggtagtaacagctgggtacaggtgaaaacacaccgcaccattggcgatgccgtcgctcatctcaaaggccggggcatgcagattctggcaacccatctttctgataacgctgtcgatttccgcgaaattgattacactcgcccgacctgcattttgatgggacaggagaaaacgggcatcacgcaggaagcattggccctggcggatcaggacatcatcattccgatgatcggcatggtgcagtcgctgaatgtttccgttgcctcagccctcattctttacgaagcccagcgtcagcggcaaaatgcaggcatgtacctgcgtgaaaacagcatgttgccggaagcagagcaacaacgcctgttgtttgaaggcggctatccggtgctggcgaaagtcgcaaaacgcaaaggcctgccttatccccacgtcaatcagcaaggcgagatcgaagctgatgccgactggtgggctactatgcaggctgcagggtaagtgccatgaaaggtcgcctgttagatgctgtcccactcagttccctaacgggcgttggcgcagcacttagtaacaaactggcgaaaatcaacctgcataccgtgcaggatctactcttacaccttcccctgcgctacgaagatcgcacccatctctaccccatcggagaactactgccgggcgtttatgccacggtggaaggcgaagtgctgaactgcaatatctccttcggcggtcggcggatgatgacctgccagatcagcgacggttccggcatcctcaccatgcgctttttcaatttcagcgcggcaatgaaaaatagcctggcgacgggccgccgtgtactggcttatggcgaagcaaagcgcggtaaatatggtgcggagatgatccacccggaataccgcgtgcagggcgatctcagcacgccagaattacaggaaacgctcacgccggtttatccaacaacggaaggcgtaaagcaggccacgctgcgtaaattaaccgaccaggcgctggatctgctcgacacctgcgccattgaagaactcctgccgccggaactgtcacaaggaatgatgacgctaccggaagcgttgcgcactttgcaccgcccgccaccgacgctacagcttagcgatctggaaaccgggcagcatccggcgcaacgtcgtctgattctggaagaactgctggcgcacaacctcagcatgttagccttacgtgccggagcacagcgttttcatgcccagccgctgagcgccaatgacacgctgaaaaataaactcctcgccgccttaccgttcaagccaacgggcgcacaggcacgcgtagtggcggagatcgagcatgatatggcgctggatgtgccgatgatgcgcctggtacagggcgatgtaggttccggtaaaacgctggtcgccgccctcgccgcgctgcgtgcgattgcccacggcaaacaggtggcactgatggcaccaaccgaattactcgccgagcagcacgccaataacttccgcaactggtttgcaccgctcggtatcaaagtgggctggctcgccggtaagcagaaaggcaaagcgcgactgtctcagcaggaagccatcgccagcggtcaggtgcagatgattgtcggtacacacgccatcttccaggaacaggtgcagtttaacggcctggcgctggtgattatcgacgaacagcatcgttttggcgtgcatcagcgtctggcattgtgggagaaaggccagcagcagggcttccatccgcatcagttgatcatgaccgccacgccgatcccccgcacgctggcaatgacggcgtatgccgatctcgatacctcggtgatagatgagctgccgccaggccgcacgccagtgactacggtcgctattcctgatacccgccgtaccgacatcattgaccgcgtgcgccacgcctgcataactgaaggtcgtcaggcgtactgggtttgtacgttgattgaagagtcagagttactggaagcgcaggcggcggaagctacctgggaagagttgaaactggcgctaccagaattgaatgttggcctggtacacgggcggatgaaaccagccgagaaacaggcggtgatggcgtcgtttaaacaaggtgagctacatctgctggttgccactaccgttattgaagtcggtgttgatgtgcctaacgccagcctgatgattatcgaaaaccctgagcgtctgggtctggcgcagttacaccagctgcgcgggcgcgtaggtcgtggcgcggtggcttctcactgcgtgctgctctacaaaacgccgctttctaaaacggcgcaaattcgcctgcaagtgctgcgcgacagtaacgacggttttgtgattgcgcaaaaagatctggagattcgcggccctggcgaattgttaggcacgcgtcagacgggtaatgctgaatttaaagtggcggatttactgcgcgatcaggcgatgatcccggaagttcagcgcctggcgcgacatattcacgaacgttacccacaacaggcaaaagccttgatagaacgctggatgccggagacagaacgttactcgaatgcgtaaaaggcggcagtgagaagaccgccatttcaggttaccctaccttcctgccggatgcgattcaccctacaaattcaataaattgtgaatcaatgcgcagccttgataagcgaagcgtatcaggcatttgtctttgttgcggcggcacttctaccgccgcttcatcggttaacccgcaaaaatcggcaacattaaatacagcttaatcaccagcgcattgacgatatcgataaagaacgcaccgaccatcggcaccaccaaaaacgccatgtgcgacgggccaaagcgttcagtgatcgcctgcatgttggcgattgccgttggcgttgcaccgaggccaaaaccacagtgacccgcagccagcactgccgcatcgtagtttttgcccatcatgcgccaggtaacgaagatggcatacaacgccatgaagatggtctgtaccaccagaatcgccagcatcggcagcgccagcgaagccagctcccacagtttcagccccatcagcgccatcgccaggaacaacgacaggcttacgttacccagcacggataccgcacgctcaaagacgcggtaaaagcccatcattgacagaccgttgctcagaatcacgccaacaaacagtacacagacgaaggtcggcagttcaaaagcagtgccagccaaaagttgcgcaacaattttccccaccgtcaggcagatagcaatcagcgcgatagtttcaatcagcaccagcgaggtgatcatgcggcccacatccggcttttcaaacgccgtcgggacttcctggtcatccggaataccgttcggcgtggtggagtgtttcaccagatagcgcgccaccggaccgccaatcaagccgcccagcaccagaccgaacgttgcacaggccatcgccacttccgtcgcattggtgaagccataacgttcaatgaacaatttactccacgcagcgcccgtaccgtgaccgccggaaagcgtaatagaaccggccaacagccccatcagcggatcaagccctaacaggctagccataccaatgccaatggcattttgcatcaccaacagaccaacaaccacaatcaagaagatgccaaccacacgcccaccggcacgcaaactggcaatgttggcgttcaggccaatggtggcgaagaaagccagcattaacggatcgcgcagggacatatcaaagttgacttcccagcccatgctttttttcagtactagtagcgccagcgccaccaacaaaccacccgcaacaggttccggtatggtgtatttcttcaaaaaggagacggaatggaccaacttacgcccgagcagcaacgtcagcgttgcggcaacaagcgttgctaaagtatcgagatgaaacatagttactcctttgtatccgcatcactctttcatactcgtcatacttcatcgcgcagtggcaacttcatgaactatgacgggtatcgagttatgctttcctgggtcaaattctcagctgttaatgaacaaatggcatggattttaagcagaaaaataccaaaagttatataaaaaagtgcatttatctcatttaaatatttagatgaggatgtggcaaacgtttgcttttctctttcggtcagctaaaatgcccgctttgctaccacgggattgttttcgatgtctgtttccaccctcgagtcagaaaatgcgcaaccggttgcgcagactcaaaacagcgaactgatttaccgtcttgaagatcgtccgccgcttcctcaaaccctgtttgccgcctgtcagcatctgctggcgatgttcgttgcggtgatcacgccagcgctattaatctgccaggcgctgggtttaccggcacaagacacgcaacacattattagtatgtcgctgtttgcctccggtgtggcatcgattattcaaattaaggcctggggtccggttggctccgggctgttgtctattcagggcaccagcttcaactttgttgccccgctgattatgggcggtaccgcgctgaaaaccggtggtgctgatgttcctaccatgatggcggctttgttcggcacgttgatgctggcaagttgcaccgagatggtgatctcccgcgttctgcatctggcgcgccgcattattacgccgctggtttctggcgttgtggtgatgattatcggcctgtcgctaattcaggttgggttaacgtccattggcggcggttacgcagccatgagcgataacaccttcggcgcaccgaaaaatctgctgctggcaggcgtggtcttagccttaattatcctgcttaaccgtcaacgtaacccttacttacgcgtggcctcactggtgattgcgatggcggccggatatgcgctggcgtggtttatgggcatgttgccagaaagcaacgaaccgatgacgcaagaactgattatggtgccaacgccgctctattacggtcttggcattgaatggagtctgctgctgccgctgatgctggtctttatgatcacttcgctggaaaccattggcgatatcacggcgacctctgacgtttccgaacagccagtgtccggtccgctgtacatgaaacgcctgaaaggtggcgtgctggcaaacggcctgaactcgtttgtttcggcggtgtttaacaccttcccgaactcctgcttcgggcaaaacaacggagtgatccagttgactggtgttgccagccgctatgtcggttttgtcgtcgcgctgatgttgatcgtgctgggtctgttcccggcagtgagcggttttgtacaacacattccagaaccggttctgggcggcgcaacgcttgtaatgtttggcaccatcgccgcctccggtgtgcgtatcgtttctcgtgagccgctgaaccgtcgggcgattctgattatcgcgctgtcgctggcggttggtctgggcgtgtctcagcagccgctgattttgcagtttgcccctgaatggctgaaaaacctgctctcctccgggatcgccgcgggcggtattactgccatcgtgctgaatctgattttcccaccagaaaaacagtaattcactggcggcggtaagataattaccgccgcagtctcacctctttcaccattcccgccttgaggattgcgcgtaaatcgtgcataactcccttatgtgcatttcacgggatggaagaccatgaaatttattgggaagctgcttctctacattctcatcgctctgttagtggtgatcgctggcctctattttcttctgcaaacccgctggggagcagaacatatcagcgcatgggtttccgagaatagcgactatcatctggccttcggggcgatggatcaccgtttttccgcgccatctcatatcgtgctggagaacgtcacgtttggccgtgatggccagcccgcgaccctggtggcaaaaagtgtcgacattgcgctaagcagtcggcaactgaccgaaccacgccatgtcgataccatcctgctggaaaacgggacgctgaatctcaccgaccagaccgcgccgctaccgttcaaagccgatcgtctgcaactgcgtgatatggcgtttaatagcccgaatagcgaatggaaactgagcgcgcagcgggtaaatggcggcgtagttccgtggtcaccaaaagccggtaaagtgctgggtacgaaggcgcagattcagtttagtgccggatcgctttcgctcaatgatgttcctgccaccaatgtactgattgaaggcagtattgataacgatcgcgttacgctgactaacctgggtgccgacatcgcccgcgggacattaaccggaaacgcgcagcgtaacgccgacggcagctggcaagtggaaaacctgcgcatggcggatatacgtctacaaagcgaaaaatcgctaaccgacttctttgcgccattacgctctgtcccgtcgttgcagattggtcgcctggaagtgatcgatgctcgtttgcaaggtccggactgggcggtgaccgacctcgatctcagcttgcgcaacatgaccttcagtaaagatgactggcagacacaggaaggcaaactgtcgatgaacgctagcgagttcatttatggttcgctgcatttatttgacccgattataaacgcggaattttccccgcagggcgtagcgctgcgccagttcaccagccgctgggaagggggtatggtcagaacgtcagggaactggctgcgtgacgggaaaacgttgatccttgatgatgtggcaattgccgggctggaatataccttgccgaaaaactggcaacagttgtggatggaaacgacacccggttggttaaacagcctgcaactgaagagatttagcgccagccgcaatctgatcattgatatcgaccctgacttcccgtggcagctcaccgcgctcgatggttacggtgccaacctgacgctggttaccgatcataaatggggcgtctggagtggctcggcgaatctgaatgccgccgccgcgacattcaatcgtgttgatgttcgtcgcccgtcgctggcgctgaccgccaacagcagcacggtgaatatcagcgaactgagtgcatttactgaaaaaggcattctggaagccaccgccagtgtttcacaaacgccacaacgtcagacacatatcagcctgaatggacgcggtgtgccggtgaatattttgcaacagtggggatggcctaaattaccgttgactggcgacggcaatattcagcttaccgccagtggcgatattcaggccaatgtcccgttgaaacctacggttagcgggcaattgcatgccgtgaacgccgcaaagcagcaagtgactcaaaccatgaatgctggcatcgtttccagcggtgaagttacatcgacggagccggtgcggtaaacatcaatctcgccgggtacgactcagacgtacccggcattccatcaatagattacaacgtaattgtcagcgcattcccttgaggcttcaccaccagcccctgctcactttcagcctgcgaaccgtcttgcagaccatttactttcacaacattgcgcaggcacagcgtccagttcttcgcctcgcccgcaccagtcacagtaatcgtgttgccagtacgtgctgcttttaaagtaaagatcaccgatccgtcagtagcgggcacttcacagacggcttcatgcccgtcttgcagattaaagaggtggaatgccgtgccttcgtgccacacgtaatcgggacgttgatcgttgttgcccagcgccagtagggtgttatcacgcacataaatgggcagactcaggaagctgtgctgctgtttatgccagcgactaccgtcgagctcatcgttgtgccacaggtgtgtccagcgaccttccggcaggtagaactgcacatcgcccgcttcagtgaacaccggcgcaaccatcacgttgtcgcctaacatgtattgacggtcaaggtaatcacaagccggatcgtccgggaactccatcatcatggcccgcatcatcggcgtaccccgcgcgttcgcacgcgcagcttcacgatacagatacggcatcatgcggcatttcagttgcgtgaagaagcgcaccacatcacaggactcatcatcgtaggcccacggcacacgataagatttgctaccgtgtaaacggctatggctggagagcaaaccaaacgcgcaccagcgtttgtaaacgtgcgccggagcggtattttcaaagccgccgatatcgtggctccagaagccaaaacctgaaaggccaatagacaaaccaccgcgcaggctttccgccattgattcgtagttagcgtaacaatcgccaccccagtgtaccgggaatttctgcgcaccgacggaggccgagcgggcaaacaagacagcttcttcctcaccaacggtgtccttgagcacgttccacaccagttcgttgtagatgtacgcataatggttatgcattttctgcggatcggaaccgtcaaaccactgaacatcagttgggatacgttcgccaaagtcggtcttaaagcaatcaacgcccatcgcgaccagacctttcagtttgtcggcgtaccatttgcaggcatccggattggtaaagtcataaatcgccagacctggctgccatttatcccactgccatagcgaaccgtccgggcgtttgagtaaatagcctttctcttgtaactctttaaagacgggggatttttgaccgatataggggttaatccagacgcagattttcagtcctttcgctttcaggcggcggatcatcccttccgggtcagggaaagtcagcgggtcccactcaaaatcgcaccactggaaggctttcatccagaaacagtcaaagtggaaaacatgcagcggcagattgcgttccgccataccatcgataaagctgtttaccgtcgcttcgtcgtagttggtggtaaatgaagtggttagccacaggccgaaggaccacgcgggcggcagcgccggacgaccagtaaagcgggtataacgatcaagtaccgctttcggcgtcgggccgtcgataacaaagtattcgagatattcactctcaacgctgaactgcactttggagactttctccgatcccacttcaaaagagacacactggggatgattgaccagtaccccataaccacggttagtcatgtagaacgggatatttttatacgcctgttcagtacttgtgccgccgtcccggttccaggtctctaccgtctggccattgcgcaccagggcagtaaagcgctctcccagaccgtaaactgtttcgccaacgccaagatcaagccgctcaaacatataattgcgttgattattcgtgtcctgcacgtagccattatttttcacctgactaccggtaatacgttcgccgttgcgcagaaaatccagtgaccagaactcacctttgctgacacgcgcgcttaagttgccacttttaaactcagcataacgttctgtgttttcgattgtgaccttcacgtcctgcaaaatattgagcggataatgaggaccgttattcagcgccccctgaaaatgctcaatccgcacaccgacaataccttcctgtggggagaaaaagcgcaacgtaaataaaggagtatcaagctgccaggtacgttcacgcacatcacggggggcagcatagaccaccatttcattatcctgctgttcaacctcgaacacctgaagcgggtgaatcaaattgaggccaggttgaatcaaccagtttccatcgctaattttcattgccgttccttagttctgcacttcttgagaggtgaattgttgctggcaacggcgtttaccctgagccagctgttccataacggttttcagattgtgcgtcgtgagtgagtagtagcgtttagcgataatcgcgctcagcaaataacagatcgccggaacaatcgtgaatagcgcaataatgatgctaatcgtggcgctgttctgcgctttttctgccgcatcatatccgccataagccagcatccagccgataagagcgccgccgaaggccaaccccagtttgagcacaaacagcgtgccagcaaaactgatcccggtcaggcgtttaccattgcaccactcgccgtagtcgacggtatcggacatcattacccactggataggtgtcaccagttgatgcaacacaccaatcacgaagatgaagacaaacatagtgatgctggcctgcatgggaacaaagaacatcgcgaggctaatcactgccagcagggcgttcgtccaccagaagatagtgactttacatttccagtcggtcagaggttttgccagtgcggaaccaatcaggttacccacgcaataagtggtgagaaaagcgacaaacacttccggcgtgcccaaaatccatgtgacgtaatacatcatcgccccaccgcgtacgcacaccgccaggatattgaaaatggttagtaaaccgacaatccgccactggtcgttttgccagatatcacgtaaatcttcccgcatagacgttgttgtaggtggtgcttcaacgcgttctttagtggtgaagaaacaaaatgccagcatcatgaatgccaccacggaaaggaccgcgataccgccctggaaaccgagtggtttattatcaccgccaattaaattaaccagtggcatcatcagaacagtagaaagcatgcctcccgcggtcgccagcacaaaacgccaggattgcagcgagatacgctgagtcgggtcattggtgattacaccacccaatgcgcagtaagggatattgacgacggtataaagtaaggtaagtagggtgtaagtaattgctgcatagatcattttgccgttcatactgagatctggcgtgctataggccagtacacagacgatcccgaatggcagtgcgccaaacagtacccacggacgaaatttaccccagcgagagcgcgttcgatcggccaacaaccccatgcaaggatcggaaatcgcatccagtgcacgagcgaccaaaaacatggttccgacaaatccggcaggaatgccaaaaatatcggtataaaagaacatcatatataacattacgttatcgaaaataatgtggctggcggcgtctcccatgccataaccaattttctctttaacggacaacacttcactcttcatctgcttttccttgatgctataggggtgctgagaccgataacgcattttgtaaaccatccctgtgagagcgaatattccgatatctggttattaatttatgattcttgttttatgtgatcgtggtagcgttaattccgctcatatatcattgtaaaatatgggttttatatgaactataatgctttcgtgataatacgctgcgtgtattaggcggaaaaaactgatctgggggatgtagaaactcaaggaagtagctataatgcgccccgcctccatgtagcaatcgaggcgcggaagatcgtcgtctccggtgaggcggctggacttcaatccagttggggccgccagcggtcccgggcaggttcgactcctgtgatcttccgccaaaatgcctctcctgacgttctccaaccccttgtaatactgtcaatccagatattttctactgctcaatattcaatcggcttcaggaatacctggtctaaggttttgtgatggacgatgagcggctgaagaatccgcctgtcggttcttctgtcctcgaacgcatccgcgatattcacgccagtatgcgccgtgtttatttgcaggtgatttgcccccctgctgactctcagccaactgtatcgccattaaggtgaagatgttgttttactcgccccagaacacccttttttatacgactattctatttctttaaccgctggcgaaaaaaactgactataaacttcaccaataatcagactgccatcaagattaatttgttcatttaatatatcaaatcaacttgttttatttttactatcaaaaatagctcattgccttactataattaatatataaattcggtaattaattcttaacatgcttttactaataatctcaattgctggccctataatattgcgctagcattgctttctggttgtatcagcgatactcaaaaattcttaatacaatactcattcgactggtacttatttgtaactcagttatattttttcgcccggtgattcagaagaatgcaaaaaacggctaccactccatcaaaaatacttgatctcactgccgcggcatttttacttgtcgcctttctgacgggtattgcgggcgctcttcagactcctaccctaagtatattcctcgcagatgaactgaaagcccgtcctataatggtaggttttttcttcaccggtagcgctattatgggaattctggtcagtcaatttctggcaaggcactccgataaacaaggcgaccgtaaattactgattctgctatgttgcttatttggagtgctggcctgcacgctttttgcgtggaatcgcaactacttcattctcctctcaacgggcgtacttctgagtagttttgcttccaccgcaaacccgcaaatgttcgccctcgcccgtgaacacgccgacagaacaggccgtgagacggtcatgttcagtacatttttacgtgctcagatctcgcttgcctgggttatcgggccaccgctcgcttatgaactggcaatgggatttagttttaaagtgatgtatctcaccgcagccatcgcatttgttgtttgcggactgatagtctggttgtttttgccatcaatacaaagaaatattcctgtcgttacccaacccgtagaaattttaccctccacccacaggaagcgggatacgcggctactttttgtggtctgttcaatgatgtgggcggcgaataatctctacatgataaatatgccgctatttattattgatgaactgcatctaaccgataaactggctggagaaatgattggtatcgctgccggtctggaaattccgatgatgttaatcgcaggctattacatgaaacgtattggcaagcgactattaatgctcattgctatcgtgagtggaatgtgtttttacgccagcgtactcatggcgacgactccggcggttgagctggaattgcaaattcttaatgccatcttccttggtattctctgtggtatcggcatgctttattttcaggacttgatgcctgaaaaaataggctctgcgacaacgttatatgcaaatacttcacgcgtcggctggattatcgccggctctgttgacggaattatggttgaaatctggagctaccatgcgttgttctgtctggcgatagggatgttgggtattgcgatgatttgcctgctgtttattaaagatatttagctcaccagtctgggctaagaaaaatcggcgtggcgcaaacagagccatcctcgccatttttgctatcatgcctgcatacataaacgacaaaacagtatgcagagggaaaaatgggttccaccagaaaggggatgctgaacgttctgattgccgccgtgttgtggggaagttcaggggtctgcgcgcaatacatcatggagcaaagccagatgtcgtcgcagtttttgactatgacgcgtttgatattcgccggtttgattctactgacgctgtcatttgttcatggcgataaaatcttttctattattaacaatcataaagatgccattagcctgctgattttttccgtggttggcgcgctaactgtacagctcacttttttgctaaccatcgaaaaatcgaacgcagccacggcaacggtgctgcaattcctctcaccgacgattatcgtcgcctggttctcactggtgcgtaaatcgcgcccgggcattctggttttctgcgctattttgacatcgctggtcgggacttttttattggtgacacacggtaatccgacgtcattatcgatctctcctgccgcgttgttctggggcattgcctcggcatttgctgctgcattctataccacctatccctcaacgctaattgcccgctatggcacgttaccagtcgtcggctggagtatgctgattggcggtctgattctgttgcctttttatgccagacaaggaacaaactttgtcgttaacggcagtttgattctggcgtttttttatttggtggtcattggtacgtccctgacatttagtctgtacctgaaaggagcacaattaattggcggtccaaaagccagcattttgagctgtgcagaaccattaagtagcgcgctactctctttgctgttgctggggatcacgttcacattaccggactggctgggaacgctgctgattctgtcatcggtgattttgatttcaatggattcccgtcgccgcgccagaaaaataaatcgtccggcgcggcatgagtgagaattaccagccaggcaccgcgccaccgttaaaaatggtttctgccgctttagcgacttcgggtgattgataagattgcagaaattccttcacgttttctgcattcttattatcttcccgtgccaccaaaatattcacatacggcgaattcttatcttcaataaatacgctgtcgtgcaccggagaaagccctgtctgctgaatgtaagtggtgctgataatcgctacatcaactttgggatcatccagtacgcgcgggagctgcgccccctcgagttccataatctgcaaatgacgaggattatcggttatatccagcgcggtaggtaataacccttttccctctttcagagtaattagcttctctttttgcaacagtaaaagtgcgcgaccaaggttggtcgggtcgttggggatcgccactgtcgcgccttcttttatttgcgccacggttttgatttttttggaataacccgccatagggaagacaaacgtatttcccaccgctaccagtttataaccatgcgcctgattatcttgttcaagaaagggtcgatgctggaagacattcgcatcaagttcgccatgatttgtcgcatcgttcggtagcaacgaaccgctaaatcctaccagttcaacatcgaggccatatttctcttttgccacctttttagcgacttccgcgacatcttgttctgcgccatttataacgccaactttaatgtgttttgcatcgctgctactctggtcgcaacctgccagcagaattccggccagcaataatgcggcccctgtccgtagatgatgtgttgtcagtttcatttttttatccttttattaatgattacctgactatagcggtaaggtcgctgcggtttaaaaaacgaaacgctatcgataagaataaaaaggaataaaagtggaatataaagtctggcacttcttactgaccacgcaagcgcgtttcgtacagcatgatgagagcgatgaaagcaaactacacttatgcttcattcgatacacatttgtaaaaggttgaatccatgaaaccaacgacactactgcttattttcacttttttcgctatgccaggcatcgtatacgccgagtcgccttttagctcactgcagtccgcaaaagagaaaaccacggtattacaagatttacgtaaaatttgcacgccacaggcgtcattatcagatgaagcgtgggaaaagttaatgttgtcagatgaaaacaataaacaacatatacgcgaggccatcgtggcgatggaacgtaataatcagagcaattattgggaagcgttgggtaaggtagaatgcccggatatgtaagaacagcaacaactactgaccaacgcttctttacctgatatcaggatttcttcattttcacctttgcagtaaccaacaatgcagtcagcaacatcaatgtgccggacaacatcaacggcgaagtcagaccaatattatccagcgcataaccgccgattgccgcgccacaggtattagcaagctgaataaccgccacctgaatagacccggctttttctgcctgatcggccagcgagcgggtgatccacgttgaccagccgacgggaaccaatgcaaaagttagcccccagataatcgccacgccggtagcaacgattttatcgcttccccacaacgtcagcaccaacgcactcacagccagtattaacggcgcgcctgctaaggccagttttaccgaacgtttaagaatgaatgacgaaagcgacgtaccgataaagctggcaatgccaaaactcaacagcaccagcgttaagccatccacgccgaatcccgccaggttcatatacaccgggcgaatatatgtgaagaaagcaaactgcccggcgaaagacatgaagatggcgatcatccctgccatcacacccggacgttgtaataagcggaaagtattttgtttctgatgcgagggttcgcctggcagtgaaggcaatgatttgataatccagaaaatacacagcacgcccatcaccgccgccgcattaaagacattgcgccaaccgataagctcgcctaaaaaactgcccaacggcgcggcaatcaccagcgcaatagaaaccgcgccgaagatcaccgacagcgccttcggcaccgtacgcggcggcaccagacgcatggtcagcgacgccgacatcgcccagaacccgcccagcgccagccccagacaggcacgaccgattaaaagcaaactgaatgagttagcaaaggaaaccagcaagcaggagagcgtcagcaaaacggcaaacaaaataacaacgtagcggcggtcagtagcctgaattgtctgggtaataaacaaactggcaaacattgccacaaaggcggtcacggtcaccgattgcccggcaaccccttccgaaatgcctaaatcctgggccattggcgtcaacaaactgacgggcaaaaactcaacgataatcagacaggcgacacaaaacgccaccgagaaaacggctgaccagttcggtcgggtgatggcatccgcgccgcggttttcggcaataaattcactcatggtgttacccgtggcatgtttcaggggaaaagccgaccactttaacattgaaatgtgtgacgcatttaacgtttttgcaacttttacggtgttgcttgagctggagttaagatcgaaacggaacagggcaaagattaccggatgcggcgtgaacgtcttatccacccgacaggtcaggcgcggtctgtaggctgataagacgaaacggtttcaatgcaaccagtgaacgccctcggcaggctgaaagaacgcgttatagcgcatctgaaaagcattaatatcctgcatttcaggttcggtttcgcgcagaaaacccagcgccagcctgacctgagcgtcggtaatcggcgcggcgaggcgagctttttgtaaaatccgatgccattgcagcaggttctgttcgctaccatcgacaatgacaatttgccagatgagcaacacctgcgcggcgttttgcaggtgcgactcatccgggcgatgcaaataacgtaaaaattcgtcaccggctgactttcccatttgatcgaccatcgactccacgggtacgacatcgatattcagccgatcactgagacggcgaatcgcttttctggccccggatgtcagcacccgaaaaccaaccacaaacactaccgccagcgtggcgagcattatccagatcatgagttctcctgcgtaatcagaactcatgatatctggaaaccctcgccagttactaatccaccagaataatcttcagtgcaaacagagctgcgaccaccaccacacacaggttcagatcgcgccagcgcccggtgcatactttcatgatgcagtacgacataaagccgagtgcaatcccttcggtgatcgagaaagtaaagggcatcatcaccgtggtaataaacgcaggcaccgattcggtaaaatcatcccagttaacgcgcgccaggctcgaagtcatcagcacgccaacaaagattaacgctccggcggttgcgtaaggaggaaccatcgccaccagcggtgagaagaacataactaacaggaacataacgccaaccacaaccgcagtcagccccgtgcgaccaccgactgccacaccagaagtactttcaatataggcagtaacagacgaggtgccgataaacgcccccgccaccgaactgacgctatcaacatacagcgccttattcatattggggaatttaccgttactatctattaagcccgctttatcagttacaccaattaatgttcctgatgaatcaaataggttgatcagcataaaggagaaaatgataccggcgagttcaagtgttaacgcgccgctcaaatctacttcaccaatgacgccgctaatatcaggcggaatggaatagacgccgctaaaatgaacatcaccgaaaaataatccacagcaagacgtcaccacaatagaaaccagcaccgcggcatgaaaatgacgtgatgacaacacggttataataaaaaaccctaaaatacctaacaacacgccgtgagaacttaaatcgccaatcatcaccagcgtgtctttattggcgacaataacgccagtattttttaatcccattaaggcgataaataatccaattccgctggtgataccaatacgtaaacttaagggaatgttggagatcatccagtaccggatacgaaacagcgtgagcaaaaatagtccaactgcgccccagaatattgcgcccatcccggtctgccaggagatgcccatcgcccccacgaccacgaaggcaaagaaggcgttcagccccattgccggagccagcgccacgggtaagttagcaaatatccccatcgcaatactgccgataccggcaatcaaacaggtggtaacaaacaccactttcgggtccatttgtgccgcgccgaggatttgcgggttcacaaaaacgatgtacaccatggttaaaaaagtggtcatccccgcaatcaattctgtgcggacggtggtcccatgctgaggtagtttaaataatcgcgaaagcgtccctgattcattactcacgtaatcggtattgtcattattcatttttttgtccattggaggagatttaatcccttgcttttgtaaaacaaatgacaacaacggttcagtgataattatcacatttcaattgcacattaatggatattctttaataatctcgcgacgtttctttatgataaataataatcaaattgataaaatcaaaatgagaaaaatatgaataattctattaaccataaatttcatcacattagccgggctgaataccaggaattgttagccgtttcccgtggcgacgctgttgccgattatattattgataatgtctctattctcgacctgatcaatggcggagaaatttccggcccaattgtgattaaaggacgttacattgccggtgttggcgcagaatacgctgatgctccggctttgcagcggattgatgctcgcggcgcaacggcggtgccagggtttattgatgctcacctgcatattgaatccagcatgatgacgccggtcacttttgaaaccgctaccctgccgcgcggcctgacgaccgttatttgcgaccctcatgaaatcgtcaacgtgatgggagaagccggattcgcctggtttgcccgctgtgccgaacaggcaaggcaaaaccagtacttacaggtcagctcttgcgtacccgccctggaaggctgcgatgttaacggtgccagttttacccttgaacagatgctcgcctggcgggaccatccgcaggttaccggccttgcagaaatgatggactaccctggcgtaattagcgggcagaatgcgctgctcgataaactggatgcatttcgccacctgacgctggacggtcactgcccgggtttgggtggtaaagaacttaacgcctatattactgcgggtattgaaaactgccacgaaagttatcagctggaagaaggacgccggaaattacaactcggcatgtcgttgatgatccgcgaagggtccgctgcccgcaatctcaacgcgctggcaccgttgatcaacgaatttaacagcccgcaatgcatgctctgtaccgatgaccgtaacccgtgggagatcgcccatgaaggacacatcgatgccttaattcgccgcctgatcgaacaacacaatgtgccgctgcatgtggcatatcgcgtcgccagctggtcgacggcgcgccactttggtctgaatcacctcggcttactggcacccggcaagcaggccgatatcgtcctgttgagcgatgcgcgtaaggtcacggtgcagcaggtactggtgaaaggcgagccgattgatgcgcaaaccttacaggcggaagagtcggcgagactggcacaatccgctccgccatatggcaacaccattgcccgccagccagtttccgccagcgactttgccctgcaatttacgcccggaaaacgctatcgggtcattgacgtcatccataacgaattgattacgcactcccactccagcgtctacagcgaaaatggttttgatcgcgatgatgtgagctttattgccgtacttgagcgttacgggcaacggctggctccggcttgtggtttgcttggcggctttggactgaatgaaggtgcgctggctgcgacggtcagccatgacagccataatattgtggtgatcggtcgcagtgccgaagagatggcgctggcggtcaatcaggtgattcaggatggcggcgggctgtgcgtggtacgtaacggccaggtccaaagtcatctgccgttgcccattgccggcctgatgagcaccgacacggcgcagtcgctggcggaacaaattgacgccttgaaagccgccgcccgtgaatgcggtccgttacccgatgagccgtttattcagatggcgtttctttctctgccagtgatccccgcgctaaaactaaccagtcaggggctatttgatggcgagaagtttgccttcactacgctggaagtcacggaataataaaaaagcccggcgtcatgccgggcaaaagtcaccagttacgtttatgccactgtcaactgctgaatttttttctcgcggcggattttgcgttcttccatcaccgccactatcgccatcaggcagatacaaccaatcgcggcgatatcaagtgcggcgaatgtgcctgcccagccggtaaggccgaataccggcgtcccatcggcaatcattcccagacctaacttggcaaagctgtcaccaatcaggtaagcaaaggtgcctttaataccatcggcagcgccaatcgcttttttaggtacaaagccaacagcagccacaccaatcaacaattgcgggccaaagaccaggaaacccaacgcaaagagagaagccagatagatatattcgttgctggcatgttgatacacaccgagcgtggcgataatcagcgccagcgcgatgcaggccaccaggccacggcgaccgttcgccaggtcagagagccagccccacagcagcgtaccgaccagcgcaccagcttcaaacagcgtaaagccctgaatcgccaccgctttagagagtttcagttcctggaacgcgtatacggttgaccactggtcgataccaatacgtaccacatagaggaaaatgttggcgaagcacagcagccagatcactttgtttttcagcacatactcaacaaagatctgccacttggtcatatcggtagattctgtctctttgtcctcttcgctgatctcctcgccgaacagttcttcagctttgccgaggccataagattccggggagtcgctgccgtaacgcaggccgataaaaccgacaatcagcgcgataatcgacgggaagataaacatgccgatgacatggccatcgaacaggtaatttgccccgaacagcgccacacctgctgcgcctgcaccgccaaggttgtgagaaatattccagaaaccgaggaatgtcccgcgtttacgacgcggcgtccatttggtgatggtggagtaactgcacgaaccgccggtactctggaaaaagccgcttaaggcgtagaaggcaatcatcaggaacaggctaaccgagccgctgcccatactggcactgaagcccagcatacaaatggcagacaggatcagcatgaacggcaggaattgtttggtgtttttgccgtcggcgtagtaggaaaccagcgttttacccacgccataagtgatggagaaacccaggccgatcatccccagctgcgtcatgctcaacccgtaggtcgagatcatgtcgttctgcgcgatgttaaagttcttgcgaatcaggtacatcgtcaggtagccgataaagaccaccaggtaggattgcatgaacggtttgaaccacattttgcgccgcacttcgagcggaaggtccagggtcggcttgcgaacctggtttaagaaagccagcatgggttactcctgaaatgaatacctgcgtgaggcatgcattgtaaaaatcagcagcaaatcaggcctgagatagcgtccaggcaaaacctggaaaatttcttagttttgccggatatgaagtgaaaaggtgagatgcatcacgcttcgcgcggtgcctgggcgttcaaaaagggcagtaacagcagtgcggaaatcccggcggcgatagagataaccacaaaaaatccgctccagtgccaggtatcgagtactttcgccagcggccaaccagcaagcgacgcccccagataagcaaacaagccgacaaaccccgtcgccgcccctgccgcctctttgtgggaacactctgccgccgccatgccgattaacatctgcgggccaaagacaaaaaaaccaatggtgaagaagcaggttgcctgcatcacgtagctggcaaatggcatcagccacagcgagccgactgaaagcaaaattccggcggcgaaaatcaaattcatcggcccacggttgccgttaaacaatttgtccgagccccaaccggctaccagcgcaccgataaatccgcccagttcaaacatcgtcactgccgtattcgccgtgaccagatcgacgcccagtgtctcggacatatacaaattgccccagtcgttgatcgccgcccggaccacatagaccagcacatagcaaaacgaaagcagccagatatacggattcagcaacacatatttggtgaggatctctttacgcgtcaaccctgccccttcttgttgttgagcaatttccagcgcgtcgtgtcgccattcaccgaccgccggtaaacctaacgcctgcgggcgatcgcgtagccgccagcagagaaaaatccccacgactatcgccatacaaccagcaatcatcatcccggcacgccagccgtaatgcagcgcagccgctgccatcacaatgggaatgagtgcgccgccgacgttatgcgccgtgttccataatgcccaccaaccgccgcgctcggtacgtgaataccaggccgttaacagacgcgcacacaccggtgaaccccagccctggaaaaaggcgttcagcacccagagcacggcaaacgcccatagcgacgtcgagaagccaaacagaatgttgatgatgcccgtggcgataagccctatccccataaaataacgggcatttgagcgatcgctgacaatgccggagacaaacttcgacacgccgtaggtaatgtaaaacagggtcgctaacaggccgatatcgctacggctgagcacgccgttagcaaggatttctggtacggcggcgttaaaacttttacgcgtgaagtaaaacagcgcgtaacccagccagatggtcagcagaatatgccgacgccagtagcgatagcgggcatcaatttcatgtttgtcagtcattaatggcgcatcggcaggcgctttcagaaacggcaacatcatcgaaccttagacatagcgttgaggtagagaaacgctgacacgcgtgccgtgcagacaggaaatgtgtaatgtgccgcccagcgccgttacgcgctcgcgcattccggtgaggccaaaaccttgttgcccggaacccggcggcaaaccgctgccatcgtcttcaatcaccagcatcaaccgttcatcctgctgccagccttgcagcgtgaccgcgctggcatcagcatgtttcacaatgttgttcagcccttcctggcagacacgaaacagcgtcacgcgctggttttcacttaatgctgattcatcgattcgccattcgagatggctgacaatgccgcgcccttccagctccatttcccgcatcagtgagcggatggcctgctccagggagagatcatccaactggcgcggacgtaaccgtcctaataaacggcgcaccgcgtcgtacacgcccagcgacagttgttcgatgagctgcccgctctgcttcacgctggcgttatctgccgccagccgctgaacaatgcccgcctgagtacgaatggctgtgatggtctgaccgatatcatcatgcagctcacgcgccacatcacggcgcacgctctcttcggtttccagcaaccgttcagccagatgctgattgcgcgccagttccttttgcagcgactggttaagttcacgcaaccgctggatgccagcgcccagtaacaaccctgtcagactttgcaccagcaacgagagcaataaatccaccggatgatcgcgccaggtttgactggcgatcagcgcgatggcgttcatcaacgtcgcgatcagcgccccttgccaaccgtagtgccaggccagcgcgataatcggcagcgccaggcagaatggcgtaaagcgcgacagttcgtccggcaatcccaactggagccagagactaataacaaacaacagcaagtaccagaccagatgccgcccgcgccagttgatcggttgagaaaccagtgacgggccgagcggcagccaggtgttattggcgagatagtgccagaacaccagacatatcggggccagcgtcaggccgccagttaaagtcagcaacagcgcattccacgactctttgccgtgccaaagccagggcagcgactgcaacaacgccgccgccgttaacgccgccccctgtaacagcaaggtgcgccagtcacgctgatggcgatagcgcgagatcagcgctacgggcagtaacgtcagtaaactaccgatcatcaataacggaaaatgggttaaaccgaccgcctgcgttagccagtaaatcagcagccattccgcacccagcaatacgggccagtatccgcgcgggcattgcagcattagccctagccgcagaccaaacggaaataacagcaccgccatatcagggcgctcaaccaggtgcaggctgatactccacaggcaaaaccatgcggcagagaagataaaaaagcaggcaataacggtaattaagcgggagaacaacgtcttcatcaccagccatcaaacatgcggcgcgccagttctacgtcgttactgacgcccagtttttccatcagattggcgcgatggacgtgtaccgttttcggtgacaagcccagttcggcggcaatctctttcaccgccattccttgcgccagtttttccgccacctggcgttcacgtttggtcagcgggtcctgacgaccggatgccagtttaatggcaatatccggcgtcagataacagccgcccgtggcaaccgtatgcaccgccgcaatcagttcgtcagggctacagcgtttggagagaaagccgcgtgcccccgcgttaagcgcctgctcaaccagcgccggactgtcatgaacagagagcattattgtcgccatacctttcggcagctggcttagcagttccagaccggagatatcgggcatggagatatcgcaaatacacacctgcacaccgcgccccggcagccccgccagcgcctcgcgccccgaaccaaactcggcaactacctgcaaatcaggttccagccccagcagctgcgcaaagccggagcggacgatgaggtgatcgtctataagggcaacggtgatcatggtcttgtcctggcgggtaaaaaaaaacgcgcttaccttaacgataagcgcgatgttgttcaagccttgagcggttactgaaaaaacaccgcaatcttgttaaacatagtcggatcggactgattacgctgcactttcaccacatcttccagcttatcgatttggcttatcatctgctccagacgctggtcgtcattgaccagtagccagatatggcttttgtcgctgtcctgaatcggcagacaaagaatgccttcaacgttaaaagcgcggcgggcaaaaaggccacaaacgtgggtcattacgcccggatggttgcgaacggtgagctccagaattacgttgttatgagttgtgttttgcatggcttattcccccaccatttcagtattcgccgcacctggcggcaccatcgggtaaactttttcttcggcatcaatgcgcacatggatcagcgccgggccagggcgattgatgatttcctgcaatgcagcctgcggatcggcttcgttattcaaatcacaggtttcgaggccgaatccggcggcaatctgcataaagttgattttgcccggataggtggcggcaaaaacgccttgctcgtagaacagactctgttgctgatgcaccagccccagcgcttcgttgttcatcagaatgattttgacatccagctgattttcactggcggtcgccatctcctgaatattcatcatcaggctgccgtcgccggagaaacacaacactttgcgatccgggttcgccagcgccgcgccaatcgccgcaggcaggccaaaacccatcgtgcccagcccaccggaggtcagccactggcgtgggcgattgagcggataagcttgcgcggtccacatctgatgctgacccacatcggtggtgataatcgcattgtcatcgacacaggcggcaacggcgttgatcaggccgtaatggcttaatggatcgcacgctttcgggattggacacgggaattcgcgctgcaaatccgctaccaactggtgccactctgcacgcggttgcgcttccacctgcgggatcaattgcgccagcacgtcatcaacatccgcctgaatcgccacatgcggctgcttgattttacccagctctgcgcgatcgatatcgacatgaataattttggcattcggacagaactgctcggttttgccaatcgcccggtcatcaaaacgcgcaccgagcactatcaacaaatccgcctcctgcaaaatatagttggtgctgcgcacgccgtgcatccccagcatacccagcgacaacggatgcgcttttggcaacatgcccagcgccattaaagtcatggtggtaggcagttgcgctttctccgccagttcacgcacccgtgcgggcgcattgatcacaccgccgcccagataaagcaccgggcgtttggcagcgttaatcatcgccgctgcgtcacgaatgctttcttcgctaaaggcgggggcggcggctttttctgccatagcgggctgtgtttcaatctcaaaaactgccgtttgcacatccttaggaatgtctatccacaccgggcctgggcggcctgattgcgcaatgcggaaggcatcgctcatgacctgcgggagttcttcgatatgtctgaccagatagttgtgtttggtgatggggatagagatgccgtaggtgtccacttcctggaaggcgtcggtgccgatcatcgaggcgggaacctgaccggtgatgcaaatcagcgggatggagtccagccgcgcatcggcaatggcggtcaccaggttagtcgcacccggtccgctacaggccatacagaccgccggtttaccgtcggtgcgcgccatcccctgagcgataaatcccgcgccctgttcatgacgggccagaatatggcggatttgcgtgctttggcttaaggcatcgtaaacaggcaggatagaaccgcccggaatgcccgtcacaatcttaatgccctgctgttccaggaaatgaacgataaattctgcgccggtaaagcgcttacgcgtcgatgttgtgcccgaacttgccatgctccagtccttttcttctgggccgactttccgggaggtgcttaaacgaaaaaccccgcccggtttgcgccggcggggttttggaatcgtgtgttgttccagtccctacggcgcattgccgacgaccaccaccacacgcacgacgaccactgcggcggatagcgcagttggtagtagttttgcgttgaacatggaagtagtcattggggaccttgttggttttgtgtttaacaatatttatacaagcacagctttacaggggagacaatggaaaatttttcagcaagggaaaattgaggggctgatcacgttttgtactgaattgcaggtaacaaaaaaccccgccggagcgaggtttcatcagccgcctgcggctggtaaccgcaaagcacactgtattatgtcaacactgaaagtatacgtgttccgcgcagaacgcgcaatttcggcacgaattttgacgtatttagggcatagttgagtatcgatcacagtttgcgttttgtccaaatattactgtttatttatacagtaaacttctataatatcactgtacgcaatgtgttatgcgggggccgcatcgttacccggcgcactaagtcctggctgaaacgggtggtgccgtcagcgccttaaccccgcgtgagcacactgtgttatgtcaacaagcacaacgtttctccttaagataccgcgtgcacaacagctggcaacaggcagcggaaaggtacgtcagctggcagtgctcctgaaccacaggagacgcgtatgagcctggtggatatcgccattcttatcctcaaactcattgttgcagcactgcaactgcttgatgctgttctgaaatacctgaagtaattcagattcaagtcgcaccaaaggggagcgggtaaccgctccccttttatatttagcgtgcgggttggagttgggggcttcttctaccagcagaatgtttgcacctgcgctgcctgtgcccctcaccctagccctctccccaaaggggcgaggggaccgtcccgtgcaatgtttagctcattttctgaaagggaacggtggtttccccctcgcccctttggggagagggttacagttcgcacgtaatccctcccggcaacatttattgccgcttttgtttacatattctgccgctaaacaattccccattcctggcgtatatctggctaacattcatcaatgtgatagattcctctcccgcatttatgggaatgcgtagtgacttattctagttatttttataaaagcatccgtgataatgaaaaggcaaagaaacgtcaatttgttattgatgttggtattactcgtggccgtcggtcagatggcgcaaaccatttatattccagctattgccgatatggcgcgcgatctcaacgtccgtgaaggggcggtgcagagcgtaatgggcgcttatctgctgacttacggtgtctcacagctgttttatggcccgatttccgaccgcgtgggccgccgaccggtgatcctcgtcggaatgtccatttttatgctggcaacgctggtcgcggtcacgacctccagtttgacggtgttgattgccgccagcgcgatgcaggggatgggcaccggcgttggcggcgtaatggcgcgtactttgccgcgagatttatatgaacggacacagttgcgccatgctaacagcctgttaaacatggggattctcgtcagtccgttgctcgcaccgctaatcggcggtctgctggatacgatgtggaactggcgcgcctgttatctctttttgttggttctttgtgctggtgtgaccttcagtatggcccgctggatgccggaaacgcgtccggtcgatgcaccgcgcacgcgcctgcttaccagttataaaacgcttttcggtaacagcggttttaactgttatttgctgatgctgattggcggtctggccgggattgccgcctttgaagcctgctccggcgtgctgatgggcgcggtgttagggctgagcagtatgacggtcagtattttgtttattctgccgattccggcagcgttttttggcgcatggtttgccggacgtcccaataaacgcttctccacgttaatgtggcagtcggttatctgctgcctgctggctggcttgctgatgtggatccccgactggtttggcgtgatgaatgtctggacgctgctcgttcccgccgcgctgttctttttcggtgccgggatgctgtttccgctggcgaccagcggcgcgatggagccgttccccttcctggcgggcacggctggcgcgctggtcggcggtctgcaaaacattggttccggcgtgctggcgtcgctctctgcgatgttgccgcaaaccggtcagggcagcctggggttgttgatgaccttaatgggattgttgatcgtgctgtgctggctgccgctggcgacgcggatgtcgcatcaggggcagcccgtttaagcgcacgtcaccgcagcatcgtcatcagctccatgggagaacgatgctgctttatcagatcacgcatcacccgcatatgcggtgcggagtaagaataaaacgcctgatagcccgcacaaagcacgctgtctggcgtctcctggcgagcgtgcgggcacaggcgatgccagtcgcacgcctggcagtcacggcgcggttgcgggttttcgctgccacaccatttttgtaaggtggcgtcaaaaagctcaatcgagatacgactgatatctgcccgcacccaacactcgaacagggcaattaaaaatttcccccacagctctgctgtcaccgaagcggccgtcagatcgccccggtcatcaaattcaagatagggaatgagctgtacggagcggatgccccgctgtttgaaattgtgataaaaatcggcaggttgcagagcatccttgtactctacaaccagtttatgcctgtcctcttcagcatcaatgacctgacttcctgtcatgcgactctctcaataaatacgataagttgatgtatatgcgttacagcaaacagtattgcgagagataacaccgcgagggagatcaaaaatttgtcacggactacgtgaaattgggaaaaatcgctattcgtgacatccattaaattgcgattacgggtgtagtgccagaggatcagcgccacgatggcgagaatgccaatcgaaatccagaataacatgcccgcctggtgccagttgtgtttgatagccaacgccatcaacgcgccgtagcccagcatggtacgaaaccacgccagtgatgtgcgctccggctgcagtcctgggtcggcaatgcgtctggctttgcggctatccggcatacaacaccagtcccataacgatcaccgccacgaccatcaatattaagctaatgattaataagctgttggtgtagggcaggtcctctttcagacgcatcgctttttcattgcgtaaccagcgcaggtagccatacatcgctaacccgccggaaaacagacacaacaacaacgccagcagttcacgaatgacgggcgtggcgaaatctggcgcaagttgatcaagcccaacccccgccgccagaaatcctagtgcggtacggatccacgccagaaaagtacgctcattagccagcgagaagcggtaatcgggcgcttctccaaggcgggaaattttcattgttgctcctttgcaatttcactaacgctctacctttagcggttttttttaagaatttcgtccgcccgtttcctgatatgctttcgccatccgctacaaggaggtcagatgggtatcatagctcaaaataaaatcagttcattgggcatgctgttcggtgccatcgctttaatgatggggattatccacttttcattcggccctttttccgcaccaccgccaacgtttgaaagcatcgtggcggacaaaacggctgaaattaaaagaggtcttctcgccggaataaaaggcgaaaaaattaccaccgtggagaaaaaagaggacgtagatgtcgataaaatcctcgatcaaagcggtatcgcactggccattgctgcgctactttgcgcatttattggcggtatgcgtaaggaaaatcgctggggcattcgcggcgcgctggtttttggcggcgggacgctggctttccataccttgctttttggtatcggcatcgtgtgcagcattttgctgatattcctgattttttccttcctgaccggcggttcactggtttaagcagcctgaataatgcccgccgggtgttcatcagcgggcattatcgtcagaacttctgttttttctcttccactttcactccttgcgtcggtaggccggtgtcatagtcacgtaccaccggcgaatagccatcttgtgggcgtggacgaaatgcccccatccagcgcggcagtgcatctttacgccacggacgcaggctccattggtaactgcggaacggatcgcgaattttgtccatgtaatccaataaggcgtcatgcattttgctgcgaacgtctgcaaaacggatatcatcgatcaggttatgcatttcatttgggtcattacggcgatcgtaaagttcatcactggtgaagaggttgagtaccagtttaaagtcatccgtcacccagcaacgcaccggaataaaaccgccaaagctgtcatgctcaatctcgtagcggttaaattccaccattacaccgcgtggctctttcacggcaaggatattttcccccggcagaatctctggtttttcaatatctgccagcgccatcattgtcggcagtaaatcgatatgactgactggcgtatcgacctgtcgccgctccccttgcggcgaacggatgatcagcggaatacgggtgatgtcgtcatacatcgccgctcctttactgatcagcttatgtgcgcccatcatttcgccgtgatcggaagtataaatgacccacgtattttcacgttgctctggcgttaaggcattgatgacccgtccgatttggtcatcaacaaagtcattacaggcaaaatagagcggatggtgataaagcccgtcatcaccgactggcgatggcatcgcctgcgcccataagcggtgatgttccggtttgttcgccaggtcatcctgagctttctcgcccagatcgtagtaaaaatcagcgtatttctctaaatactccaccggacaggtgaacgggtgatgcggctcatcatacgaaaccaccatcaggaagggttcctcggcgcgcgcgggctgttgcagaaaatctaccgcccgattgctgatgcggtgcgcccaggtgaaggtttcgtcgatatggttcgcctgtaaatcctcaacgctgtttaggccattgcgccacaggctgatctctttttccgtcagttcgctaaggtagttcgccccatcgaaccagtaatcagcgtcccactccggcggacactcgccagtgccgaaatagtcatgaccgtcgagatgccatttgccgatgtaacaggtgtgatagccggcatccttaaagtagcgccccatagtggagatgtttttgcctggcgcgacgttgttggtccacgggccggactggttagcgtagataccggtaaatagtccggcgcgtgcaggcgtacaaaccggtgaacaggtgtaggcggaattaaagcgaataccttccgccgccagactatcaatattttgcgtattcagcggtttaccgctatagcaaccgaccatattggtggcctgggtatcggtcatgatgaacagaaaattggggcgtttcataggctatccttcgcgtcgggagtaaaggttacggctgggtcgtgacgatgccgccagctgtcaaaaatcaggtagacaatcactacggcggcaatgaaataactgatcatcgctaaccagcgcgtaccgtagccgccgaattcagccagcccggcatagacgccaatcatcgcgaacaggatgccaattgacgcgatcttgacgtttctccacggtttcatgtccaccgcaaacgcatctttgaaggtgaacggcgtggcgcgcggtttgataaaaccgatcaccagcatcacgaccacgttgatgcagaacgtacaggccagcacatagaggaaatggaagtcgaacttcaccagatagttgatggtgatgtagctgattatgccaatccccatcgccacttttgccgccagcgccgggatgcgcgggaagaaaaagcccataatgatgatggtaaccagcggcacgttgtaaatgccgttgagctgtttcatccagctatacagcccctgcggcgcgttggcgatccacggcgcgaccagcaccgaaacgatagcgataaagaaaccaaatttgcgcccgacggtgaccagctgctgcggctcggcattctggttaatgatgcgacggtaaatacccatactgaataacgtactgacgctattcagaaagccgttgaaggtactgatcaccgcaccaaataacaccgcgccgaagaaacccaccattggcactggcagaacgttattgaccagcgtcgggtaggccatgtcggctttcggtaaatcctgatacagatgaaacgcaatcaaccctggcagcaccagtaccagcgggtcgagcattttcagcaccgccgttaacagcgcccccttttgcccttccgccaggctttttgacgccagcgtgcgttgcacgatgccctgatttgtacaccagtaaaaggtgttcaccagaatcaaaccggtaaatgccgcgccaatcggcaagggatcggtcgggccaccgattgagtttaatttctcggcgtgaacggtggtgagttgctcaatgccctgcataaagctgcccttgcctatcgcgatcaggccaaataccggcaccatcaacccgccgataaccagcccaataccgttgatggagtccgccactgccattgcgcgcagtccgccgatcaccgcatacaaaattcccgccagaccaagcaaaattaccagtagccagatagccgcaccgtgagaaatctgtagcgattccccgacgtgaaacaggctgttgagcgccaacgcaccggagtagagaacaatcggcagaaagcagacgccggtggcaatgaggaagcagaagtcgatgataatacgcgtcgttttatcataacgttcctccagaaaatcggggatggtggcaatgccgcgcttcagatagcgcggtaaaaagattagcgcgaggaagatcagcgtcaccgctgaagtcacttcccagcccatcaccgacatgccgcttttgtaggcctgcccggaaaggccgaccagttgttccgtggaaaggttggttagcattaacgaagcggcaataaccggcgcttttagtgaacgtccggcaagaaaatagccttgttgcgatccggtatctgttttgcggaccttccaccaggtgatcaccgccaccagcagcgtaaaaccgacaaaactcaagatttgtaacgaattcatctcatagcccttatttatgtttatgtcccggacgcatgaatatagggagaggtaaaatgcgtcgggtcaggcagtcagattcttaaaatacaaacgtcgtatccctgaacggattgttttctgttaagttcaggttgtgagcataattcgccggagggatattaaaatgaatggaaaattgcaaagttcagatgtaaaaaacgaaactccgtacaatattcccttattgattaacgaaaatgtgatctccagcggaatttctctgatctcgctctggcatacctacgccgacgagcattaccgggtgatctggccgcgggacaagaagaaaccgcttatcgccaactcatgggttgcggtgtataccgtacaaggatgtgggaaaattcttttaaagaatggcgaacaaataacactgcatggcaactgtattatattcttaaagccaatggatattcactcttatcactgtgaaggtttagtctgggaacagtactggatggaatttacccccaccagtatgatggatattcccgttggtcagcaaagcgttatttataatggcgaaatttataatcaggaactcaccgaagttgctgagttaataacttcaccagaagcaataaaaaataatctggcagtcgcttttctgacgaaaattatttatcagtggatttgtcttatgtacgcagatggtaaaaaagatccacaacggcggcaaattgaaaaattaattgccactttacatgccagtctgcaacaacgctggagcgtagctgatatggctgccacgatcccctgtagcgaagcctggttgcgtcgtctgtttttacgctataccggcaagacgccgaaagaatattacctcgatgcgcgtctggatctggcgctatcgctattaaagcaacaaggaaactcggttggcgaagtcgctgatacgctcaacttcttcgactcctttcatttcagcaaagcctttaaacataaatttggttatgcgccgtcagccgtgctaaagaatacggaccagcacccaacggatgccagtccacacaattaacgtaactctggccagtacgctttgttggcctccagcaactcatccagaatagctttggcgaccgaggcgctcggtaccgttttcgacaacgtaatcgcctgccacaggtgctgatatgaacgctgttcccaggcgtccacgaccagtttttccaccgccacttgctgactcattaacctttctgaaactgcgggatatcgccgaccaccagtggttcaggccgtagtagcgcacgcgcatctgtttgcgatcttgcagcccaacaatttgcgccatccggctttcaataccgattggcatgtcacagatgttgaggattttcgcattcgggcgcagacgacgcgtggcttctgcgacaatggctgccgggttggagtagttgagcatccaggcatttggtgaatatttttccatataatccaccagttccaggacgccgccaatggaacgcatgccgtacgctattccgccgggtccgcaagtttcctgaccaacaacaccgtggcgcagtgggattttttcatccagttcgcgcatcgggtacttgccgacgcggatgtgcgccatgacaaaatcaacgtcgctgaatgccacttcaggatcggtggtgtaactaaacgcaatgtccggcgctttctctttaaggatgactttacaggcttcggcaatcacttcctgccgcgcaccatcgttatcataaaatttcagtgcacgaagcgggaaacggtcctgattcaccaggagcatcaacacgatgcctggcgtaaaggtgcttccaccgcctgcgacaaccactgagaatttggtcattatactgcctccgtaatggcaacattttctgctgattgatgagaattaattaagctatcgagctgttcacgcagctgggatacatgcagaccaatgatcacctgaatggcatcgccactacggaagacgccgtgcgctcccagctttttaaagacttcgtcatccagcgtttgtgacatgtcatgcagtgcaatgcgtagacgcgtcgcacaattgttaatgctggagatattgccgaccccgcccagggcttgcaggataccggcagcctgatccagctctttttttggctctgccgcggtggtttggcctcgcgaggctttgtattcggcttttgagtagagtttcacttccgcatcttcacgtcccggcgtgcacatgttgaactgcagaatcagggtgcggaaaaccacgaagtacagcagggtaaagcacaacccaatggcgatttgggtcagcatcatatccgcgtggttgctgaacatcgggatccagttttgcggtaaaacctggtcaatcagacctccgcccatgttgcccaccacaccaaagagatacatcacggtcgacattgaggccgcaagcacagcgtgtaccgcaaacagcaacggtgaaatgaacaggaaggtaaattccagcggttcggtaattcccaccagcatggcggttaaggttgcgggaatcagcaagcccgccacttttacccgattttccggtgcggcagtgaagtacatcgctaaagaaatgcccacggcaccaaagatttttgagttaccgtgcagggcaaaaccgccttccgggaacaacgatttcagcggctcggcgctcagactgaactcttgcagatgctgcgcccagtacatctgaatgccgccttcaacagctgccggaccaaagataaactgtccgtagatgaagtggtgtaaaccggttgggatcagaatacgttcgaggaaggtgtaaacccacaccccaagcgcacccgccgaacgcaggaacgcttgcagagattcaatccccatttgtacttttggccagccgagcaatgtcagccaggcacaggggatcatcaccaggaaggcgataatcaccacataagacgtcccctggaaaatgccgagaaaaaccggcagttttttatcgaacagacggttatgcagcgccgtcacaatgccggaaatgataattgcgccgataatgctggtatcgagggttttaatcccggccatcattgtcagaccgctacctgccaccgcgtcctgagtgaaatcgacgccgaagtagcttccccaggtcattcccatcgcgttgatgaaatagttccaggtcaggaaactcaccatcaccgccagacaagcacgcccctgcgcttgcttagcaaggccaatgggtaaaccgacagcaaaaatcagcggcatattacggaataccgtccaaccgccctcttcaataatgtgtacgatttgcgcgaataaactgttcggatcggtcagtgattccccgacaaacatcgggttttgcagcaagatggcaagacccaccacaatcccggcgaagggaaacagcagcactggcgtgaacatcgcgccgccaaagcgttgaatttgactgagcatttccacatcctcttttctcaattctgtaagtaggaagcctgattggttatgcggcaggcctggagcgaggataggaagatgcgatcggcagaacatgacgacccaatgggattcgtgatcgctttcatgcttttcgttgggcggtagagatctacgttttcgcgaaaaagtagacatctgtgagcactggtacacagcatcgaacacatctttaaaaaaaagatgttttttcaatcgattaagcagaacttgtgggcgcattacccgggcttgcaggcaaaaaagagatctagagatgatctacaaaagcattgcggagcggttaagaattcgacttaattccgcggatttcacgctaaacagccttcttcccggtgaaaaaaagttggcggaagaatttgcagtatcccggatgaccatccgtaaagcgattgacctgctggtagcgtggggattggtggtccgccgccacggcagcggcacttacctggtgcgcaaagatgtactgcatcaaaccgccagcctgaccgggctggtggaggtgttaaaacggcagggaaaaacggtcaccagccaggtgctgatttttgaaatcatgcctgcgcctccggccattgccagccagttacggattcaaatcaacgagcagatctacttctcccgtcgcgtgcgttttgtggaagggaaaccgctgatgctggaagacagctatatgccggtaaaactgttccgtaatctttcgctgcaacatctggaagggtcgaagtttgaatatattgaacaagagtgcgggattttgattggcggtaattatgaaagcctgacgccagtgctcgccgatagactgctggcgcggcaaatgaaggtagcggaacacacgccactgctgcggatcacctcgttgtcatatagcgagagcggggagtttttgaattattcagtgatgttcagaaatgccagcgaataccaggtggagtaccatttacggcgactccacccggaaaagagttaaccgatactccagaagagcaccgccagtaattggggggtgataatgcgcaggaacatcactaacggatagacagtggcgtaagagagcgccgccgcaccgctggttggatgaagattattagcaaacgccagcgccggaggatcggtcatggaacctgccagcatcccgcacatggtcaggtaattcattttggctaacatccgcgccagaatgccaacagtaatcagcggaacggcggtgatcagggcaccataaccaatccagcttagcccttcgccattgaccagggtatttacaaaatccccaccagatttcagaccaacgaccgagaggaacagcacgatccccagctcccgcagcgcgaggttggcacttggcggcataaaccagtacagcttgccgatactgccgatacgcccgaggatcaacgccataatcagcggaccgcccgccagccccagtttcaacgcggccgggaatcctggcacaaagacgggaatagaacctaacaatacgccaagcccgatgccaataaacactggcagcatctgaacctgttgcagtttttgctgcgcattccccagcacattggcaacggcatcaattgcggacggacgccccaccaggttgaggatatcgccgaactgcaggctgatatcgccactggcgaccagttcgaccccggcacggttcaggcgcgagataacaacgtcatagcgttctttaaagtgcaggtcgcgaatacgttttccgagcacgttttcattggtgaccaccacacgctcgacgcgcaaatcagtgcctttcgtggacagcgaagtatcgacctcctgaccaatcaccagttgcgcattatgtaaatccgctggctgacccaccagatgcagcaaatcgcccagttgaataatggtatctggcgaaggaacttttagggtttcttcgcgtttcagacgcgagcagataattttgtcgccgttgagaatcggtacatctttaatggctaaatcatgcaggttagggttctcaacgcgaatattgatagtcttgatcagcgcgccgccattggtgcgtgaagactcgtgctgctgagcttctgtctcgacattgacgcggaaaataacccgcaacatccacatggtgaacaaaatcccgcaaatgccgaatggatacgccatcgcgtaactcatccccatctgatcgaccatttccattggtgtacccaggtcgcgcaaaatctgctgccctgcccccagcgctggcgtattggtaaccgcaccggagaaaatccccagcactaccggcagtggaatatcaaacagtttatgcaggatggcggtaaccagaccaccgatgatgacgatcagaacagcaaacaggttgaggcgtaatccggagacgcgcaatgaggcaaagaagcccggccctacctgaatcccgatagtataaacgaacaggatcaggccaaattcctgaataacatgcagcatatcgctacttaatgtcatccccgcctgagaaacaaaatggccgacgatgatcccaccaaacagcacgccgccaatacctaatcctatgccgcgaaatttgacattgccgataaacaaaccgacgactgccaccaaagccagaatactgaccgttaatgctatatcactcatcgtccatttctcttgagataacatttttaattgctacggattatggctgaatcggtgaagcagatttgccttatagcgcacattatcacgggaaagaacgtgccgaaatatcttaaacagtcgaaatttaacgcattgttgagtaagtaagacaaaaaaagccccaccagaatggcggggcaaagagaatagctagttagctatttaacgcgggacgttcgctgatagcgatacgctgcgctgcgatgggttcaggctcattacgaattaaatcaatatgcagtaaaccgtttacgaaggttgcgccagagacttccatattttcagccagcgtaaagctcaggctaaatggctgattcataagcccttgatgcagccattttttctcttcttttggctgctccggcgtgccttttacgctcaggcgcgtaccttccagttgaatctctaaatcttcctgacggaaacctgccagcgcaagggtaatgcggtagtggttatcgtcgcttttctcaatgttgtacggcgggaagctctggctttcaccggcgttttgcagtgcgttggccagtttgtcaaaaccgatccattgacgcatcagtggggataaatcgaagttacgcatagtcatttctccttctaagaagcgagtaagtacctgcaaatccgaagattcgcatatgctccctgacggcgagcatggagatgtcaggccgcgccaggcggccttagggaattagttgatttcgatacggcgcggttttttcgcttccggaatcacgcgttcgagatcgatatacagcaaaccatttaccaggttagcgccacgaacatgaatgttctcagctaactggaatttgcgttcaaagttgcgttcagcgatgccctggtacagataggtgcgctctttttgttcgtcggcgtgagcacctttcaccaccagcagattatcctgggcggtaatttccagttcgctctcagcaaaaccagccacagcgatagcaatgcggtaatggttttcgtctaccagttcaacgttatacggagggtagccgccattactctggctctggttgttttctaagtggttaaacaaacggtcaaatccaatagcagaacggtaaagcggggataaatcaaagttacgcataatcaatagctcctgaaatcagcgagaatgtaagaccttccacaatggacaggtcaggtagccagaacacccatcaggcgcgtcctcatcggctacgatgtaaaaatgggtctggaaatgaacttttcaagccttatcagcggacttttttttgcagtttatggtctattgcatagactgagggggcagcacgaaacgttaaagtgcgatagccgccacagtgcgacgtaatgatgatgttattttcagcaagggatcgctataactcatcaggccaacacccacgatcaacagatgaatttattatgataagaaatgtgttgttagcgttcatgatatgcagcggaatgacattactcggaggatgctccagcgtgatgtcccataccggagggaaagaaggaacgtatcccggcacccgcgccagcgcaaccatgattggcgacgatgaaaccaactggggcactaagtcgctggcgattctcgatatgccgtttaccgctgtgatggacacgcttttactgccgtgggatgtgttccgcaaagacagctcggtgcgctcgcgcgttgaaaaaagcgaagccaacgcgcaagccaccaatgcggttattccaccggccagaatgcctgataactgatttagcgatcagtttcggtgatccacagctggccgccttccatccacgccagccactgaccatccggcgagaagaccacggcgtccgcagaaggtggattggcgtggttttcggttaaatactcaacctcgccgctttgcgcatgggcacaagcaattcgattatccagcacaaagcccaaccattctcctgacggatgccagttaaatgcagactgaatatccgttttgttatgggttaactggcgcggctcgccgccctgtggcgagataagccacagttgcacaatgccgttatcatcacgcattaaaaacgcgatttgcgtaccctgcggattacagcgcacccagtggcgcgggacgttgactaaccccggataagcccgatggtgggtaaaggttaaacgtcgctgcacgacgccgcgcggtggcgcgggcagggtggtttccgttccacttaacggcgcatcacctgccgctttccagccagcttcatcttgcggtaactcaacgataaacagctccggcactttctcgccctttggcgaaagtgtgtcgccaataaacgccagcgcgtgatttcctacccatccttcttcataagcacgattgatttcatcgctgccaggctgcggcgtgggcgtggttttactcaccagcacgcaccagtggctaccgctgtattcacgcggatgctgcttttgtacgttgaccgggccaaacggcgcagcaacaccgacgtttcgcaaatccagcgccggatcgagttcatgcattacatggtcgttataggtaaagctcaccctttcaccgttcgggctaaagacatgcacatggctgccgccgcgcagcgctcctggcgtatacggcgcggtaatatccattgcatcgagattgctcaccttgccgccttcagcaatgactccgcgtcgatgatggaagtcgtaatgccatgtttcatcaggattttcagggccgtgaataaagacatatttctctgacttcggatgaacggtcaccacgccgacgtgtgcgccctgtgacgcgcgatagataacctcgacctcgcctgtatggatattcacacgctcaatggtctcgccggtaaacgacgccccagaaggacgcacgtcaaataccagccactggctgtcgggcgtccaggtattggtattggtgagcaggtgattacggggagcaaaggttatctgtttcatggcgcggtcctgatacaaaacgggtcccaccatcatacttcacaaggacttcactttcagacaatagtcttttgccatcgtgatgaatgtgagtgaaaagatggaacatttcgacgtggcgattattggcctcggcccggcaggatcggcgttggcgcgaaaattagcaggcaaaatgcaggtgatcgcgctggataaaaagcaccagtgtggtactgaaggtttcagcaaaccttgcggcggtctgctggcaccggacgcgcagcgatcttttattcgcgatggactgacgcttcctgtcgatgtgatcgccaatccacagattttcagcgtcaaaactgtcgacgtcgccgcatcgctcacgcgtaactaccagcgaagctatatcaatattaatcgccatgctttcgacttgtggatgaaatcgctgatccccaccagcgttgaggtttatcacgatagcctgtgccgaaacatctggcgtgaggatgataaatggcatgtcatttttcgtgcagacggctgggagcaacatattaccgcccgctatctggtcggtgccgatggcgcaaactcgatggtgcggcgacatctctacccggatcatcaaatccgtaaatatgtcgctatccagcagtggttcgcggagaaacatccggtgccgttctactcctgcatctttgataattcgataactaactgttattcatggagtatcagcaaagacggttattttatctttggcggtgcttatccaatgaaagacggtcagacgcgtttcacgacgctgaaagagaaaatgagcgcctttcagttccagtttggtaaggcggtgaaaagcgaaaaatgcacggtgctgtttccctcacgctggcaggattttgtctgcggtaaggacaacgcctttctgattggcgaagcggcaggatttatcagcgccagttcgctggaggggattagctatgcgctggatagcgcagacattctgcgtgcggtgttactgaagcagccagagaagctcaataccgcttactggcgcgccacccgcaaactgcgtttaaaactcttcggcaagatagtaaaaagccgatgcctgaccgcaccggctttaagaaagtggattatgcgcagtggtatggcgcatattccacagttgaaagattagccaacgcgcttcacatcgcccaccagcaggatgtaagagagcgcgccaatcaacgcgacggcggagatataaaccagtgcaggtgcgaaaccgtaaccctgcgccaggtaccccaccaccagcggaacggtgatgccgcccagaccaccggcgaagttaaacacgccgccggttaaaccaatcaggcgcatcggtgccagagaagagaccagcgaccaggtaatcgaagcaaaaccgttgccgaagaatgccagcgccatcaggcacataatcatcatcggatcgttggtgtagttagcgcccataatgcaggtggagatcagcaagccgcagataatcggcgttttacgcgcaaagcccagtgaaaagcccttacgtaccagcagatccgcgacccagccagagagcaggacgccgacaaacgccgcgaggaatggcaccgtggtcataaagcctgctttcagcgccgtgattcctttttcctgggttaaatagttcgggaaccaggttaagaaaaaccacagtgtagaagccaccgcaaattgcccaagataaacgccgatcagtttacgatggaacaccagtttccagtctttggctgttaacggctgacgcgcctctttcttcaccggcgcatcaccatccaccagaccgccgccatcacgaatgtaatccagttcagctttgctgatacctttggtcaggcgcggcggctgataaaccttaaaccaaatcagcgaccagataatgccgataccaccagtgacaatgaacacccagtgccagctcaacatctcctgaatccagatcagcagcggagtcaaaaacgccagaccgacaaactgaccagacgtataaaaaccaacggcggaagcgcgttcatgttccgggaaccagctggtcaccatccggttattggtcgggaaagcgggcgcttcgaaaataccggttatcgcacgcagaccaattaatgacattaatcccgtggcaaagccctggaataaagtcgccactgaccaaccaaatatcgcaataaaataagtcacgcgagaacctacgcgatctaaaaaccaaccgccggggatctggcatagcgtataaagccaggcgaaggccgaaaatacatagcccatttccgctttcgtaatgccgaactcttcctgaatatgggcggaagccacggccaggttagcgcggtcaacataacaaatgaccaccgtaataaagatcatcaccagcgtcagataacgccgacgccccggctttgctgcattaacgggaatatccatagcgagctttctccagattttgggcatagcgaagccgctcaccatgccctgtaatttacagagggttatatttttgtattgctgttttagtgcccgatgaggggcttacgtggcaggaattaccactctgctacgctgttatcttcatgacgccagagcggattacgccagtccggggcatttttactgaactcaataactttagcttcgtcgatttccacacctaagcccggtttcgttaacggtttaaagaagccgccaaccatactgaagtcttctttgtttttcacaaagtcgagtaactccgcgcctttgttgtaatgaatgcccatactttgttcctgaagtaccgcgttataggaaacaaagtcgatatgcaggcaagccgccagtgcaatcggtccgagcggacagtgcggcgcaagggtcacatcataggcttctgccattccagcaattttgtagcattcggtaataccgcctgcatgggagagatccggttgcagaatcgaaataccgcctgcctccagcacgcgtttaaaatcgaaacgtgagaacatgcgctcacccgccgccagtggaatatgcgtttgtgccgccagtttcgggtagtattcggcttgttccgccagcaccggctcttcaataaacagcgggcgatacggctccagttctttaatcagcactttcgccattggcgcgctgacgcgaccgtggaaatcaagaccaaactcaatctgattgccaaaagcttcacgaatttgtgccacggtgttgactgccgcatctaccgcgcgggagttatcaattagccccagttcttcacaaccgttcagtttgaaggtatcgaagccgatttcgcgcagggttttaatgccgtcgataacatccgccggacgatcgccgccgacccaactgtaggctttaattttgtcgcgaaccaggccgcccatcagttgccagaccggcgcattcagcactttgcctttgatatcccataacgcctggtcgatcccggcaatggcgctcatcaggattggaccgccacgataaaatccggcgcgatacatcacttgccataagtcattgatgcgcgaaggatcctgaccaatcaaatagtcacccagctcgtgaactgccgcttccaccgtacgggcgcggccttcaatcacgggctcgccccaaccgaccacgccttcatcggtttcaattttcaggaacatccagcggggaggtaaacgatacgtggtaattttggtgattttcattgcactgcctctcgatacgccttaacaaatgctgctgcctgctgcgcggtgcgttctacggactgcccggcgcgatagagatcgctgcctaagcccgccccagcacaacctgcgtctatccactgcgccaggttttctggcgtcacgccgccaacggcaaagactgcgatgtccgatggcaataccgcttttaacgctttgatgtattgcggaccaaaagccgatgacggaaatattttcagcgcctgcgcgcccgcttcgagcgcggtaaaggcttcggtcgccgtcgcgcagccggggcagacggtcatgccgtagcccaccgcacggcggatcacttcactatggatattgggcgtaacgatgagctgacagcccatcctagcgagcgcatcgacctgttcaggtttcagtaccgtacctgcgccaatcaacgccttgtcgccatacgcatcaacgatggcggaaatgctttgctcccattgtggggaattcagcgggatttcaaccgcgtcgaacccggcgtcaatcaccgcgccaacatgcgccagcgcctcgtcgggcttaatgccgcgcaaaatggcgatcagcggaagtttagtttgccactgcatgagcgatgctccttataccagcctgaaatgccgtgtcgcccgccaccgccgtcacgtcgcaacccatcgcctgaaaggcttgctggtagcgcgcggtcagcgatgttccggcgacaagggtgatggcgtgttgatgggtcacatagtcgcgcatactggcaacctctgcgccaatcaacaaaccagagagaaattcgctgacctgttcgcggggaagtgttcccagcacatgcgaggcgcgaacttcaaaaagctgcggcaatatggcgggcgcattaaggccgcgctcaaggccagccgcgaaggcatcggcagagttttcctgcggcggcaaacctgcgccaatcaatgagtgatttaacagtaaatgatgtagttcaccggtcatcacggtgcgaaaatcgttgatttgctggctatcggcctgcacccatttgcaatgcgtaccgggcataacataaagagaggaaggagccagagttcgcgcgccgatcaattgtgtttcttcgccgcgcatcacattgtggttatcgtcatgagagacgcataatccgggaataatccagatattgtcgccaacagacgttaattgttcgccaatagacgaaaaacgggcaggaacagataaatacggagcaactttccagccgacattgctgccgaccattcctgccattaccactggcgtattctcttcacgccagtcggtcgtgacttctgctaacaccgcagccggagattttccgttcaggcgcgtgacgcctgcttctgattgcctgctctccaggcagtggtcgccctgataaagccaggcgcgaagattggtcgatccccagtcaattgcgatgtagcgagctgtcatgtgatttcctttaaccttcgtgtcgagctggcgatcatggtaagcgccgcctgctctgccgcatcgccgtcctgatgccgtatcgcatcgaacagcgccttatgttcctggagcgtttgcggcatgttggcctcatcgcccatccaggttcgttcaaaaaccgcccgctgcagcgaactgatcgcaatgctaagttgctgtaacaccgggttatgcaccgactgcagcaccgcctcgtggtagcgaatatccgcttcgttaaacgcttcgcggtcctgattgttggcaatcatctcgttcagcgccgattcaatctgcgccagatcgctggaggtcgcgcgctctgctgcccaacgggcaatcgccggttccaccagatttcgcacttcgctcatggcactgataagccgtgggtcgtagtcgttttccaacacccattgcagtacgtcagtgtcgaggtaattccactggttacgcggtgccacaaacgccccgcgataacgtttcatttcaatcagccgcttcgccatcagcgaacggaacacctcacggatgatgttgcgcgaggttgcaaactcttcacagagctccgcctcagccggaagtggcgagccaggtacgtatttgccgtgaacgatctgtttacccagcgtaatgacaatgcgatcggttttattgagagtcatggagagtccttgtgctctgtatgttcttctctactttaccccgatcgatgcataacgcggcaactttgtagtaccagcgtgatgacgttcgcgtttgccgtgtgcgtaatgtagtacaaacttatattgttgtactacaatttagatcacaaaaagaacaatgcataaaaaaatgacatgcgtcgggcagaaatctgaaaagggatatcaggcgctaaacaggagggaaagaagagtatgctttcaacggcttagctactcgtttaaaggattaatcatgaagttgaattttaagggattttttaaggctgccggtttattcccactggcgctgatgctttcaggctgtatctcgtatgctctggtttcccataccgcaaagggtagttcaggaaagtatcaatcgcagtcagacaccatcactgggctatcgcaggcaaaagatagtaatggaacaaaaggctatgtttttgtaggggaatcgctggattaccttatcactgatggtgccgatgacatcgttaagatgctcaatgatccagcacttaaccggcacaatattcaggttgccgatgacgcaagatttgttttaaatgcggggaaaaagaaatttaccggcacaatatcgctttactactactggaataacgaagaagaaaaggcactggcaacgcattatggttttgcctgtggtgttcaacactgtaccaggtcactggaaaacctaaaaggcacaatccatgagaaaaataaaaacatggattactcaaaggtgatggcgttctaccatccatttaaagtgcgattttatgaatactattcacccagaggcattccggatggtgtttccgcagcattactgccagtgactgttacgctggacatcattactgcaccgctgcaatttctggttgtatatgcagtaaaccaataatcagtaagcgggcaaacgcgtttatgctgtttgcccgtccactgattaattcagcacatacttctcaatagcaaacgccacgccatcttcaaggttggatttggtgacaaagttcgccacttctttcaccgaaggaatagcgttatccatcgccacaccgacgcctgcatattcaatcattgcgatgtcgttttcctgatcgccaatcgccatgatttcttccggtttaatacctaacacgtcggccagtgatttcacacccgtacccttgttaacgcgtttatcgaggatttcgaggaagtacggcgcacttttcagcacggtatatttctctttcacttcctgcggaatacgcgcaatagcctggtcgaggatggcgggttcatcaatcatcatcactttcaggaactgggtattggggtccattttctccgcttcgcagaacaccagcggaatggtggcaacgaaggattcatgcaccgtgtagtagctgatatcgcgatttgctgtatacagcgtggtgcggtccagggcgtggaaatgagaaccgacttcgcgagagagtttttccaggaaacggtagtcgtcatagctgagagcggtttgcgccacggtgctaccatcggcggccttctgtaccaacgcgccgttataagtaatgcagtagtcgcccggctgttccatatgcagctctttcaggtagttgtgaacgcctgcataagggcgacccgtcgttagcacgacattcacgccacgggcgcgagctgcggcaatcgcatttttaacggcgggtgaaatggtgtgatcgggcagcagaagggtgccatccatatcgatagcaatgagtttgatagccatgagttccccaggtagattggttcctgacccatgctaacgcgattccgctcaaaaatcagtacaacacccgagggaaaagggggatgcaacgcgggttgcatgctccccatttgcttagcggaagagtttccctttcagcagttccatacctgcggaaagcagatcgttattggcttgtggtgacacttcaccttgcggtgagagcgcatcaataatcttcggcaattgctctgccagtaaactggaagctgtactggtatccacgccaagtttttgcccgagatcggacaccgcatttgtgccgagcgccgattccagttgctcgccactaaccgattgattgccctgttgattactcagccaggttgagagaatggcccctaagccgccactttgcagtttttccagcagcacctgaatgccgccctgctcctcaacccaacttaaaatagcctgatatttccccgcatcgcctttcagaaaggcaccgacaacttcatcaaaaagccccatgataatcacctgtaaagcgttacgtgttgacccaaaaagtatagatttgcgggatgataattgcggattgcagaaataaaaagggcggagatgatctccgcccttttcttatagcttcttgccggatgcggcgtgaacgccttatccggcctacaaaatcatgcaaaatcaatatattgcaggagtctcgtaggactaataagcgtagcgcatcaggcacgctcgcatggttaacgccattaaatatcaatattcgccgctttcagggcgttctcttcaataaacgcacgacgcggttctacggcgtcgcccatcagcgtggtgaacaactggtcagcggcaatcgcatccttaacggtaacgcgcagcatacgacgactttccgggtccatggtggtttcccacagctgttccgggttcatctcgcccagacctttataacgctggatggagagaccgcgacgagactctttcaccagccagtccagcgcctgctcgaagctggctaccggctgacgacgctcgccacgttcgataaatgcatcttcttccagcaagccacgcagtttctcacccagcgtgcagatacgacgatattcgccaccagtgataaattcgtgatccagcggatagtcagtatccacaccgtgggtacgcacgcgaacaatcggctcgaacaggttttgttcggcattggtgtggacatcaaacttccactggctgccgtgctgttctttgtcgttcagttcgctgaccagcgcgttcacccagcgggtaacggtctgctcatcagagaggtcggcttccgtcagcgtcggctgatagataagctctttcagcattgctttcggataacgacgctccatgcggttgatcattttctgcgtcgcgttgtactcagacaccaatttctctaacgcttcgccagccaatgccggtgcgctggcgttggtgtgcagcgttgcgccatccagcgcgatagagatctggtactgatccatcgcttcgtcgtctttaatgtactgttcctgcttgcctttcttcactttgtacagcggcggctgagcgatgtagacgtgaccgcgttcaacgatttccggcatctgacgatagaagaaggtcaacagcagcgtacgaatgtgcgagccgtcgacgtccgcatcggtcatgatgatgatgctgtgataacgcagtttgtccgggttgtactcgtcacgaccgataccacagccaagcgcggtgataagcgtcgccacttcctgagaagagagcatcttatcgaagcgcgctttctcaacgttgaggattttacccttcagcggcagaatcgcctggttcttgcggttacgcccctgcttcgcagagccgcccgcggagtccccttccaccaggtacagttcggaaagcgccggatcgcgttcctggcagtctgccagtttgcccggcaggcccgctaagtcgagcgcacctttacggcgggtcatttcacgcgcgcgacgcgccgcttcacgggcacgggcagcatcgataattttgccaaccacgattttcgcgtcggttgggttttccagcaggtattctgccagcagttcgttcatctgctgttcaaccgctgatttcacctcagaagaaaccagtttgtctttggtctgggaggagaatttcgggtccggcactttcacggaaacgaccgcaatcaggccttcacgcgcatcgtcaccggtggcgctaactttggcttttttgctgtagccttctttgtccatgtaggcgttcagggtacgggtcatcgccgcacggaagcctgccaggtgagtaccgccgtcacgctgcggaatgttgttggtaaagcagtagatgttttcctggaagccatcgttccactgcaacgccacttcgacgccaataccgtctttttcagtggagaagtagaagatattcgggtggatcggcgttttgttcttgttcagatattcaacgaacgccttgatgccgccttcatagtggaagtggtcttctttgccgtcgcgcttgtcgcgcagacgaatggaaacgccggagttgaggaacgacaactcacgcagacgtttcgccagaatttcatattcgaactcggtcacattggtgaaggtttcgaggctgggccagaaacgcaccatggtgccggttttttcagtctcgccggtaaccgccagcggagcctgcggtacaccgtgttcgtagatctgacggtgaattttaccctcgcgctggataaccagctccagtttttgcgacagggcgtttactaccgaaacaccaacgccgtgcagaccgccggacactttataggagttatcgtcaaatttaccgcctgcgtgcagaacggtcatgatcacttccgccgccgatacgccctcttccgggtgaataccggtcggaataccgcgcccgtcatcctgtacagagacagagttatcggcgtgaatggtgacgataatttctttacagtgacccgcgagcgcttcgtcgatagcgttatctaccacctcgaataccatgtggtgcagaccggtgccgtcatccgtgtcgccgatatacatacccgggcgcttacgcaccgcatccagccctttcaggactttgatactggaggagtcataagaattcgacatcaacgtttctcgctcatttatacttgggttaatccgttattttacccttttccacggtaaacatcttcgaattttcgtccgacatgtctataacgtgttcagcactgatcgcgctgacaaagacctgtgattgcgtcgcttttaagcggctggcaagcagcccgcgacgctcatcatcaagctcagaggcaaaatcatctatcaggtagagacaccgccgcccgctttcacgggtgaggaactctccttgcgccagacgtaaggcgcacatcaacagcttaagctgcccacgcgataaggtatcttccaccggcgcaccgtcggcgcgaatgcgtaagtccgctttatgcgggccatgcgcggtgtaggttagctggcgatcgcgttcaaaattacgttccagcacctcagcatattctgtctctttctcccagccgcgctggaaagagaaagtcagagaaaactcagggagaaattgcttacaggtatcggccatatcggccgcgataccggcgctatactccgcgcgccaggtgctgatttgctccgccagcgggatcagttctttatcccacgggcgtagctgttcgtaacgtgtcacctggcgcagcgccgcattgcgctgcttgagcaatcgcttgagattgctccaggcggtgaaaaatccgggttcgttgtgaaagcatccccagtcgaggaatgctcttctgtatttggggccgccgttgagtaaagtaaacccttctggcgttatcagctgcattggcatcaggtgcgccagttccgcgactttatgcccgtcagtaccgtcgatgcggactttgctgtcgccctgtttgtccttggttaagccaatcgccgtctcgcgctcttcgccctgtaatcgcccatggagaacaaatgcctcctgctcatggcgaatgacgcgaccaatctgcaaactgcgaaacgcccgaccatggccgagcgtatagatggcttccagcacgctggttttgccactgccgttggcacctaccagaaagttaaagccgggagataaagcgagatccgcggtttcaatgttgcggaaatcgcggatcaacaagcgggtgagggacattacagtctcattggcatgacaacataggcagccgactgtgatgcggcatcttcaatctgcacgctggaaaccgaatcggtcagcatcatgcggacgttttcgcatttcagcgcgttcagaacatccagcacatagctgacgttgaagccgatttccatctccgcaccgctataggtaacgtcgaggatctcttccgcttcttcctgttccgggttgttggcggtgattttcagctggttttcgctgacatacaggcgcacgccgcggaatttctcgttagagagaattgccgcacgggcaaacgcctgcttgagcagatcgcagccagcttccagatgtttgtccggattcttcggcagaacgcggcggtaatccgggaagcgaccatccaccagtttggaggtgaagataaagtcgccaacgtgggcgcgaatattgttgctgccaatctgcacgcgcagcggattgtcgccgccgtcgagcatacgcatcagttcaatcacgcctttacgcggtacgatcaccgaatggcttggcaaagattgaccaattggcattgaacagaccgccagacggtggccgtcggttgccacggtgcgcagttcttcaccttcggtttcaaacagcataccatttaagtaatagcgaacgtcctgatgcgccatcgaaaactgggtcgcttcaatcagacgcttcatcgttgcctgcggcagggtaaattcgacttcactctgccagtcatcgaggttcgggaaatccgccgctggcagggtagacagcgaaaaacggctacgcccggagcgcaccagcatccgctcaccttccagctgcacggcaatttccgcgccttcaggcagaccacggcagatatcaaagaatttgcgcgccggaacggtcgtcgctcctggctcgtgtggctgaaccagcgcaacgcgtgccaccatttccatctcgagatcagtaccggtcagcgacaacgtaccgtcagcaacctgtaacagcagattaccgagaatcggtagcgtaggacgaccacctaacggaccgctcacctgttgtagcggttttaataaatgctcacgttctacggtaaatttcataggtttacgatgacaatgttctgattaaatttgaaaaatcttctttgatatcgtggctctcttcacgcaactgctcgatcttacggcaggcatgaagcaccgtcgtgtggtcacgaccaccaaacgcatcgccaatctccggcagactgtggttagtcagctctttcgccagcgccatcgccatctggcgcggacgcgccaccgagcgggatcgacgcttggaaaggagatccgcaactttgatcttgtagtactccgccaccgtcttctgaatattgtcgatggtgaccagtttttcctgcaatgccagcaagtcgcgcagcgcctcacgcacgaagtcgatggtgatcgcccttccggtaaagttggcgttggcaatgacgcggttcagcgccccttccagctcacgtacgttagatcgtagacgcttggcgataaagaacgccacttcacccggcaaacgaatgtcgttttcgtcggcctttttcatcaggatcgccacacgggtttccagctctggcggttcgatcgccacagtcagtccccaaccgaagcgggatttcaaacgatcctcaacgccgttgatctctttcggatagcgatccgaggtgagaatgatctgttgattaccttccagcagggcgttgaaggtgtggaaaaactcttcctgagatcgttctttattagcaaaaaactgaatatcgtcgatcagcagtgcatctacggaacggtagtagcgtttaaactcttcgatcgcgttgttttgcagggctttaaccatgtcctgaacaaagcgctcggagtgcatataaaccactttggcattcggcttgcgcgccataatgccgttacccaccgcatgcagcaggtgagttttacccagacccgtgccgccataaaggaacaacgggttataggcaccgccagggttatccgccacctggcgagccgccgcgcgcgccagttggttagatttaccttcaacgaagttatcaaacgtgtgtttgacgtttacgttagaacgataggtcggttctgccggggccgggacgttatcccaacctgagcgcgtagaaggcgcagcacgttgcggctgcgtttgcgccacctgtgcaggggccgcgacgttgctcgtcactgccgcttgtggcgtttgcgtcaccggtttggtgccgacttcaaaacgcagctgtggggcatccgctccgcagaaactggttagcagtccattgatattattaaggtacttgtcccgtacccaatcgaggacaaaacggtttggcgcgtacagggccagcgtgttatcgctcagttccgcctgcaatgggcgtatccacatactgaattctgtggctggtaactcatcctgcaatcgggcaagacactgctgccaaagcgaaagtgacacggcggactccactcgaacaaaagtcgataatgactaaggctgaaacattcatgattgttgacgtacgtcgaaaagaccctgcttgagggtgacgcacgaaccgctgtctgcggttatatgcccgatcaagatcctgcaaaacgatcgggaccgcggatcatagcctaaactgcgcaagagatcttctgtttctcacagattttcccgatttatccacaggactttccagaactcgctaagtgtaaacgatcctgccgcgaggcgggcacgatttacgccgcatattggaaaatttaatgaccatagacaaaaattggcttaatcgatctaataaagatccaggacgatccttgcgctttacccatcagcccgtataatcctccacccggcgcgccatgctggttttcactggtgtgaggtcgtacattttccctgcgaaaaggtgcggaaaagcgcggtaaataaggaaagagaattgactccggagtgtacaattattacaatccggcctctttaatcacccatggcttcggtgtccatcgtttcatttttcggcggatatccaataaagccattgaatttattcaagtttaggtagaaatcgccatgaaacgcacttttcaaccgtctgtactgaagcgcaaccgttctcacggcttccgtgctcgtatggctactaaaaatggtcgtcaggttctggcacgtcgtcgtgctaaaggccgcgctcgtctgaccgtttctaagtaataaagctaacccctgagtggttaagctcgcatttcccagggagttacgcttgttaactcccagtcaattcacattcgtcttccagcagccacaacgggctggcacgccgcaaattaccattctcggccgcctgaattcgctggggcatccccgtatcggtcttacagtcgccaagaaaaacgttcgacgcgcccatgaacgcaatcggattaaacgtctgacgcgtgaaagcttccgtctgcgccaacatgaactcccggctatggatttcgtggtggtggcgaaaaaaggggttgccgacctcgataaccgtgctctctcggaagcgttggaaaaattatggcgccgccactgtcgcctggctcgcgggtcctgatagccctcattcgggtctatcaacgcctgattagtccgctactcgggccgcattgtcgtttcactccaacctgttcaagctacggaattgaggcattgcgcaggtttggagtgataaaaggcagttggttgacggtgaaacgcgtattaaaatgccaccctttacaccctggtggtgacgatcccgtcccgcccggaccatttgataccagagaacactaacgatggattcgcaacgcaatcttttagtcatcgctttgctgttcgtgtctttcatgatctggcaagcctgggagcaggataaaaacccgcaacctcaggcccaacagaccacgcagacaacgaccaccgcagcgggtagcgccgccgaccagggcgtaccggccagtggccaggggaaactgatctcggttaagaccgacgtgcttgatctgaccatcaacacccgtggtggtgatgttgagcaagctctgctgcctgcttacccgaaagagctgaactctacccagccgttccagctgctggaaacttcaccgcagtttatttatcaggcacagagcggtctgaccggtcgtgatggcccggataacccggctaacggcccgcgtccgctgtataacgttgaaaaagacgcttatgtgctggctgaaggtcaaaacgaactgcaggtgccgatgacgtataccgacgcggcaggcaacacgtttaccaaaacgtttgtcctgaaacgtggtgattacgctgtcaacgtcaactacaacgtgcagaacgctggcgagaaaccgctggaaatctccacctttggtcagttgaagcaatccatcactctgccaccgcatctcgataccggaagcagcaacttcgcactgcacaccttccgcggcgcggcgtactccacgcctgacgagaagtacgagaaatacaagttcgataccattgccgataacgaaaacctgaacatctcttcgaaaggtggttgggtggcaatgctgcaacagtatttcgcgacggcgtggatcccgcataacgacggtaccaacaacttctataccgctaatctgggtaacggcatcgccgctatcggctataaatctcagccggtactggttcagcctggtcagactggcgcgatgaacagcaccctgtgggttggcccggaaatccaggacaaaatggcagctgttgctccgcacctggatctgaccgttgattacggttggttgtggttcatctctcagccgctgttcaaactgctgaaatggatccatagctttgtgggtaactggggcttctccattatcatcatcacctttatcgttcgtggcatcatgtacccgctgaccaaagcgcagtacacctccatggcgaagatgcgtatgctgcagccgaagattcaggcaatgcgtgagcgtctgggtgatgacaaacagcgtatcagccaggaaatgatggcgctgtacaaagctgagaaggttaacccgctgggcggctgcttcccgctgctgatccagatgccaatcttcctggcgttgtactacatgctgatgggttccgttgaactgcgtcaggcaccgtttgcactgtggatccacgacctgtcggcacaggacccgtactacatcctgccgatcctgatgggcgtaacgatgttcttcattcagaagatgtcgccgaccacagtgaccgacccgatgcagcagaagatcatgacctttatgccggtcatcttcaccgtgttcttcctgtggttcccgtcaggtctggtgctgtactatatcgtcagcaacctggtaaccattattcagcagcagctgatttaccgtggtctggaaaaacgtggcctgcatagccgcgagaagaaaaaatcctgattcggtgagttttcgctaaaataagggcggtcagttgaccgccttttttcttttcgtagggcggataagcaccgcgcatccgccacacaaagcaacaggaacatcatgagcgataatgacactatcgtagcccaggccacgcctccgggacgtggcggcgttggcatcctgcgcatctccggcttcaaagcccgtgaagttgccgaaaccgtgctgggtaaactacctaagccgcgctacgccgattatcttccgtttaaagacgccgacggcagcgtgctcgatcaggggattgcgctatggttccctggcccgaactcgttcaccggcgaagatgtgctggaactgcaaggtcatggcggtccggtgatcctcgacctgctgttaaaacgcattctgaccattcccggcctgcggattgctcgccctggtgagttttccgaacgcgcgtttcttaacgataaactcgacttagcccaggccgaggcgattgccgatcttatcgacgccagttcggaacaggcggcccgttcggcacttaactcgctgcaaggcgcattctccgcacgggtcaaccatctggtggaagccctcacccacttgcgcatttacgtcgaagcggcaattgatttccctgatgaagagatcgatttcctctccgacggcaaaattgaagcccagcttaatgacgtgattgccgatctcgatgcagtgcgtgctgaagcacgtcagggtagtttgttgcgcgaagggatgaaggtggtgattgccggacgtcctaacgccggtaaatcgagcctgttaaacgcgctggcgggccgtgaagcagcaatcgtaactgatatcgccggaaccacacgtgacgtgctgcgtgagcatatccacattgacggaatgccgctgcatatcatcgataccgctgggctacgtgaagccagtgacgaagtggaacgtattggtatcgagcgcgcgtggcaggaaattgaacaggccgaccgcgtgctgtttatggtcgatggcaccacaacagacgccgtggatccggcagagatctggccggaatttatcgcccgtctgccagcgaaactgccgatcaccgtggtgcgcaataaagccgatatcaccggcgaaacgctgggaatgagtgaagtgaacggtcacgcgttaattcgtctctcggcaaggacaggtgaaggcgtggaggtgctgcgtaaccatctcaaacagagcatgggctttgacaccaacatggaaggcggcttcctggcgcgtcgtcgccacctacaggcgctggaacaggcagcggagcatttgcagcaaggtaaagcgcaactgttaggtgcctgggcgggtgaactgctggcggaagagttgcgcctggcacagcagaacttaagcgaaatcaccggggaatttacttcagacgacctgctggggcggattttctccagcttctgtattggtaagtaaccgcgcttacgaagccgtattctgactgtcagatgcggcttcgcttcattgttagcactcctgttattcctcaaccctttttttaaacattaaaattcttacgtaatttataatcttaaaaaaaagcatttagtattgctccccgaacgattgtgattcgattcacatttaaacaattttagaatagacaaaattcttgagtattatactgtagcctcgtgtctttcgaggataagtgcattatgaatatcttacatatatgtgtgacctcaaaatggttcaatatcgacaataagattgtcgatcaccgcccttaatttacccttctgtagccatcaccagagccaaaccgattagattcaatgtgaacgattagtttgctatatcttaattttgccttttgcaaaggccatctctcgtttatttacttattttagtaaatgatggtgcttgtatatatacatggcgaattaatggatattgcagatgtaatattcacagggatcactgtaattaaaataaatgaaggattatgtaatggaaaactttaaacatctccctgaaccgttccgcattcgtgttattgagccagtaaaacgtactactcgcgcttatcgtgaagaagcaattattaaatccggtatgaacccgttcctgctggatagcgaagatgtgtttatcgatttactgaccgacagcggcaccggggcggtaacccaaagtatgcaggcagcgatgatgcgcggcgacgaagcctacagcggcagccgcagctactatgcgttagccgagtcagtgaaaaatatctttggttatcaatacaccattccgactcaccagggccgtggcgcagagcaaatttatattccggtactgattaaaaaacgcgagcaggaaaaaggcctggatcgcagcaaaatggtggcattctctaactatttctttgataccacgcagggccatagccagattaacggctgtaccgtgcgtaacgtctatatcaaagaagccttcgatactggcgtgcgttacgactttaaaggtaactttgaccttgagggattagaacgcggtattgaagaagttggcccgaataacgtgccgtatatcgttgcaaccatcaccagtaactctgcaggtggtcagccggtttcactggcaaacttaaaagcgatgtacagcatcgcgaagaaatacgatattccggtggtaatggactccgcacgctttgctgaaaacgcctatttcatcaagcagcgtgaagcagaatacaaagactggaccatcgagcagatcacccgcgaaacctacaaatatgccgatatgctggcgatgtccgccaagaaagatgcgatggtaccgatgggcggcttgctgtgcatgaaagacgacagcttctttgatgtgtacaccgagtgcagaaccctttgcgtggtgcaggaagggttcccgacatatggcggcctggaaggcggcgcgatggagcgtctggcggtaggtctgtatgacggcatgaatctcgactggctggcttatcgtatcgcgcaggtacagtatctggtcgatggtctggaagagattggcgttgtctgccagcaggcgggcggtcacgcggcattcgttgatgccggtaaactgctgccgcatatcccggcagaccagttcccggcacaggcgctggcgtgcgagctgtataaagtcgccggtatccgtgcggtagaaattggctctttcctgttaggccgcgatccgaaaaccggtaaacaactgccatgcccggctgaactgctgcgtttaaccattccgcgcgcaacatatactcaaacacatatggacttcattattgaagcctttaaacatgtgaaagagaacgcggcgaatattaaaggattaacctttacctacgaaccaaaagtattgcgtcacttcaccgcaaaactgaaagaagtttaattaatactacagagtggctataaggatgttagccactctcttaccctacatcctcaataacaaaaatagccttcctctaaaggtggcatcatgactgatcaagctgaaaaaaagcactctgcattttggggtgttatggttatagcaggtacagtaattggtggaggtatgtttgctttacctgttgatcttgccggtgcctggtttttctggggtgcctttatccttatcattgcctggttttcaatgcttcattccgggttattgttattagaagcaaatttaaattatcctgtcggctccagttttaacaccatcaccaaagatttaatcggtaacacctggaacattatcagcggtattaccgttgccttcgttctctatatcctcacttatgcctatatctctgctaatggtgcgatcattagtgaaacgatatcaatgaatttgggctatcacgctaatccacgtattgtcgggatctgcacagccattttcgttgccagcgtattgtggataagttcgttagccgccagtcgcattacctcattgttcctcgggctgaagattatctcctttgtgatcgtgtttggttctttcttcttccaggtcgattactccatcctgcgcgatgccaccagcaccactgcgggaacgtcttacttcccgtatatctttatggctttgccggtgtgtctggcgtcatttggtttccacggcaatattcccagcctgattatttgctatggaaaacgcaaagataagttaatcaaaagcgtggtatttggttcgctgctggcgctggtgatttatctcttctggctctattgcacgatggggaatattccgcgcgaaagctttaaggcgataatctcctcaggcggcaacgttgattcgctggtgaaatcgttcctcggcaccaaacagcatgggattatcgagttttgcctgctggtgttctccaacttagctgttgccagttcgttctttggtgtcacgctgggattgttcgattatctggcggatctgtttaagattgataactcccacggcgggcgtttcaaaaccgtgctgttaaccttcctgccacccgcgttgttgtatctgatcttcccgaacggctttatttacgggatcggcggtgccggactgtgcgccaccatctgggcggtcattattcccgcagtgctggcaatcaaagctcgcaagaagtttcccaatcagatgttcacggtctggggcggtaatcttattccggcgattgtcattctctttggtataaccgtaattttatgctggttcggtaacgtctttaacgtgttacctaaatttggctaaatccttcaggaagccagccatttcgctggcttcttgcctgtcaggaaatcacttatgtccaaatggcaactcgcctgattctccttcaccacgtatgctttgcgtcaccttactatcaggacgctttagcccatgtcccgctttttgatttgtagttttgccctggttttactttatcccgccgggattgatatgtacctcgttggtttaccgcgcatcgccgccgatctcaatgccagcgaagcgcagttgcatattgcgttctctgtttatctggctgggatggcagctgcgatgttatttgccggtaaagtggccgatcgttcagggagaaagccggtcgccatccccggcgcggcgctatttattatcgcctcggtgttctgttcactggctgaaaccagcacgttatttcttgcagggcgctttctacaggggttgggcgcgggctgttgttacgtggtggcgttcgccattttgcgcgacacgctggatgatcgacgtcgggcaaaagtgctgtcattactcaacggtattacctgcatcattccggtgttagcgccagtgctcggacatctgattatgcttaaattcccgtggcagagtctgttctgggcgatggcaatgatgggcatcgcggtactgatgttgtctttgtttattttaaaagaaacgcgccctgcggcccccgcagcttcggacaaaccacgagaaaatagcgagtcgctgcttaaccgttttttcctcagccgtgttgttatcaccaccctcagcgtttcggtgatcctcactttcgtcaatacatcgccggtattgctgatggaaatcatgggttttgagcgcggagaatacgccaccattatggcgttgactgctggcgtcagcatgaccgtttcattctccacgccatttgcgctgggaatttttaagccacgtacgttgatgatcacctcgcaggtgttattccttgcagcggggatcacccttgccgtttcaccttcccatgcggtttctctgtttggtatcacgctgatttgcgccggtttctcggtaggttttggcgtagcgatgagtcaggcgttaggaccattttcattacgcgcgggcgtagccagctcgaccttaggtattgcgcaggtttgcggttcgtcactgtggatttggctggcagcggtggttggtatcggcgcatggaatatgctgatcgggattctgattgcctgtagcatagtgagcctgttactgattatgttcgtcgcgcctggacgccccgttgccgctcatgaagaaatccatcaccacgcttgatctcaatctgctgctctgtctgcaactgctgatgcaggagcgcagcgtgaccaaagcggcgaagcggatgaacgtgaccccttcagcggtgagtaagtcgctggcaaagttaagagcgtggtttgacgacccgctctttgtgaactcaccgctggggctgtcgcccacaccactaatggtcagcatggagcaaaatctggcggaatggatgcaaatgagcaatctgctgctggataaaccgcaccaccagacaccgcgcggcctgaagtttgagttggcggcggaatcgccgctgatgatgatcatgcttaatgcgctgtcgaaacggatctaccaacgttacccgcaggcgaccatcaaactacgtaactgggattacgattccttagatgccattactcgtggtgaagtggatattggtttttccggtcgcgaaagccatcctcgctcgcgggagctgttaagctcgctaccgttagccattgattatgaagtgctgtttagtgatgtaccctgcgtctggttacgcaaagatcatccggcactgcatgaaacgtggaatctggacacctttttacgttatccgcatatcagcatttgctgggaacagagcgacacctgggcgctggacaatgtgttacaggagctggggcgcgaacgcacgattgctatgagcctgccggaatttgagcagtcactgtttatggcagcgcaacccgacaatctgctactggcgaccgcgccgcgctactgtcagtactacaatcaactccatcaactgccgttggttgctcttcctctcccgtttgacgaaagccagcaaaaaaagctggaagttccttttaccctgctgtggcataaacggaacagccataatccgaagatcgtctggttacgggaaaccattaaaaacctttacgcgtcgatggcataaccgaatcgtatgaaacgcgacccaatttcacaataaaatgtaaaaaagttgtaataagcttgtctgaatcgaacttttagccgctttagtctgtccatcattccagtaaatgattactcttatattcataatggaccattaagcatggagcgaaaaatggcgactcactttgcccgagggattttaacggaaggacatctgatttctgttcgtctcccctcccagtgtcatcaagaagcccgaaacattccccctcatcgtcaaagccgttttctggcgtccagaggtttactcgcagaactgatgttcatgctgtatggcattggcgaattgccggaaatcgtcaccctgccgaaaggtaaaccggttttcagtgataaaaatttgccttcgttttctatttcctatgccgggaatatggttggcgtggcgttaacaaccgaaggtgaatgtggcctcgatatggaactacagcgtgcgacgcgcgggtttcatagcccacacgcgcccgataaccacaccttttccagcaatgaatcgctatggatcagtaaacaaaacgatcctaacgaagcgcgggcgcagctcatcacgctgcgccgaagcgtgctaaaactaaccggtgatgttttgaatgacgatccgcgcgatctgcagctgctgcccattgccggacgcctgaaatgtgctcatgtaaatcatgtagaagcgttatgcgacgcggaggacgtgctagtgtggtccgtggcggtcacgcccgcgattgaaaagctcagtgtctgggagttagatggcaaacacagctggaaaagcctgccggatattcacagccgcgccaacaatcctaccagccggatgatgcgttttgcccagctctctaccgtgaagtctttttcgccaaattgatagacaaccacaggagtcattatgtctgaaaaattgcaggtggttacgttactggggagcctgcgcaaaggctcatttaatggcatggttgcacgtaccctgccgaaaattgctccggcgagcatggaagtcaatgcgttaccttccattgccgacattcccctgtatgacgctgacgtacagcaggaagaaggttttccagcaacggttgaagctctggcggaacagatccgtcaggctgacggtgtggtgatcgtcacgccggaatataactactcggtaccgggtgggctgaaaaatgccatcgactggctttcccgcctgccggatcaaccgctagccggtaaaccggtgttgattcagaccagctcaatgggcgtgattggcggcgcgcgctgtcagtatcacctgcgccagattctggttttcctcgatgcaatggtgatgaacaagccggaatttatgggcggcgtgattcagaacaaagttgatccgcaaaccggagaagtgattgatcagggtacgctggaccacctgaccgggcaattgaccgcatttggtgagtttattcagcgagttaagatctaaataaaaaacccgccagcaatcatgcatggcgggtttttaacgcgctatcgattttagtgagcgtcgataaagacaatcttcaggataaacagcagcgcaacgatgattacgcacgggcttagatcacgcagacgtccggtaccgattttcatcacgcagtaggagataaagcccagcgcgataccttcggtaatcgagaagctgaacggcatcatcacggcggtaataaacgccggaacagattcagtaagatcctgccagttcacgcgtgccagactggaagtcatcagcacgccaacgtaaatcagcgcaccagctgcagcgtagcctggcaccatccccgccagcggcgacagaaagataaccagcaggaacagcagaccaacaaccactgccgtcagaccggtacgaccgccaaccgatacgccggaagaggactcaatataagccgtaacggaagaagtaccgataaacgaaccggtcacggaagagatactgtcgacatacagcgcctgcttcatgcgcgggaatttacccttctcatccgccaggcctgctttatcggtcacgccaatcagcgtaccggaggagtcaaacaggttgaccagcatgaaagagaaaatcacccctgccagcccgaggttaaacgacccggctaaatctacatgacccacaactgtcattacgctcggcggcgcagaaacgatgccattgtagtgcacatcacccagcatccagcccagcagcgtcgtcaccacgatagaaaccagcaccgctgcgtgaatgttgcgcgaggccagaatagcaatgatgaagaagccgaggatacccagaagtacgctgtgagaagtcagattaccgatgctcaccagcgtttccgggttagcgacaatcacacctgcgtttttcagccccatcatgccaatgaacagaccgataccgctggtaatacccacacgcagactcaccggaatgttggcaatcatccagtagcgaacgcggaaaatcgtcagtaacagcagacctatcgcgccccagaagattgcgcccatcccgacctgccacggcaagcccatcgcctgtacaacgacaaaagcgaagaacgcattcaggcccatagcgggtgccagtgcaactggcaggttagcaaacagtcccatcataatactgccgaatgcagcgatcagacaggtagtgacgaagacggcgctggtatccatgccagcaacgccaagaatttgcgggttaacaaaaacgatgtaaaccatcgtcaggaaggtggtaaaaccggcgatcacttcggtccgtgccgtcgtgccatgttcgcgcagtttaaacacgcgttccagcatcccctggccagaagcctgggttgtgtgttgttgactcattatctatttccgaacaaggagggaaaatccgtcgctatcgtataccaaaatgagacaatatggacggctgaagataactttttttcattgtatttgcttatacggcaacgattgcgtcatgcgaattggcatgacgaaaacgttaaactaacgataaaggaaaggcatgtcccagatagaagcggtatttttcgactgcgacggtacgctggtcgacagtgaagtcatttgctcccgcgcatatgtaacgatgtttcaggaatttggtattacgctcgatcctgaagaggtattcaaacgtttcaaaggtgtaaaactgtacgaaattatcgatattgtttcccttgaacatggtgttacgttagcgaaaacagaagctgaacacgtttaccgtgcagaagtcgctcggctgttcgattcagaactggaagccatcgaaggggctggagcgctcctgtcagctatcactgcgccaatgtgtgtggtatctaacggcccaaataacaaaatgcagcattctatgggcaagctgaatatgttgcactacttcccggataaactgttcagcggctacgatattcagcgctggaagccagacccggcgttaatgttccatgcggcaaaagcgatgaatgtaaatgtagaaaactgcattctggttgatgactcagttgccggtgcgcaatctggtatcgacgcaggtatggaagtgttctacttctgcgccgacccgcacaataagccgatcgttcacccgaaagtcaccacctttacccatctttcgcagttaccggaactgtggaaagcgcgtggttgggatattacggcatagttcttcacactcccttcacttaccccgcttaaattggcgctcaaaggtaagtaaagggagtttgatatgtctgtttcacgtcgggtaatacatcacggactttattttgcggttttaggaccgttaattggtgttctgtttcttgtcctctacatattcttcgcaaaagaaccgctggttcttttgcgaagaatacaggtacttccattgtttctcttattgtcgattactacgggagttattcctgcattgttaaccggcgtgatggtcgcctgtctgccggaaaagatcgggtcacagaaaaattatcgttgtctggctggtggcataggtggcgtcgttatcaccgagatctattgtgcagttattgtacatattaagggcatggcttcctcggagttgtatgaaaacattctttctggtgacagtctcgttgtccgcatcattcctgcattgctggcaggtgtggtgatgagcagaatcattacccgtctgcccggattggatatttcatgtcctgaaacagactctttaagttaagcgggatactttatctttgggctactcaaaagcagacaggatgttactatgactcaaaatatcaggccgttaccccaattcaaatatcatcccaagccactggaaacaggcgcatttgaacaggataaaaccgtagagtgcgattgctgtgaacaacagacgtcagtttattactcgggtcccttttattgcgttgatgaagttgaacatctctgtccgtggtgtattgcggacggttctgctgctgaaaagtttgcaggtagttttcaggatgatgccagcatagaaggtgttgaatttgagtatgatgaagaggacgaatttgccggtattaagaacacatatcctgatgaaatgctgaaagagttggttgaacgcacgccaggttatcatggatggcaacaggaattctggcttgcgcattgtggcgatttctgtgcttttatcggctatgtgggctggaatgatataaaagatcgcctcgatgaatttgccaaccttgaagaagattgtgagaatttcggtattagaaattctgatctagctaaatgcctgcaaaagggtggtgattgtcagggttatctcttccgctgtctccactgcggcaagctgagactgtcgggtgatttttcgtagttatttaaataatgagaacaggccggagcgtaattcatacatccggccttatttcttcagcttaatcgagcgctaattctgcggcagcggctttatcagcgattaccatcagcgaaggatgcagctgcaacacggaagctggaacatcttcggtaaccggaccttgcagcacatttttcagtgcctgcgctttacctgcgccactgacaattatcagcaagtttttcgccgccatgatgcttttcggccccatcgtcacgtagctgtcaggcactaacgaaaagtcgccgcccaactcaccatgcgccacaatatcaaccatctctccctggatcgggaactccacggtttgctcatggaaatgggtcgtattcggcaaattgccacaaaaatgaccatctgcacctaatcccagcaccaccaaatccaggccgccttcacgcgccagtttctgatcatgctcgcggtagttatcaatagtgagcttctggatattctcttctttgatccccgcagggtgaaaaacagattacgcagattggtaatcgttacaccttctccctctttgccgcgaaagggaatttcatcggaattatagaaatagcagttatcataccagggcttacctttaaccagggtggtgaggtattcatacatgcctttgggcgtgctaccggcggtaattgccaggttaacacgacgcgtcttcgacatataaccaagcagatggtgtgccgcgacacggctcatttcctggtaatcttcggtaatgattaatttcatcttagtgccttattttatttaaataatttctgtacgaaggctgcataggcaggccgccagacatccatttcatggttcaggccgggatattcctggtaatcaaacttaatttttttctgctcaagctcagttttcagcccggcgatatccttgccggttacgacatctttatcaccaacgaccacagtaaaattacgtagttgctggttaatagctgccggatcgttcagccgggccgcgacaccttcatccggtacggttgtcgtggtaacaccactgaatgtggccagccagccaaagctttccagatgattcattccggaaaccagcgcctggtacccgccttgtgaaagccctgccagcgcgcgaccatcggcatctttacggacattaaaacgcttgctaatcagcgggataatatcgttcatcagttcgcgatctgccgctttagcattcagcggataaaagactttacgtctttcctgaggcacgaaatcttcgggaataatgcccttcgcatcggtttcggtatccgggatcaccaccagcatcggtttaattttcccttcagccagcaggttatccatgatttgcgggatacgcccctgatcgatagcggaacgtccggtatcaccaaaaccgtgatagaaatagagcactggcaaaggctcgcccatgccggtgtatcctggcggggtccagacatacatctgacgttcagattgcaatgcgttggagtggtaagttatggcgatcaaatcaccatgcgcaacagaacgcgtatccagataactgcctggcaccagaatcatactggagttaacctggcgctgaggcttagtcattgcggtgcctgtatcaatgctgcgtacaccatcaacattgaaaaaatactcgtacaggttgcctttcaggataggtgtgcgccacgaccagactcctgcttcgtctttggtcatcgggtgaatattgtccggaaccggaacacccaccactacagagacattttttgccccaggggcaaagtagcgaaaggtcacgctgttatcggcattgacctgagtcacatactgtttcaccgggatagtgggtgccgggctggctggcatatccgctgctatggcccactgagcagaaataccgctggcaatagccagcgttaaagcagcaatttttatattcatcgtaatattcctttcattaagttccattaccaccagatttcagcctgggcaccgacagcaaactggtcgtctttattgtcttcgaaggtgaagccatccagttcgttttccagggctttgatatacgtggcgtagaaacgaatttccggacgcgaggtcaacatactggtattgactttaaaggtatggaagagcgtggttttataaccagactcattaaatttattactattcgcatctttgttttgctgggtgaaatagcccagctcaacacctgtctggttatattggtcccaaatataggccgggcgaacaaccgcacgaatagattcgaaatcagagtgtgcgcctgtttcgtagctataaatatcgttaccgaaggagtaaacaatcgcgttagccacaatgaaatgatcgccgatataggcttcgccctgcgaagtcagacgaactgctgttccgccggtgtgatcaccataataacgaccattaaaggtagtaaatggacttgcgccagcataacggccaaagttactggcgatagaattattcgcgaccaggaaggagaattcgttgaagccacctttatcaaatttctgcgttaaagatgtgccaaacatccaggtatctttccagtcataatacccgttattatcctgattatctttttccgatgcactttcgtttgcagtgacataacgaccgctcaccattaaggtggctttatcccataacgggatatctttatagcgtaaatcaatggtattagtatttatctgctgtttgttttgcaggctgcgatcgtagtcatcgacatcttcacgaaccagcgcgacatcaattttacccggaccgactttccagttttccagacctacacctgcggcagcatcggtacgctgggttttccagtcaagcatctggatttcaattttcggcgcaccatgtttacccacccagaaatcagcctctggcgcaaagggcaggaaacctttggtggtaacgtacatatcggagaactgcataaagttctcgccaccggcgttatcgccaaaccagccggtagagtactgctgaccaacgttaccatccatcatcacaacggcatcaacccgtttgccgttttcgttgtagacacgttgttttaactgcaaatcaaaccagccggagtattcgttaccaaagcggcccagagaaccaatcgcccatgatttaggtgaaccatgagaggcggtcccccaaccagaacggtaatagccgttgtaactaaagccaatttcatctttcacaaacttactgaaatctttcagagtcatggaagaataaatcgagcctgtctcactggcatttttctcttcatttttgaccagtacagcatcaggttttgcggcactactggtcgggaacggattggcggcatacccttgatcattcgtacttacgctacgattcaccgtcgctggcgtatactttttcttctcttcatctttatattttttgagttcgctttgcgtttctcttaacgctttttctaataactcaaggcgatgttccaccgttaatgattcagccaatgattgtgcagaaaaggctaacggtgccattaataagatggcagaggtaataagatttcgtctaaacataatatccctttatggtgcaaagaaagaattaacgtatcgcatccagactgttctgaatgcgacgataattaaggtgctttattggttatttttttaatgacagcccccgcgttttgatcacttctgcataccatccgaagcttttcttacgcgttcttgtgaggcttccttcgccattatcatcacgatccacataaataaagccgtagcgcttagacatttgtgaatgagatgcactgactaaatcaattggcccccaactggtgtaccccataatatccacaccatcggcaatcgcttcatttacctgtaccaggtgatcgtttaaataggcaattcgataatcgtcctgtatcgaaccatccgcttcaacgctgtcttttgcgcctaatccgttctcgacaataaataacggtttttgataacgatcccaaagcgtatttaacagaacccgtaatccaaccgaatcaatttgccacccccactctgaacttttcagatgcggattggggatcatattcagtatgttgccctgcgcatttttattaatgctttcgtcgtgggaaacacaaccagtcatgtaataactaaaagagatgaaatcgacggtatgttttaaatcttctgcgtcactttcagtcatctcaatggtgatattgtggtcgcggaagaaacgctgcatatagccgggatactggccacgcgcctgaacatcaccaaagaacatccagcgccggttctcttccatggcctgcaacatatcctgtggctggcaggtgagggggtaaaccagcccaccgagaagcatattgccgattttcgcttcggggagcaggctatgacaggctttaactgcccgcgcactggcaaccagttgatggtggatagcctgataaacttccgcctcgccactctcttctgccagccccacgcccgtgaatggctcgtgtaacgacatgttgatttcattaaacgtcagccataacgccactttatgttggtagcgagtaaagaccgtgcgggcgtaatgctcgaagtgatcgatgaccgctcgattagcccaaccgccgtagtttttcaccagcccatatggcatttcgtaatgggataacgttaccagcggcttgatccccgcctgcgccatttcatcaaacagccgatcgtaaaacgctaaccccgcttcattcggttcgacttcgtcgccctgagggaaaattcgcgcccaggcaatggaaatacgcagacaggtgaagcccatctcggcaaataacgcgatatcttccgggtaacggtgataaaaatcgatggcgacatctttgatattctctttccccaggatgcgcggttccatttttcccattacgccatgaggctgtaaatctgaggtcgagatccctttgccatcttcctgccaggcaccttccacctgattggcagctgttgcgccaccccaaagaaatgtttctggaaatgctttcataattaactccttttatcgttagcgaatgatggataacagcggttcacctgcgcttatctgcgccgtgccgtggggtaatacgtccgtaaaatcatcgctattactgattaataccggcgtcgtcagatcaaatccggcctcgcgaatagcagggatatcaaaagaaatcagccgatcgcctgtattgaccttgtcacccacgttgacgtgagcggaaaagaatttgccgtccagttttacggtgtcgataccgacatgaatcaggagctccacaccatcatctgactcaatgccaatggcgtgtaatgtggcgaacaacgaagcaattcgacccgcaaccggagaacgcacttcaccaaccgagggcagaatggcgatacctttacccaacaggccactggcaaacgtggtatcagcgacgtgaatgagcggcacaatctctcccgtcatcggtgaacagataccgccctgctcaggtggtgtaataacctctggtgttttctcttgcggggcaccctgcgctggctgacgtttagcggtgatgaaatgaagcatcaccgtaccgacaaatgcgcaaccgatggcaatgacaccgccaataacgctggcccagacggtgaaatcaattcccgttgacgggatggtttgcatgaaggtgaaaatacttggcaaaccaaaggagtagactttcgtttgcgcgtagccaatgatggtggcccccaaagccccactgatacaggcgataacaaaggggtacttacgcggcagattaacgccatataccgctggttcggtgataccaaacaggcccgtcaacgccgctgatcccgccaccacttttttctgcgcatcgcgttcgcagaggaagacgccgagcgccgccccgacctgcgccataatggcgggcattaacagcgggatcatggtgtcgtagcccagcacggtgaagttattgatacatagcggcaccaggccccagtgcagtccgaacatgacgaagatttgccagaagccgcccattaccgcgcctgcaaatgcaggaaccgcctgataaagccagagataaccggcggcaatcagttcgcttatccaggttgatagcggccccaccagcagaaaggtgacgggtgtgataaccatcagacatagcaatggtgtgaagaaatttttgattgccgacggtaaccacgcattaagtcggcgttccagaatgctgcacaaccaggcagaaaaaataatgggaataaccgatgacgagtaattcaacaatgtgaccggaatacccaggaaatccagccccagctcatccgctttttgcccgttctcgaaagcagtcagaattaatggatgcactaacgctccaccaatcaccatggcagtaaatggattaccgccgaagcgtttccccgcggtgtatcccaggattatcgggaagaaccaaaacaaggcatcactggcgctgaataaaattaaataagtaccactttgttcggtcgtccactgaaaagtgagcgccagagccagcatacctttcaggatcccggttgccgccatcaaaccgatcagaggcgtaaaaatacctgaaataacataaacaaagcggtttagcagattacctttctcatcattttccggtgcctgttgcgctttttcgccaaggcctgccacgctgttgaccgccaggaagacatcggccacatggttacctatgaccacctgaaactgaccaccgctttccaccaccataataataccgggggtctttttcagtacctcagcttgcgctttgctttcatcctttaacttaaaacgtaatcgcgttgcgcaatgcatcagactcacaatgttatctgcgcccccgactcctgcgactatttttctggctaactccgtcataacttgccctctaccgctttgcggcaaaactccaaaaaaaaacctgaaaaaaacggcctgacgtgaatcaagcaatttttttcaggttttgcccgcttagtgcggtaacaatcctttactcagtaataatatttcagtgttctttgcgcacgcgctctatatttatggctaaaaacataatctctgcgggtgaaattttacgttgatactgcaaaccaataaaaatggcgatccgttccgcacattgccatgcttgcgggtaattttgttttactgcttgttgtaatgattcatcactatcgttaattgaagcatgttcaagaatacgccaggataaaaacttcagatgtgtaaccagtcgctgataactcaagctttcttcctggtaattaaggctgaactgaaattttattaattgcagcatttcgcgcattaactgcgtgacacctgcaacatcctccatatttccgctcatttgggcactgaccagatgcatggcaataaagcccacttcatctttcggtaactacacgcccaaccgtttatcaataatggttaacgcttcttcccctagctggaactctttcgggtaaagccgctggatatcccacagcaacgggttgggcagcaacacgttttgctgaaagcgtttaatcgcaaactggcaatggtcagttagcgagatataaatactgtcctgtaattttcccaagcgctcctgcgctaaagagataatacgatcacaggttgccatcacctcaagaggaatatgacttaagagttcgcttaatcgcccgttcagttcatgactgctcaaggcatactctttttctattccacttgagttaattctttcgccagcgcgtttttgaaagccaattcctcgccccatgacgactttttcccgctgttgatcatcaataaccaccacaacattattgttgagaattttggtgatttgcatgttcatagcaaggaccttttttataaacaaaaaaacccgacttcaccagtattctctggttatgtcaggttttgcctgcgaatgcagtaacaatccagtcatttattaatggtttttataacgaacatccaggttcggaaattaatttaattgcgtgcagagaaaatagcaatgcgctattgataaaaatatgaccatgctcgcagttattaactttgtgtaattttaggaatttataaagttatatataacaaatcccaataattaagttattgggatttgtctggtgaattatttgtcgctatcttttcccgccagcagtttatccagctcatcaccgcctacatgacggaaatcctgccccttcacgtagtagaagataaactcacaaatattctggcagcggtcgccaatacgttcgatagaacgcgcgcagaacagcgcagtaagtacgctcggaatggtacgcgaatcttccatcatgtaggtcatcagttgacgaacaataccttcgtattcctgatcgacttttttatcttcacgataaatacgtaccgcttcgtcaatgtccatccgcgcgaacgcgtccagcacgtcgtgcagcatctggatggtatgacggcccagcgactccagacttaccagcaacggctgatgctgctgggagaatttctccagcgcagtacggcagattttgtccgccacgtcaccaatacgctccagctcggcaatggttttactgatcaccataaccagacgcaggtcgctcgccgtcggctgacgtttggcaataatgcgcacgcaggcttcatcgatcgccacttccatcatgttgacgttcttgtcgccttcgatcacgcgcttcgccagatcgctgtcctggttatgcatcgcggtgattgcatcagaaagctgctgctccaccatgccgcccatggtcatcacctgcgtgcggatactttccagttcggcgttgaactggccggaaatatgtttattaagattgagactgtccataacgcactcctgaatcaaccgtaacgaccggtgatgtagtcttctgtttgtttcttcgctggcttggtgaacagatcgtccgtgttgctgaactcaatcaattcgcccaggtacataaacgccgtgtggtcggaacaacgcgcagcctgctgcatgttgtgggtgacgatcaccacggtgtaatcctgcttcagttcggtgatcagctcttcaatacgcccggtagagatagggtcgagcgccgaacacggttcgtcgagcagcagcacttccgggcgaatggcgataccacgcgcaatacacagacgctgttgctgaccaccagagagagagtaaccgctctggtgcaatttatctttggtttcgttccacaatgcggctttggtcaatgcccactgcacgcgctcgtccatgtcggcacgggagagcttctcaaacagacgaacgccaaaagcgatgttgtcgtagatggacatcggaaacggcgtcggtttctggaacaccatgcccactttcgcacgcagcagggcgatatcctgagagttggtcaggatgttgtcgccatcaagcagaatttcaccttccgcacgctgctccggatacagttcaaacattttgttgaaggtacgcagcagcgtcgatttaccgcagccggacggcccgataaacgccgttacctggtttttagcgatatccaggttgatgtttttcagggcatggaatttgccgtagtagaagttcaaattacgaacctgaattttactcggggcagtttcaaccatactcattgcaatcttttcctcatcgtgcctgatgcacttcgctaatcaggcttaccgtaggccggatcaggcgttcacgccgcatccggcaaagtgttaaccgtgtttattcttcgcaaaaacaacgcgcgccagaatgttcagcagcagtacgcacagggtaatgatcaataccccggcccaggccagttgctgccattccgcaaacggactcatcgcaaacttaaagatcgtcaccggcaggttggcgatcggctgcatcatgtccgtgctccagaactggttggagagcgcggtaaacagcagcggcgcggtttcaccagcaatacgggcaatcgccagcaagataccggtcatgatcccggacaccgacgctttcagcgtaatcgcggagatcatcttccacttcggtgtacccagcgcataagccgcttcacgcaggctgtccggcaccagtttcagcatgttctcggtggtgcggataacaatcggcacctgcaacagcgccagcgcaattacgcccgcccagccggagaagtgctccatctgtgccaccacgatggtgtagacaaacagaccaaccacaatcgacggcgcggagagcagaatgtcgttaatgaagcgaatcacttctgccagccaggatttacgaccatattccgccagataaatccccgccataatgcccagcggcgtaccgaataccgtggcccacaaaattaacagcccgctacccgccagggcgttcgccagaccaccaccttccgtattgggcggcggcgtcatttcagtgaacagcgccagcgacataccgtcgataccgcgagtgatggtggacattaaaatccagatcagccagaacaggccgaaggccatcgtcgccatcgagagcgtcagcgcaatacggtttttgaggcggcgacgcgcctgcattttgcggcgagattcagccagcgccgcagtggtttgcatttcaaccatagccattagcgtgccccctcattcttagccaggcgcataatcataaacttcgatgcggcgaggacgatgaaggtaatcacaaacaggatcaggcccagttccatcagtgcggcaacgtgcagaccggattccgcttccgcaaattcgttcgccagcgcagaggtgatactgttgcccggcatatacagcgaggcgctgtcgagctggtaggtgttaccgatgataaaggtcaccgccatggtttcaccgagcgcgcggcccagccccagcatgatgccgccgataacaccatttttggtgaacggaagaacgatacgccagataacttcccaggtggtgcagccaataccgtaggccgactctttcatcatcaccggggtttgttcgaacacatcacgcattaccgccgcaatgtacggaataatcatgatggcgaggatcacgcctgccgcgaggataccgataccaaatgcggggccagagaacagcgcgccaacaatcgggatattcgacatgatattgccgaccggctcctgaaagtaaacggcgaacagcggcgcaaagataaacaggccccacatgccgtaaacgatacttggaatggctgccagcagctcaatggcgatacccagcgggcgtttcagccagccaggcgcaagctcagtcaggaacagggcgataccgaaactcaccgggacggcgatcagcagcgcgataaacgaagtcaccaacgtaccgtagatcggcaccagcgccccgtagatatcgttcggtgcatcccactctttggtccataggaaagccagaccaaatttctgaatgctcggccaggaggagatgatcagagagacaataatgccacccaacatcaatagcacaatcagcgccgccagttttaccagcacgctgaaaattatgtcgccctttttacccggtgggttaaaagcaggcttggttgcagccataagttactcttcagttaaacgcgtttacaaagtcattttgtaatgccggatgcggcgtaaaacaccgtacccggcctggagttttattagtacagcggcttaccgctactgtctttaatattggtcttccacgcagcgcgaacctgttcaactacactatccggcaggctggcgtaatccaggtcgttcgcctgtttagccccggttttgtacgcccagtcgaagaatttcagcacttctgtgccttgttctggtttcttctgatctttgtggatcagaatgaacgtggtagaggtaataggccatgcatcttcgcctttctggttggtcagatcctgagcgaaggttttgctccagtctgcaccttttgctgcattagcgaagttttcttcggtcggactaaccggtttaccatcagcggagatcagtttggtgtacgccaggttgttctgcttcgcgtaagcatattcaacataaccaattgcacccggcagacgctgaacgaacgcggcgataccgtcgttacctttaccgcccagaccgatcggccattttacggtagagccagtaccaacgttgtttttccactcttcgttcactttcgccaggtagctggtgaagacgaaggaagtcccggagccatctgcgcggcgtactacagcaatgttttgtgaaggcagtttcagacccggattcagtttggcgatggcttcatcatcccacttcttgattttgcccaggtagatgtcgccgagggttttaccatccagcaccagttcgccagacttcagccctggaatgttaaccgccagcaccacgccgccaatcacggtcgggaactggaacagaccttcctgagccagtttttcgtcagacagcggcgcgtcagaggcaccaaaatcaacggtattagcgataatctgttttacgccaccggaagaaccgataccctggtagttaactttattaccggtttctttctggtaagtgtcagcccatttggcatacaccggcgcagggaaggttgcacctgcacctgtcaggcttgcttctgcaaacacagagaaagcgctcatcgataaggtcgcggcgacaacagttgcgacggtggtacgcataactttcataatgtctcctgggaggattcataaagcattgtttgttggctacgagaagcaaaataggacaaacaggtgacagttatatgtaaggaatatgacatttttatgacagaaaggaattaccaaataacttactgattttaaatgtgaagatgaaaatcccacatgtcatctttttgtcatgatgcatttaaaagtgataaagaaatgggtgagatgacaacgatgtgatgaacaatcgttgtcagacctattagcgcacaatctcaacagttatcgtcgctgttgcagtaaattgccccggggatgggcgagctccagtaaggctcgcaggagcagctgaaaaagttacactacctgatttttcaccatacactgttgatttacccatgtctgttggcaactcaccaccgttcactttgatttccttattatttttgtcgtaaatttttatccccacgttagagtttgaagttacgaccattgaattgtccgtattgggttcggtagcataaaaagacgtactgatatcatcggtattcagtatccccaggttttcacactcaatagtgaccgttttagtaattttatgtgttgttaccgcacttccaacaacagatgaaaaatctgcagctggtatttctttaaaatcaaaataaactggctgtaaattatttatttcgcaactttgcggagctgtaatatcgccccgaatataaacatcagccatcggctgtgagtaatccaccggggtgtcacggctaattgttccatacaatgtcactatctttgtttcaggaataatcaattttcctgcaaatgtcttcttgatataaaaatatactatcgctttagccccactagatatacttaaaggttcaatgcggttgcaattgtactttgtattaccagacgggttgttagcatgatattcaaaaggtgcattcacatacccaaccccaagaatatctatagcaatcccaacatcaaggttcggattaagatcataataattaatattagagtgaaccccagcataagttaatgcctggtttatttttgacgtataatagatataggggaattctcctacgttaccagtatcacaatgacagcgtccaggatatgaggatccattagttacagtggtgttaaatgtcgttccaaccttattttcgttcgcggtaataagatatcccgagaaatcaagcgtactgtgaaatacgccattatcaggggtacagatacctttaggagctgcaagtgctacactacttaacgagagcataaacacagcaaagcaccactgtttgatatacttgttcataaaaatccttttaatgacatgtcacaccctgttcaattaatccgctctcactttctggtgtcgaaagtgaataattgaagatgcattttgttgaggcgttttctccccaggataacgtaacctgtcctttttctggtagaccagaaagataaagttcgccacggtcaccgacaattcctgaatctgccaaacttgcatcttgtatcgcagcaatggctccaaaaggtaccggtttaccatttgcatttaacactctgaagagaacgcgataacccacatgagtcacaaactccgctttaaccactgcaccacgcgtgggaaccatcgtaacgacggtattatcaagttctatattcgacttcgagaaatagttatcgctgattgctacccgattttcatcataagggtttagctgtgtcttgaccgtatagccgcgccagtccgtcgcagcaccgcgcatattatctatttctaacccggcggccccaggtgctttaacaagagcaatagtttcacctaactcctgacttaacgttaccccttcgctgtgtgccagaattccccctctgataccataattcagcctctgggaattttggctgtagttatagctgccgttcaccgtgccataagagccatcataggtcagggacatattaccgccaacctcatcatcatgactgttataggactgcattaaattccatgaaaggttatttctttccagcgccgtaccgctgagtccgagttgatgtgagctaccggaattatcgttttgcgaaacagaataggtggcgtaactattaccccaccagcccgataaaggaacagataaagagagcatgtagatctgctcactggtgttatcactggcatggttgttccccgtcccctgtctggcagtattggaataactccaggagacgttccacgagagacgcttccagctactgctgtagccaaattgcattaatcgttcgacatcatcggtatgccagtattgttgccggcttaatgtcaggtataaattgccataatctctccccaacgactgcgttagcgttccctccacgcgactacgtcggttacctgtttcccaaaagtcttcagggctgttgcgccgcgatgcccactcattgagggtatagtagccctcggtggagtaacgatagccaaccaggcgcaagctagtgtctgtgtcgtcaaatcgttttgaatagagaaagcgatatgactgacccgtttctgtatcatcatggctaaaattcgcacgagcatgtgtcacatcgaaagaaattgcgcccaaagcgccaagatctttaccgacacccagagctgcagaaccataattttcagcagcctgcatacctccatataaagtgatcccgtgggaaaaaccatgaagtatttgcgcctgaaggacgtccggtgtaaatccgtcttcatcgcgcaattcacccacgctgacatcaacatctgtctgaccttcacgtttaagaatcgccaatgaagcataaggttgggtgaatcgttgttcgctaccgtcttcttctttgatggttacgtccaaatcgccacctgtactggcggtgttgagatcggtgatctcaaaagcaccttgtggaacggcagactgataaatcacgtagccattctgccgaatgatgacggtggcgttggactttgcaatcccacgaaccacaggagcaaagccattctggctggcgggtagcatatcgttatcagtatacaaacgcgcgccgcgaatttgcgtactgtcgaaaatatcgctcgccgtccatgtatcaccaatcataatctggcttcttaacgcggcaatatcgcgctgtatccaggtactaatggagttgtattccgcacggccatcgctggtgtttaaagtactgtaattacgtagccgccacggtccaatattcagtccattgcgcagattgagataactggtatctgtctcttgtgaaccataatctgaacgtagtgtatgtgaaccagaaaaatcgtagttgatggtgagcgcgttaatcccctcatcccaacgcgtgggctgatgtaatcataagccatcgcgtccatgtagatttggggaatggatatattcagctgcaatttatcactgtcaaactgccaggatgagccttcaatacgtggagcaggatcgaggcaaaccgtctcatccacatcattgaacgatttgagcgcatcaacttttatgccaaaggaggacagtgtttttttaatggcaataaagcaagcgtgcagatcagcatctggattatcctgaacaaatgtcacatcctgacgttcaaacattttaccgttgataaaaatatcaacgctataaacacctgggggcatcaggtttgcccgattaaactggcgaatatcgactccggattgatggtcgatttccagaagcgccggattgaatacactgacctcggccatcaggttttgcgagaaaatcagacacgtccctgccgtgaggccaaccactattctggtcgtcatcataatacgcctatccttatcccttgcttacagcgtcatttttatcgggtcactgactgcgccgtaatcattaataaatcgccaggtcatttggcctcccgcagaattagcaggtaaaggtaacgtgagcgtttcaaaaggacggatcatattgaggggcacatcatggccatcaacgatgacatccatcacactgatatgaattgggttgggattctctgctatcagatttcgcccttcccggcgccatttcactttcggcgcagcatcttcgggaataaggcggatatttgctggtcgccagaacagcttgatacgcgtttttactgctatttccagcgagttcgtcgctttgttgctcgctgatggcggaatatttttaatattcagccagaagactgactcgcgatcatcaggcaatgacacacctttggtgtgaataatgcgtaatattttttcttgcgaaggttctaatcgtgatactggcggaataacggtaaacggcgctttgcttttatcctctttattaaatggatctacccaagcctggatgagataaggtattttttcttctttgctaaatacagaaatagatttatcagcattattacttaagtaaaccacccgcgtaccaccaatgacaacgcctgcataagttaatgctggttggcctaaaaaaacgctgagtataatcgcggtaaataacttacatgaaactgttgttttaaagagcctgattaaacaactttttctggacataacgactccctggccaaagccaactgaataaaaaggcccttgataaattatttcttatattcgacagtaaattgtgaatccgcgttcgccgtaccagccgttacggtcgcattggttgccacatagcgtgcaataaacttcatttcagccttgccttcagcatcgatagcggtataagcagagtcgttataaagtttaacctgcgaattatcggactggttaaaaatacgaataccaacgccggttgccgcaatcgcttgtcctgtaccggtaatatcaccagggttgcctgctgtaagcggcgtacccactttcaggtcgccgtcgccgccaggcgcttctgtaccatcaaaacgaacggctgcttgagtgtacgttgccgggcaattttcaagtttaatactgaacttctgtggcgacgccagactacctacacctgaaaatgcatttttactgactttacccagtgggacaatttgatcggctgtatcggaggtaacttcacaagtagtgtcgacaatttcaccgacgaagtgaacaacaccatcttctgccagtgcatgcccggccagcattagagatgccagagtgaatgcaccgcctataatattacgcttcataaaaactccattgatataatatatcctttaccatgaatcatcacttatattaataagtgtatttttgattcaaaggaatagtacaccaaagagacggctttatctaaaaataatattaattacgcnnnn

SEQ ID NO: 603 - DNA, 489401 bp, Escherichia coli
tattgtttaaatattatttaaacagtaaaaaatcaagtttgttatcagacattaatgataattcagaatatatttatatagaaagatagatgaatttattgatgtcagttataaaaaagggccaccggtcggcagcccttttttatctatgatagtgattactcaaccgtaaccgattttgccaggttacgcggctggtcaacgtcggtgcctttgatcagcgcgacatggtaagccagcagctgcagcggaacggtgtagaagatcggtgcaatcacctcttccacatgcggcatctcgatgatgtgcatgttatcgctacttacaaaacccgcatcctgatcggcgaagacatacaactgaccgccacgcgcgcgaacttcttcaatgttggatttcagtttttccaacagttcgttgttcggtgcaacgacgataaccggcatatccgcgtcaatcagcgccagcgggccgtgtttcagctcgcctgcagcgtaggcttcagcgtgaatgtaagagatctctttcagcttcaatgcgccttccagcgcgattgggtactgatcgccacggcccaggaacagcgcgtgatgtttgtcagagaaatcttctgccagagcttcaatgcgtttgtcctgagacagcatctgctcaatacggctcggcagcgcctgcagaccatgcacaatgtcatgttcaatggaggcatccagacctttcaggcgagacagcttcgccaccagcatcaacagcacagttaactgagtggtgaatgctttagtggatgccacgccgatttccgtacccgcgttggtcatcagcgccagatcggattcgcgcaccagagaagaacccggaacgttacagattgccagcgaaccaaggtaacccagctctttcgacagacgcaggcccgccagggtatccgcggtttcgccagactgtgacaaggtgatcatcaggctgttacgacgcacggcagatttgcgatagcggaattcagaggcgatttcgacgtcgcacggaatacctgccagcgattcaaaccagtaacgggaaaccataccggagttataagaagtaccacaggcgaggatctgaatatgctcaaccttcgacagcagttcgtcggcgttcggtcccagctcgcttaaatcaacctgaccgtggctgatgcgcccggtaagggtgtttttgatcgcgttcggctgttcgtagatctctttctgcatgtagtgacggtaaatacctttatcgcccgcgtcatattgcagattggattcgatatcctgacgttttacttccgcgccagttttatcgaagatgtttaccgaacggcgagtaatttccgcaatatcgccctcttcaaggaagataaagcgacgggtcaccggcaacagcgccagctggtcagaagcgataaagttttcgcccatacccaggccaatcaccagcggactaccagaacgtgccgccagcagggtatccgggtgacgggagtccatgatcactgtaccgtacgcaccacgcagttgcgggatagcacgcagaacagcctcacgcagagtaccgccctgtttcagctcccagttaaccagatgggcaattacttcggtgtctgtttcagaaacgaaggtatagccacgcgcttttaactcttcgcgcagcggttcatggttttcgatgatgccgttatgcaccaccacaatgtgttcagaaacatgcggatgcgcattcacttctgaaggttcaccgtgggtcgcccagcgagtatgagcaatacccgtaccgccatgcagaggatgttcttccgctgcctgagcagcatctggactttaccgaggcgacgcaggcgggtcatatgaccttccgcatcaacaacggccagaccggcagagtcatatccgcggtattccagacgacgtaaaccttcaagaaggatttctgctacatcacgttgcgcgatcgcgccaacaattccacacatagtttttgattccgatttatatcgttgtcggtcaacctgtatgcccgtttttcgggcgccccgagccttgtagagagtggggttatttttatagttactgcttgtgggagggagattatgttatctcctcatcccatgtgaccggattacccggccagaatcactttttctttaccggacgacgccagccttctttctgagtctgcggcacacggctgatagctaatgcattttcgccgacattacgcgtcacagttgtacccgcagcaatggtcgcgcctttgcctactgttaccggggccaccagctgagtgtcggaaccgacaaacacatcgtcgccgataatggtcttaaatttattcgcaccatcgtagttgcaggtaatggttcccgcgccgatgttaacgttatcgccaatttccgcatcgcccaggtaagtcagatgaccagctttcgagcctttacccagacgcgcttttttcatctcaacaaagttaccgacgtgtgcaccttccagcaactcagcaccaggacgcagtcgggcaaacgggccaatagtacaggccgctgccagattcgcgtcttccacaacggtatacggactgatttcgcaatcatcgccaatcacgctgtttttaatcacgcaaccggtgccgattttcacgcgatgaccgagagtcacgttgccctcgatgataacgttagtatcaatttcaacatcgcgcccgtgagtaagcgtaccgcgcagatcaaaacgcgccggatcgcgcagcataacgcctgctaacagcagtttttcagcctgttcggactggtaaacgcgctccagacgggagagttgcaggcggttattcacaccttctacttcgcttaaacgttgcggatgaacggcgacgatttcacgcccttcctgatacgccagcgcaataatgtcggtgatgtagtattcaccctgagcgttattgttggtcagcttcgccagccagcgtttcatatctgcgccgttagcgatcagaatgccggtgttgatctcctgaatctgacgcagctcgtcggtggcatctttgtgctcaacaatgccggtaactttgccattttcacgggtgatacgtccataaccggtcggatcatccagtttcaccgtcagcagaccaatgccaccctgcggtttagcatcacgcaggcgctggagtgtttcgacagagatcagcggcacgtcgccgtagagcattaaaatgtcttcatcatcggcaaagaaaggtgcggcctgctgcattgcatgacccgtacccagctgctctgcctgaagcacccagttaaggttgtcgtctttcagcgcctgtttaagcagatcgccgccgtgaccgtacaccaggtgaacgtgcgctgcgcctaattcattcgcagcatcaatgacatgctgaaccatcgctttcccggcaagggtatgcagcactttcggaagatcggaatacatgcgcgtgcctttgcctgcggcaaggatcactacgctcatagcattattcaacatacgcgtcctgactgtaatttgagaacgaatttaaaccgcttcaccttgaaaaaactacatttttttcatcgtgaaatggacagaggataaattgttcaataacggattatccccgctgacgaaagtgccattttcgaccatcgtcacgccttttgtctgcagaaaattaaggcagtaccttcatttaagcgtcaggtggatgtttttgctcttatttcgatcaatgaataaacgggaaaacaggggtgttttatatcagcaggatctatgtgaacgctcttcaggacggatcacgcgtaaaaaaaagccagcctgtttccagactggcttttgtgcttttcaagccggtgttacatcgcttttttggtcaactcgataacgcgcagctgcgcgatcgctttggccagttccgcagacgcctgagcgtaatctacgtcgccgtgagagctgctaatgtgctcttcagccttacgtttcgcttccatggctcgcgcttcgtcgagatcctggccgcgaattgcggtgtcggccagaacggtcacgttgccaggctgcacttcaagaatgccgccagacagatagataaactcttcgtgaccgtgctgtttcacgatgcgaatcataccaggcttaatggcggtgagcagcggtgcgtggccagggtagatccccagttcaccttcgctacccgttacctggattttctcgaccagaccagagaacatttgttgctctgcgctgacgacgtccaggtggtaagtcattgccatatcaccctccgattaaggcgttaaagttttttggctttttccacagcttcttcgatggaaccgaccatgtagaacgcctgctccggcaggtgatcgtattcgccttccatgatgcctttaaagccacggatggtgtctttcagggagacgtatttacccggagaaccggtgaatacttctgccacgaagaacggctgggacaggaagcgctggatcttacgagcacgcgctaccaccagtttgtcttcttcagacagttcatccatacccaggatggcgatgatgtctttcagttcctgataacgttgcaggatggactgaacgccacgcgcggtgtcgtagtgttcctgaccaaccaccagcgggtccagctgacggctggtggagtccagcgggtcaacggccgggtagatacccagagacgcgatctgacggctcagtaccacggttgcgtcaaggtgcgcaaaggtggttgccggagacgggtcagtcaagtcatccgcaggtacgtataccgcctgtacggaggtgatagaaccagttttggtggaggtgatacgttcctgcagaacgcccatctcttccgccagggtcggctgataacctaccgctgaaggcatacggcccagcagtgcggatacttccgtaccggccagggtgtaacgatagatgttgtcaacgaacagcagaacgtcacgaccttcgtcacggaatttctcagccatggtcagaccggtcagagcaacgcgcagacggtttcccggcggctcgttcatctggccatacaccagggatactttgtcgataacgttggagtcggtcatttcgtggtagaagtcgttaccctcacgagtacgttcacctacgcccgcaaacacagagtaaccggagtgctcgatcgcgatgttacgaatgagctccatcatgtttacggttttacctacacccgcaccaccgaacagaccaactttaccgcccttagcgaacggacacatcaggtcgataactttgataccggtttccagcagttcctgagagtttgacagctcttcgtaggaaggtgctgcgcggtgaatcgcccaacgctcttcttcaccgatctcgcctttcatgtcgaccggttcacccagtacgttcatgatacggcccagagtcgctttacctaccgggacttcgatcgggtgttcgaggtcttttacatccagaccgcgacgcagaccgtcggaggaacccattgcgatggtacgcacgataccgccgccgagctgctgctgaacttccagcaccagacgctcattaccattttgcacctcaagagcatcgtacacgcgcggtacggcatcctgagggaattcgacgtcaactacggcgccgattacctggacaatctttccagtagccatcttaaatcctctacgaaataacctgtttaaaccgcggcggcccccgagacgatctcggtgagttcctgagtaatgctggcctgacgagctttgttgtataccaactgcagctctttaatcaggctgccgccattgtcggtcgcggctttcatcgccaccatacgggcggcctgctcgctggccaggttttcaaccacgcctgataaacctgagattcgacataacgacgcagcagggtatccagcaacgccttcggatcgggttcgtacaggtaatcccaggatttatgtttcagatcatcatcatctgatgccggtaacggcagcagctggctgatggtcggaacctgagacatggtgttaataaatttgttgctgacaatgtaaagcttgtccagacggccttcgtcgtaggcctgcaacatcacttttaccggaccgatcagttcggacagggaagggttatcccccatgccggtgacctgggcaacaacattgctgcccacggagttgaagaacgacacgcctttcgagccgatcattgcgaggtcgcattgaacgcctttgtcggtccaggtcttcatttccgccagcagttttttgaacaggttaatgttcaaaccaccgcacaaaccacggtcggtcgacaccaccaggtagcccacgcgtttaacgtcgcgttcttccaggtatgggtgcttatattccagattaccgtgtgcaaggtgaccaatcactttgcgcatggtttctgcataaggacggctggccgccatgcgatcctgcgatttacgcattttggaagcggcgaccatctccatcgctttagtgatcttttgcgtgttctggacgcttgcgatcttactacgtatctcttttgcgccggccatgagcttctcctcaatgccttgcggcctgccctaaggcaagccgccagacgttaccaggattgggttgctttgaaggaatcgaggatgcctttcagcttgccttcgatttcgtcgttgtagccaccggtctggttgatctcttgcatcaacggagcgtgatcacggtcgacgtaagccagcagagcggcttcgaagctgccaattttcgacagttcaacatccgccaggtaaccacgttctgctgcgaacagaaccagagactgctgcgcaacggacatcggcgcatactgtttctgtttcagcagttcggtcactttctgaccgtggtcaagctgcttacgtgttgcatcgtcaaggtcggatgcaaactgagagaacgctgccagttcacgatactgtgccagagcggtacggataccaccggacagttttttcatgatcttggtctgtgctgcaccaccaacacgggatacggaaatacccgggttaaccgcaggacgaataccggcgttgaacaggttggtttccaggaagatctgaccatcggtaatggagattacgttggtcggaacgaacgcagaaacgtcacccgcctgagtttcgataatcggcagtgcggtcagagaaccggttttccctttcacttcacctttggtgaaggcttcaacgtattcggcgttaacacgtgcagcacgctccagcagacgagagtggaggtagaaaacgtcgcccgggaatgcttcacgtcctggcggacgacggagcagcagggagatctgacggtaagcaacagcctgtttagacaggtcatcgtaaatgatcagcgcatcttcaccgcggtcacggaagtattcgcccattgcgcaaccggcatacggtgccaggtattgcagtgcagcggattcagacgcggttgctaccacaacgatggtgttagccagtgcgccgtgctcttccagtttacgtaccacgttagaaatggtggacgctttctggccgatagcgacatagatacatttgataccggaatcgcgctggttgatgatggcatcgatagccagtgcggttttacctgtctgacggtcaccgatgatcaattcacgctgaccacgaccgattgggatcatggagtcaacggctttataaccggtctgtaccggctgatctacggactgacgttcgataacgcccggagcgattgcttctacagcagagaagccgtcgtgatccagcggacctttaccgtcgattggtgcacccagagtgttaaccacacggcccagcaggccacggccaaccggaacttccaggatacggccagtacacttaactttcatgccttcggcaaggtcagcgtacggacccataacaaccgcacctacagagtcgcgctcgaggttcagtgcgatagcgtaacggttacccggcagggagatcatttcaccctgcatacaatcggccaggccgtgaatgcggataacaccgtcacttacagaaacaatagtaccttcgttgtgagcttcactcacaacattgaactgagcaatgcgctgcttgatcagttcgctgatttcggtggaattcagttgcatgctccagtccccttaagactgcaagacgtctgcaaggcgctcaagacgaccgcgtacgctgccatcaatgaccatatcacccgctcggatgataacgcctgccattacagacttatcgattttgcaattcagcttaactttgcgtgacagacgtttttccatcgcagcagaaattttcgcgagctgttgttcactcagtgcggcagcggaaatgacgtctacctcagcggtagcctcactcacggcacgaaggtgaataaactgctccagaacatccgggagcgcgttaagacgaccattttcagccattacccgaatcaggttctgaccgttttcgtccagttgctcaccacaaactgcgataaacgactcggcgagcgtttctggcgcaagcgcgccagagagaagctctgccatttgttcgtttttggttacctcggcggcaaacgccagcatgtcctgccagcgttctacactttggtgttcgacggcaaagtcaaaagctgctttggcgtaggggcgagctaccgtaataaattcagacatcagcccctccctccttacagttcagcgacaagtttatccacgatgtcgctgttagcagcttcatccacggaacgttcgatgatcttctcggcgccagcaacagcaggatagcaacttgcttacgcagctcttcacgggcacgtttacgctcggcttcaatttctgcctgcgcctgggccacgattttagtacgttcctgttctgcctcagctttcgcttcgtccagaatctgcgagcggcgtttgttcgcctgctcgatgattacctgggcttccgctttcgcttttttcagctggtcggtcgcgctggcctttgcaaggtcaaggtccttatgtgctcgttctgcggaagcaaggccgtcagcaatttctttttgacgtttttcgatggctgccattaatggcggccatacgtacttcatgcagaacagaacgaacaggacaaacgcgatggcctggccgaggattgttgcgttaagattcacagcacaatgcctctatttagttaacgttctgatattgctctttaaataaaagcaacgcttactacgcgacagcgaacatcacgtacagacccagacctacagcgatcatcgggatagcatccaccagacccataacgataaagaactgagtacgcagcagaggaatcagatcaggttgacgcgctgcgccttccaggaatttacccccgaggatgccgataccgatcgcagcaccgattgccgccagacccatcatcacagcggcagccatgtacagcagatccatattcaggttttccatgacagtctccagtttgtttcagttaaaacgtagtagtgttggtaaattaatgttcttcagacgccatcgacagatagacgatcgtcagaaccatgaagatgaaggcttgcagcgtaatgatcaggatgtggaaaatggcccacggcacattcaggatccactgtgaccaccacggcaacagaccagcaatcagaatgaaaatcagctcaccggcatacatgttaccgaacagtcgcaaaccaagtgaaactggtttggacagcaggcttaccccttcaaggattaagttgacaggaatgaacgcccagtgattgaacggctgcagcgtcaactctttcgtgaagccgccgatgcctttcattttgatgctgtagaacagaatcaggataaatacgcccaatgccatagacagcgttacgttcacgtccgcagacggaaccacacgcagtgcaggcagacccagtacatgttcagcaatgtacggcagcaggtcgataggcagtaaatccatcaggttcatcaggaatacccagacgaagatcgtcagggccagcggagcaatcagcttgcttttgccatggtacatgtctttcacgctaccattaacaaagccgatcaccagctcaatcgcggtctgaaacttacctggcacaccgctggtcgcctttttggctacgctacggaataaaaccaggaacaacagacccagcaccaccgagaagaacatggagtcaatattgattgtccagaaggtggctggggggttttgtggatccaccagcgagaatgtacgcaggtccagctgaaggttattcaggtggtgtcctatgtaatcctgcggcgtcatattttctgaagccatgatgccttttaccctttgttgttaattacagccggtgccagtatctgaaccaccagcaccaaaacccacgtaacgatcagcggcaagaataccgcctttaaaaccgccaacgccaccaccagtaacaccaacatcgccagaactttgaaagcttcgccaaatgcgaatgtccaggccacccggcctttcgctggtgtatgcgcctggtgacgccaggcaaatatcataaacaaaacgttaggcagaaagactgccaggcccccgcttattgcagagacgccccagaaggggtctttgaggctgaacagcaatccacttgctatcaccaccagtaactgaacgagcagaagcttccgagcaacgtttcgactcacgagcgacacagacatcacgtttttcactcctgctcccttcgaggtatgccgcgtgtcgtataaaactttctttaaggcttagagtcaagcatcaaaaagcggtcaaattatacggtgcgcccccgtgatttcaaacaataagtagccaaaaggtgaataaatgtttaaatatttttccagtgcatacaattgcgacttttctgctaaccctgttcgatcatgaaaaactgtaaataacgcgtaaacactggtgataaagcgtgcttcagatcacatattgcgcatgttcgcgcacagcatatttatttacttggcaaatgatgcctttgcaagtttatgatatttcagtctaaaacagatactgttttaataaatgacatttacacaacaaaaaccacccattgacatttttaataatgttttaacagccaatgatggttcttagcgccgatttttagcagactgatattttcactaatgacttattttctgcttaccaaaaaaagccacgttatcttattgatgcaaaagagtgaacgtggcgttaaatgtaaccagttatatcagtagaaaacctggttgttgttaacagtctaaccggtcaattttttatgatttttttgataaaaattaaattttatttgctttaatcaccaccagatgacgttcgccatccagggctggaacctgaagtttaaccactgattcgacctgatattcttcgggcaacaaagcgatttcatcttccggcatttgccctttcagcgcgtagaaacggccttgctcaccaggaagatggtggcaccagctcaccatatcgttcagagaggcaaaagcgcggctaattacgccatcaaatggcggctctgaaggaaactcttctaccctgctctgtactggctcaatattctccagtttaagctcatgttgcccctgacgaaggaaacgcacgcgtttaccaaggctatccaacagagtgaaatgggcttcaggacgcacgatagagagtggaatgccaggcagtccaggaccggtgccgacatcgataaaccgttcaccttgcagatacggtgccaccacaatgctatcgagaatatggcgtaccagcatctcattaggatcgcggaccgaagtcaggttgtacgctttgttccatttatgcagcatattcacgtaggcaataagctggtttttctggtgatcggtaagcgaaatacctgcgtctttcagcagtaaggagagtttgttgagcacggtgattacctgttcttgatgcgttgcccggtaagcgggtgcttaccaggcatttttaatgcgttatgcgctacgacgcagcataccctgttttttcagccacaccagcagaatggagatggccgcaggcgtgacgccagaaatacgcgaagcctggccgatagaggctggtttgtgatcgttaagtttggcgatcacttcgttagaaagaccggatacctggcggtaatccagtgtcgcgggtagcagggtgttctcgttacgcagctgcttttcgatctcatcttgctggcgcgcgatataaccttcgtatttaacctgaatctcaacctgttccgccgcctgttcgtctgtcaacgcaggggcaaacggcgtcagcgtggttaatttttcataagtcatttccggacgacgcagcagatcttcaccactggcttcacgggaaagcggcgcagtcaggtgagcattcacttcggctgcagcttccgccgacggggttacccaggtcgatttcagacgctgacgctcacgctcgatattctcaagtttctcgttaaagcgcgcccaacgttcgtcatccaccaggcccagttcacgaccgatttcagtcaaacgcagatccgcattatcttcgcgtagcatcagacgatattctgcgcgcgaagtaaacatacgatacggttctttggttcctaaagtgcacaggtcatcaaccagtacgccgagatacgcctgagaacgcgccggagcccaaccttctttgtcagcagacagacgggcagcgttaagaccggccagcaaaccttgcgcagcggcttcttcgtaaccggtagtgccgttaatctgaccagcaaagaacagcccctggataaacttgctctccagcgtcggtttcaggtcgcgtggatcgaagaagtcatactcaatggcataacccggacgcacgatcttcgcgttttccatcccctgcatggagcggacgatttgcatctgcacatcgaacggcaggctggtggagataccgttcggataaatttcgttagaagtcagcccttccggttcaaggaagatctgatgctgatttctgtcggcgaagcgcatgactttgtcttcgatcgacgggcagtagcgtgggccgacaccttcgatcacccctgcgtacattgggctacgatcgaggttactgcggatcacatcatgggttttctcattggtatgagtgatataacacggcacctgctggggatgctgggacgcattgcccataaacgagaataccggcattgggttatcgccatgctgttgcgccagtacgctaaagtcgatggttcgagcatcaatacgcggtggtgtcccggttttcagacgaccaacgcgcagcggcagttcacgcaaacggcgagaaagcggaatggacggcggatcaccagcacggccaccgctgtaattatccagaccgatatgaattttaccgtcgaggaacgtcccaacggtgagcacgacggctttggcacggaacttcagccccatttgggtaacagcaccgaccacgcgatcgttttcgacaataagatcttcaaccgcctgctggaagatcatcaggttcggttggttctccagcgccgtacgtaccgcctgacggtagagcacacgatccgcctgagctcgggtagcgcgaactgccggtcccttgcttgcgtttagtatcctaaactggatacccgcctgatcgatcgctttcgccatcagaccgccgagtgcatccacttcttttaccagatgtcccttcccaataccgccgatcgccgggttgcagctcatctgccccagagtgtcgatattgtgtgtcaaaagcagagtctgttgacccatacgcgccgcggccatcgcggcctcggtgcctgcatgacccccgccaatgatgatgacgtcaaaaggatccggataaaacatggtgattgcctcgcataacgcggtatgaaaatggattgaagcccgggccgtggattctactcaactttgtcggcttgagaaagacctaggatcctgggtattaaaaagaagatctatttatttagagatctgttctattgtgatctcttattaggatcgcactgccctgtggataacaaggatccggcttttaagatcaacaacctggaaaggatcattaactgtgaatgatcggtgatcctggaccgtataagctgggatcagaatgaggggttatacacaactcaaaaactgaacaaccgttgttctttggataactaccggttgatccaagcttcctgacagagttatccacagtagatcgcacgatctgtatacttatttgagtaaattaatccacgatcccagccattcttctgccggatcttccggaatgtcgtgatcaagaatgttgatcttcagtgtttcgcccgtctgttttgcaccggaatttttgagttcagcctcgagtttatcaatagccccacaaaaggtgtcatattcacgactaccaataccgattgcgccaaagcggaccgcagaaagatcgggcttctgttcctgcaatgcttcatagaaaggagaaaggttgtccggaatatctccggcaccgtgggtggagctgataatcagccagatccccgaggcagataaatcttccaacagcggaccgtgcagcgtttcggtggtaaaacccgcctcttccagcttttcagccaggtgttctgctacatattcggcaccgccgagggtgctgccgctgataagagtgatatctgccataaaccgccacctttattaagagtggcgtattgtacgctgtgaacgcgttgggatctacctgtggaaaagtatgggattaaaaaagccgatcagggcttgatggtacgcatgatcgggttttgcaggacgatcaatgtctcggtggactgaatttcatcaattgtttggatcttgttgataagtacatgctggagagcgtcgatcgaacggcacatcacttttataaagatgctgtagtggccggttgtgtaataggcttcagtgacttcatcaaggctttccagctttgccagcgcggaagggtagtctttggcgctctttaatataatgccgataaagcagcctacgtcataaccgagctgcttcgggctgacatcaatacgcgccccggtaatgatccccgcctgcttcattttctctactcgaacgtgaatcgtccccggactgacgccaaattgtttcgccagttcggcgtaagcggtgcgcgcattgcccattaatgcttccaggatgccacggtccagattgtcgatcagataattttccataggattttcttatgcagattgatgattcattctattttagccttcttttttaatgaatcaaaagtgtgttaggctttttattgaatgattattgcatgtgtgtcggtttttgttgcttaatcataagcaacaggacgcaggagtataaaaaatgaaaaccgcttacattgccaaacaacgccaaattagcttcgtgaaatctcacttttctcgccaactggaagaacgtctggggctgatcgaagtccaggcgccgattcttagccgtgtgggggatggcacgcaggataacttgtcgggctgtgaaaaagcggtgcaggtaaaagtgaaagctctgcctgatgcccagttcgaagtggttcattcactggcgaagtggaaacgtcagaccttagggcaacacgacttcagcgcgggcgaagggctgtacacgcacatgaaagcccttcgccccgatgaagagcgtctttctccgttgcactcggtctatgttgaccagtgggactgggaacgcgtaatgggcgacggtgagcgtcaattctcgactctgaaaagcacggtagaggcgatctgggcgggaattaaagcaaccgaagctgcagttagcgaagagtttggtttggcaccgttcctgccggatcagatccacttcgtacacagccaggagttactgtctcgttatccggatctcgatgccaaagggcgtgagcgggcgattgcgaaagatcttggcgcggtattcctcgtcgggattggcggcaagctgagtgatggtcatcgtcacgacgtgcgcgcaccggattatgatgactggagcaccccgtcagagctgggccatgcgggtctgaacggcgatattctggtatggaaccctgtactggaagatgcgtttgagctttcttccatggggatccgcgtggatgccgacacgttgaagcatcagttggcgctgaccggtgatgaagatcgtctgcagctggaatggcatcaggcgctgctgcgcggtgaaatgccgcagaccatcggcggcggtatcggccagtctcgtttgaccatgctgctgctgcaactgccgcatatcggccaggttcagtgtggtgtatggccagctgctgttcgcgagaacgtcccttctctgctgtaataatttatcgccgccagcgtctgagcaggcggcttcgcatcccggtatcaaagcgccagatatgatcgaaaatgcgcatgatgccgggtttgccgtgtgccgacatcgccacggcatgaaagcgatgctgatgtacccgctgcagctctttcactttactcgtcacgtcgtcaggcaaccgctgagcgataaaatcagaaatcaccaccgcgtcggcatcaaaccattccctgctttgcaagcgttccataatggcgcgaaaacaactggcaagatcggtgccgccacgaaactgctggcttaaaaaacggattgcttgttcgatgccttgtgggcctgaaagctcataacggacgatctcggtggaaaatagcataatatagcagcgccggttttcagcgagagcaatgcgcatcaaggccaggcagaacgctttcgcacactgttcattaaagccgcccattgagccggaagtatccacacagacaataaacggcccgcgcggctgttcatcgtaatctttatgtaccaccggacgttcgatcactttttcacgccacgactcaccgtgcaggcgataggtgagcaactgtttttccaccagccgacggtaaaactcatactccagttccgttatccctagtgtcgccagttctggcggcaggagacgtaaaatatcatcgctttgttgcagaccatcaacctgctcaggaacagttgccggttcgcgcaccatggtgcggaaggcttccatctgcgcatcgttacgcggtattgatttggcttcccgggaacgccccagctgttctgccaggcgtttcagttccggctgttcgttaagaaattcaccgtatttcacaatcaactgatagtcgccacgtttaagctgaccggcgctcatatcccacagacgaccagctgcggtattgttatctgcgagaatcggttcaagttgtccgctcagcgtcatgcgttcctgaacttcacttaacagttgttcgcgttcttcttctaatagctgttgatttaacgtcgttgcttgcacgatcagacttaaacgccaacgctggaggaaaagcgtatgtaacgctgaagtgatcgtgctgttagcatcaaccaactgtcgggcttgttctgcccatggggaattcagacgatgcagtaagtccaggatctgtggtagctgcacaataaactgcggcgtggagaggagctggctttgctgatagcacatcacctcttcggtgagttccggcgggactcgggcatctttcagccgactgcgcagcgcctcacgccagcggggaacatcatcagtgattgccgccttcagtcgtgggaatttttcaaagaagactgccagctgcggtgaggccagcagcgcgatgatcatctcttcgatcaatccctcttcgctgacggccagcatcacattaagcgtatccagcgttagcattgttgtgcctggcgaatctgtgcgccgacatcctgtaggctggcttcaatgcgacctaaccagtcgccagggataaacagacatttttgctgttcgctgaataaagcgtgttgcttgcgccagtcactttcaagctcttccagttgttgttttatttcacctggcagaccttcagccgatgaaccgggaagtgccagcgtactgccttgtaaacttacatcgcgtacaacaagatgttgggcgctatccacttccagattcaatttctgggcaaagccgataccgttcagtttgccgcgaatttcaccacctttactcagccactgttccagcgcgttacgctcaaaggagatatgaaccacttccatatcatgcaattttaacggtttttgcagcagcagagtcagagtggaagcagtaacgttaacaggaagttgatactgctgacgacggctgaaaatgccgcccagacgaattaccgttaaggctgttttatcgctttgttgctgctggagttgcaggtgacgttgcacaatcgcgccaaggcgagtcaacatcccttgctgttgccaggcgtgaccggtcatcaatacatcaatttgttgttgtatcaaattcaggctttgcgcgtcataccacaggcaatctttcagcaaaatgagatctaccggggcaacagcactgcgaccgctaaaaaaggcgctggcctgcaataagcggatcgcttttttccagcgacgatccgagacataaggcgcatccggtaatttatccagttgctggcgcagcataaaaatcagctcaaatacatgatcgggcagcgtaatttcaccaatctctttctgccagcgttcatattcttcatctgtgacctgcaaggcatcaggaaccggattgtcgttttcatcctgttgactggtcagcatggagcggaaattcgctttatcctgcactttatctaaccacagacgaatcagcatgcggtcatataacgcttccagactgctgtctgcttccggcagctcgttggaggccgccaccagcagacgcatcgggattttttctacgtgtgcaccgttgcggaactggcgctcgttaatggcggtgagcaaggtattaagaattgccgggcccgctttccagatctcatccagaaagacaatttctgcttccggcaggtaaccgctggttaaacgttcatagcgcccttcatcttttagcgcctgaatagaaaggggaccaaaaacttcttccggcgtggagaagcgggtcatcagatattcaaacgcgcgggcattctgaaaggcgaattttaagcgccgggcgatcaaacttttggcaatacctggcgggccaaggaggaacacactttcaccacttaatgccgctaataaacacaagcggatggcgtggctacgttcataaagccccttttccaacgaactgctcaggcgggaaattctttccgctaataaatgagggtgagccataatgaagtggcgtcctttcgtcaaaagttctgcgtaaattgcgagtatagacgtttcttgctggtggctaaaatagtctcaaaggggggggatttttctttgagccaggttaatgtggccgcatttaggagtacgattttgccgttaatcgtgcatactgtgcgcttttttgtgggccaagggactaagcacacatttcatatttcaacgaaagactagtctatgagcactgataataagcaatcattgcccgcgattaccctcgcggcgattggagttgtctacggcgatattggtaccagcccgttatatacacttcgtgaatgtttgtccggccagtttggttttggcgttgaacgcgatgccgtgtttggctttttatcgctgatcttctggctgctaatctttgtggtttccattaaatatctcaccttcgtgatgcgggcagataacgccggtgaggggggatcctgacgttgatgtcgcttgccgggcgtaatacgtcggcgcgaaccacatcaatgctggtgattatggggctaatcggcggcagctttttctatggtgaagtcgtcataacacccgctatttcggtgatgtcagccattgaaggtctggaaatcgtcgccccgcagctggatacctggatagttcccctctcaattatcgttctcactttattatttatgattcaaaaacatggcacggctatggtcggtaagctgtttgcgccgatcatgctgacctggtttttgattctggcaggactggggttacgtagcattattgctaacccggaagtgctgcatgcgctgaatccaatgtgggcggtgcatttcttccttgaatacaaaacggtttcttttattgcattaggggcagtggtgttgtcgattacgggggtcgaggcgctgtatgctgatatggggcactttggtaagttccctattcgcctggcgtggttcaccgtcgtattaccttccttgacccttaattacttcggtcagggagcgctgttgttaaagaacccggaagcgattaagaacccgttcttcctgttggcaccggactgggcgctgatcccgctgctgatcatcgccgcactggcgacggtaattgcctcgcaggcggttatctctggcgtcttctcattgacgcgtcaggcggtacgtctgggatatttgtcgccgatgcgcattattcacacctccgaaatggagtcagggcaaatctatattccgtttgtgaactggatgctctatgtcgcggtcgtgattgtgattgtcagctttgagcactccagcaacctggcggcggcgtacgggattgcggtgaccggaaccatggtgctgacgtctattctctcgactaccgtggcacgtcagaactggcactggaataagtattttgttgcgctgatcctgattgctttcctttgtgtcgatattccattgttcaccgctaacctcgataaactgctctccggcggctggttgccattgagcctcggtactgtgatgtttatcgtgatgaccacctggaagagcgagcgtttccgcttgctgcggcggatgcatgaacatggtaactctctggaagcgatgattgcttcgctggagaaatcaccgcctgttcgcgtgcccgggaccgcggtgtatatgtcgcgtgcaatcaacgtcattccctttgcgctgatgcataaccttaaacataacaaggtattgcatgagcgggtgattctgttaactctgcgtaccgaagacgcgccatatgtccataatgtccgtcgggtacagattgaacaactgtcgcccactttctggcgcgtggtggcaagttatggttggcgagaaacgccaaacgtggaagaagttttccaccgctgcggtctggaaggattaagttgccggatgatggaaacctccttctttatgtcgcatgagtcgttgatcctcggcaaacgcccgtggtatttgcgtctgcgcggcaagctgtacttgctgctgcaacgtaatgcgctgcgtgcaccagatcaatttgaaattccgccaaacagggttatcgaactgggtactcaggtcgaaatctaacgccagacgcctcctttctccataagggggcgtttttgttttcatggttaatcaccatgtaaaacgtttcgaggttgatcacatttccgtaacgtcacgatggttttcccaactcagtcaggattaaactgcgggtcagcgaaacgtttcgctgatggagaaaaaaatgaaaaaaggcaccgttcttaattctgatatttcatcggtgatctcccgtctgggacataccgatacgctggtggtgtgtgatgctggtttacccatccccaaaagtacaacgcgtatcgatatggcattaacccagggtgtaccttcttttatgcaggtgctgggcgtcgtcacaaatgaaatgcaggtcgaggctgccattatcgcggaagagatcaaacaacataatccgcaactccacgaaacgttgctcactcaccttgagcagctgcaaaaacaccagggaaataccattgaaattcgttacaccacgcatgaacaattcaaacaacaaaccgcagaaagtcaggcggtaattcgcagcggagaatgttctccgtatgcgaatatcattctctgtgctggcgtgacgttctgaggccgtcatggaagcattacttcagcttaaaggcatcgataaagccttcccgggcgtaaaagccctctcgggcgcagcgttaaatgtctatccgggccgcgtgatggcgctggtgggcgaaaacggcgcgggtaaatccaccatgatgaaagtgcttactggtatctatgctcgcgatgccggcacgcttttatggctggggaaagaaacgacatttaccgggccgaaatcttcccaggaagccgggattgggattatccatcaggaactgaacctgatcccgcagttgaccattgccgaaaacattttcctcggtcgtgagtttgttaatcgctttggcaaaattgactggaaaaccatgtatgccgaagcggataaattgctggctaaacttaacctgcgctttaaaagcgacaagctggtgggcgatctttccatcggtgaccagcaaatggttgaaatcgccaaagtgctgagctttgagtcgaaagtcatcattatggatgaaccgaccgatgcgctgaccgataccgaaaccgaatccctgttccgcgtcatacgcgagctgaaatcgcaaggccgcggtattgtctatatctcccaccgcatgaaagaaatcttcgagatttgcgatgacgttaccgtttttcgtgacgggcaatttattgctgagcgcgaagtggcatcactgaccgaagattcgctgattgagatgatggtgggccgcaagctagaagatcaatatccacacctggacaaagcgccgggagatatccgcctgaaagtcgataatctctgcggacctggcgttaacgatgtctcttttactttacgcaaaggcgaaattcttggcgtctctggtttgatgggcgcaggtcgtaccgaactgatgaaagtgctctacggcgcactaccgcgcaccagcggttacgtcaccctggatgggcatgaagtcgttacccgttcaccgcaggatggcctggcaagcggcattgtgtatatctccgaagaccgtaaacgtgacggtttagtgttgggcatgtcagtaaaagagaacatgtcgctgacagcgctgcgctacttcagccgcgctggcggcagtttgaagcatgccgatgaacagcaggctgtgagtgatttcattcgtctgtttaatgtgaaaacaccgtcgatggaacaggcaattggtctgctttccggtggcaatcagcaaaaagtggcgattgcccgcggtctgatgacacgccccaaagtgttgatccttgatgaacctacccgtggcgtagatgtcggcgcgaaaaaagagatctatcaactgattaaccagttcaaagccgatggcttgagcatcattctggtgtcatcggagatgccagaagtattaggcatgagcgatcgcatcatcgtcatgcatgaagggcatctcagcggggaatttactcgtgagcaggccacccaggaagtgttaatggctgccgctgtgggcaagcttaatcgcgtgaatcaggagtaaaaaaatgacaacccagactgtctctggtcgccgttatttcacgaaagcgtggctgatggagcagaaatcgcttatcgctctgctggtgctgatcgcgattgtctcgacgttaagcccgaactttttcaccatcaataacttattcaatattctccagcaaacctcggtgaacgccattatggcggtcgggatgacgctggtgatcctgacgtcgggcatcgacttgtctgtaggttctctgttggcgctaaccggcgcagttgctgcatctatcgtcggcattgaagtcaatgcgctggtggctgtcgctgccgctctcgcgttaggtgccgcaattggtgcggtaaccggggtgattgtagcgaaaggtcgcgttcaggcgtttatcgctacgctggttatgatgcttttactgcgcggcgtgaccatggtttataccaacggtagcccagtgaataccggctttactgagaacgccgatctgtttggctggtttggtattggtcgtccgctgggcgtaccgacgccagtctggatcatggggattgtcttcctcgcggcctggtacatgctgcatcacacgcgtctggggcgttacatctacgcgctgggcggcaacgaagcggcaacgcgtctttctggtatcaacgtcaataaaatcaaaatcatcgtctattctctttgtggtctgctggcatcgctggccgggatcattgaagtggcgcgtctctcctccgcacaacccacggcggggactggctatgagctggatgctattgctgcggtggttctgggcggtacgagtctggcgggcggaaaaggtcgcattgttgggacgttgatcggcgcattaattcttggcttccttaataatggattgaatttgttaggtgtttcctcctattaccagatgatcgtcaaagcggtggtgattttgctggcggtgctggtagacaacaaaaagcagtaataacgactacaggacatcttgaatatgaacatgaaaaaactggctaccctggtttccgctgttgcgctaagcgccaccgtcagtgcgaatgcgatggcaaaagacaccatcgcgctggtggtctccacgcttaacaacccgttctttgtatcgctgaaagatggcgcgcagaaagaggcggataagcttggctataacctggtggtgctggactcccagaacaacccggcgaaagagctggcgaacgtgcaggacttaaccgttcgcggcaccaaaattctgctgattaacccgaccgactccgacgcagtaggtaatgctgtgaagatggctaaccaggcgaacatcccggttatcactcttgaccgccaggcaacgaaaggtgaagtggtgagccacattgcttctgataacgtactgggtggcaaaatcgccggtgattacatcgcgaagaaagcgggtgaaggtgccaaagttatcgagctgcaaggcattgctggtacatccgcagcccgtgaacgtggcgaaggcttccagcaggccgttgctgctcacaagtttaatgttcttgccagccagccagcagattttgatcgcactaaaggtttgaacgtaatgcagaacctgttgaccgctcatccggatgttcaggctgtattcgcgcagaatgatgaaatggcgctgggcgcgctgcgcgcactgcaaactgccggtaaatcggatgtgatggtcgtcggatttgacggtacaccggatggcgaaaaagcggtgaatgatggcaaactagcagcgactatcgctcagctacccgatcagattggcgcgaaaggcgtcgaaaccgcagataaagtgctgaaaggcgagaaagttcaggctaagtatccggttgatctgaaactggttgttaagcagtagttttaatcaggttgtatgacctgatggtgacataaatacgtcatcgacagatgaacgtgtaatataaagaaaagcagggcacgcgccaccctaacacggtggcgcattttatggacatcccgaatatgcaaaacgcaggcagcctcgttgttcttggcagcattaatgctgaccacattcttaatcttcaatcttttcctactccaggcgaaaccgtaaccggtaaccactatcaggttgcatttggcggcaaaggcgcgaatcaggctgtggctgctgggcgtagcggtgcgaatatcgcgtttattgcctgtactggcgatgacagcattggcgagagcgttcgccagcagctcgccactgataacatcgatattactccggtcagcgtgatcaaaggcgaatcaacaggtgtggcgctgatttttgttaatggcgaaggtgagaatgtcattggtattcatgccggcgctaatgctgccctttccccggcgctggtggaagcgcaacgtgagcgtattgccaacgcgtcagcattattaatgcagctggaatcaccactcgaaagtgtgatggcagcggcgaaaatcgcccatcaaaataagactatcgttgcgcttaacccggctccggctcgcgaacttcctgacgaactgctggcgctggtggacattattacgccaaacgaaacggaagcagaaaagctcaccggtattcgtgttgaaaatgatgaagatgcagcgaaggcggcgcaggtactgcatgaaaaaggtatccgtactgtactgattactttaggaagtcgtggtgtatgggctagcgtgaatggtgaaggtcagcgcgttcctggattccgggtgcaggctgtcgataccattgctgccggagatacctttaacggcgcgttaatcacggcgttgctggaagaaaaaccattgccagaggcgattcggtttgcccatgctgccgctgcgattgccgtaacacgtaaaggcgcacaaccttccgtaccgtggcgtgaagagatcgacgcatttttagacaggcagaggtgacgcttggctacaatgaaagatgttgcccgcctggcgggcgtttctacctcaacagtttctcacgttatcaataaagatcgcttcgtcagtgaagcgattaccgccaaagttgaagcggcgattaaagaactcaattacgcgccatcagctctggcgcgtagcctcaaactcaatcaaacacataccattggcatgttgatcactgccagtaccaatcctttctattcagaactggtgcgtggcgttgaacgcagctgcttcgaacgcggttatagtctcgtcctttgcaataccgaaggcgatgaacagcggatgaatcgcaatctggaaacgctgatgcaaaaacgcgttgatggcttactgttactgtgcaccgaaacgcatcagccttcgcgtgaaatcatgcaacgttatccgacagtgcctaccgtgatgatggactgggctccgttcgatggcgacagcgatcttattcaggataactcgttgctgggcggagacttagcaacgcaatatctgatcgataaaggtcatacccgtatcgcctgtattaccggtccgctggataaaactccggcgcgcctgcggttggaaggttatcgggcggcgatgaaacgtgcgggtctcaacattcctgatggctatgaagtcactggtgattttgaatttaacggcgggtttgacgccatgcgccaactgttatcacatccgctgcgtcctcaggccgtctttaccggaaatgacgctatggctgttggcgtttaccaggcgttatatcaggcagagttacaggttccgcaggatatcgcggtgattggttatgacgatatcgaactggcaagctttatgacgccaccattaaccactatccaccaaccgaaagatgaactgggggagctggcgattgatgtactcatccatcggataacccagccgacccttcagcaacaacgattacaacttactccgattctgatggaacgcggttcggcttagatttacgctgtcttttgatcaaattattaccatcggttgttttcagaagcatgaacattgctgctgaagcaacagtaataatgcccatcgtgataaacgtatagtggaattgttcgacagtcgttgtgccttccatcccttcataaacgcgaaggacggccgcacttacagcaacgcctaaactaatcgacagttgctgcgtgaccgccagaacactgttaccgctgctggcgttgtcatcggtcagatcggcaagtgtgatggtattcatcgcggtaaattgcgtcgacatagccatccctaatataaacaacggcaagatcagcatccatatcgccattgccggtgattgcaaagagaactgagcgatcattagcccaataatcaccgtgatccccactaaagtatggcgatagcccagacgacgtaagacttgggtaaccatcgattttgcaataatggaacctaacgctgtcggtgccatcatacagccggcaataaacgcctgataaccaaatcctacctgtaacatcaatggcataaggaacggtacacaaccggtccccagacgggttgcaatattgcctacgataccgatcgagaaagtgcgggttttaaataaatctaatgaaattaatgggtttggcgtgcgtcgtgcatggagaatatagagaagcagtaacccgatgctggtgacaattatcgtcaaggcaatccagctggcgacaatcttttccccgaatagctctattccgcttgagaagagaacaagactgaggccaaacagcaaaaagccagtgatatcgaatctgcgtcgtgcggtggtgaaattgggcatatgtttgcgcgcgtaaagaaggcccgcaatacctatggggatattgattaaaaatatccagtgccaggttgcccaggtgaccagcacgccgccaagaacggggcctaaaattggtcccaccagacccggcatggcgacaaaattcaatactggaagaagttcattacgaggataagcgcgcagtaaggccagccgagcaacaggcatcatcattgcgccgcctatcccctgaataacccggaagacaaccagctgtggtagcgaattagaaagtgcgcaggccagagaacccaatgtgaacagactcacggcaagggtaaaaatgcgacgcgtaccgaagcgatcggctagccatccgcttaccggaataagcatcgccaccgtcagcgtataactgatgatggctgattgcatcgcgagaggagaacgattaaggctatgagcgattgcgggtaaggcggtattcagaatagtggcatcaagtgcctgcatgaagaaggccatcgccgcgatccacggcaaacccgccatactgcgcttctttttatcgctcattcaatgtcctgttatcgggttatcacttatcaggtgagcgtagcagcgcctgacaagctttaaatgccgcgtcgccatcgctttggataatcgcatcgacaatcgcctggtgcagatccagctttatcactgtatcgctggtaattgacgtgaagtaagtgtgataaaccgaatggaatagcgaggcgaatgaggtcaaaaacggattggcgctcatttcatagatatgctcatgccaggccatatcgacttcgatccagcgttcacggcgaaagttctcttttaatgccgccatttcggccattaacgtattgagatgcgctttctgttctgcggtgccaaccgttgctgccagtaggcaggcttgcggctccagacagatacgcataaccagaaagtgatcgatgacctgatgaaagttctcttctgtcatccaccaggtaagcaattcctgatcaagaaaattccagttcgattgtggcattacccgggtaccaattcgcggtcgcggtaaaaccatcccttttgccgttaacgttttgaccgcttcgcgtaccgctgtacgactcactccaaattgctcgcccagctcaatctcaccgggcaaaatggtgccgggttcatattcaccttttaagatccgttgcgccagcttctcagccagaacatacgaaaggtttttctgtgcagctaactgttgtgcgcttaaaggcattactaatcttcctttttctttttattcctccttagtatgccaccaggatgtgtgattacggttgcaaaaacggcaaattgcttgttttatggcacattaacggggcttttgctgaaaaaatgcgcggtcagaaaattattttaaatttcctcttgtcaggccggaataactccctataatgcgccaccactgacacggaacaacggcaaacacgccgccgggtcagcggagttctcctgagagctccgacagagaaagcaaaaataaatgcttgactctgtagcgggaaagcgtattatgcacaccccgcgccgctgagaaaaagcgaggcggcactgctctttaacaatttatcagacaatctgtgtgggcactcgaagatacggattcttaacgtcgcaagacgaaaaatgaataccaagtctcaagagtgaacacgtaattcattacgaagtttaattctttgagcatcaaacttttaaattgaagagtttgatcatggctcagattgaacgctggcggcaggcctaacacatgcaagtcgaacggtaacaggaaacagcttgctgtttcgctgacgagtggcggacgggtgagtaatgtctgggaaactgcctgatggagggggataactactggaaacggtagctaataccgcataatgtcgcaagaccaaagagggggaccttcgggcctcttgccatcggatgtgcccagatgggattagcttgttggtggggtaacggctcaccaaggcgacgatccctagctggtctgagaggatgaccagccacactggaactgagacacggtccagactcctacgggaggcagcagtggggaatattgcacaatgggcgcaagcctgatgcagccatgccgcgtgtatgaagaaggccttcgggttgtaaagtactttcagcggggaggaagggagtaaagttaatacctttactcattgacgttacccgcagaagaagcaccggctaactccgtgccagcagccgcggtaatacggagggtgcaagcgttaatcggaattactgggcgtaaagcgcacgcaggcggtttgttaagtcagatgtgaaatccccgggctcaacctgggaactgcatctgatactggcaagcttgagtctcgtagagggggtagaattccaggtgtagcggtgaaatgcgtagagatctggaggaataccggtggcgaaggcggccccctggacgaagactgacgctcaggtgcgaaagcgtggggagcaaacaggattagataccctggtagtccacgccgtaaacgatgtcgacttggaggttgtgcccttgaggcgtggcttccggagctaacgcgttaagtcgaccgcctggggagtacggccgcaaggttaaaactcaaatgaattgacgggggcccgcacaagcggtggagcatgtggtttaattcgatgcaacgcgaagaaccttacctggtcttgacatccacggaagttttcagagatgagaatgtgccttcgggaaccgtgagacaggtgctgcatggctgtcgtcagctcgtgttgtgaaatgttgggttaagtcccgcaacgagcgcaacccttatcctttgttgccagcggtccggccgggaactcaaaggagactgccagtgataaactggaggaaggtggggatgacgtcaagtcatcatggcccttacgaccagggctacacacgtgctacaatggcgcatacaaagagaagcgacctcgcgagagcaagcggacctcataaagtgcgtcgtagtccggattggagtctgcaactcgactccatgaagtcggaatcgctagtaatcgtggatcagaatgccacggtgaatacgttcccgggccttgtacacaccgcccgtcacaccatgggagtgggttgcaaaagaagtaggtagcttaaccttcgggagggcgcttaccactttgtgattcatgactggggtgaagtcgtaacaaggtaaccgtaggggaacctgcggttggatcacctccttaccttaaagaagcgttctttgaagtgctcacacagattgtctgatagaaagtgaaaagcaaggcgtcttgcgaagcagactgatacgtccccttcgtctagaggcccaggacaccgccctttcacggcggtaacaggggttcgaatcccctaggggacgccacttgctggtttgtgagtgaaagtcacctgccttaatatctcaaaactcatcttcgggtgatgtttgagatatttgctctttaaaaatctggatcaagctgaaaattgaaacactgaacaacgagagttgttcgtgagtctctcaaattttcgcaacacgatgatgaatcgaaagaaacatcttcgggttgtgaggttaagcgactaagcgtacacggtggatgccctggcagtcagaggcgatgaaggacgtgctaatctgcgataagcgtcggtaaggtgatatgaaccgttataaccggcgatttccgaatggggaaacccagtgtgtttcgacacactatcattaactgaatccataggttaatgaggcgaaccgggggaactgaaacatctaagtaccccgaggaaaagaaatcaaccgagattcccccagtagcggcgagcgaacggggagcagcccagagcctgaatcagtgtgtgtgttagtggaagcgtctggaaaggcgtgcgatacagggtgacagccccgtacacaaaaatgcacatattgtgagctcgatgagtagggcgggacacgtggtatcctgtctgaatatggggggaccatcctccaaggctaaatactcctgactgaccgatagtgaaccagtaccgtgagggaaaggcgaaaagaaccccggcgaggggagtgaaaaagaacctgaaaccgtgtacgtacaagcagtgggagcacgcttaggcgtgtgactgcgtaccttttgtataatgggtcagcgacttatattctgtagcaaggttaaccgaataggggagccgaagggaaaccgagtcttaactgggcgttaagttgcagggtatagacccgaaacccggtgatctagccatgggcaggttgaaggttgggtaacactaactggaggaccgaaccgactaatgttgaaaaattagcggatgacttgtggctgggggtgaaaggccaatcaaaccgggagatagctggttctccccgaaagctatttaggtagcgcctcgtgaattcatctccgggggtagagcactgtttcggcaagggggtcatcccgacttaccaacccgatgcaaactgcgaataccggagaatgttatcacgggagacacacggcgggtgctaacgtccgtcgtgaagagggaaacaacccagaccgccagctaaggtcccaaagtcatggttaagtgggaaacgatgtgggaaggcccagacagccaggatgttggcttagaagcagccatcatttaaagaaagcgtaatagctcactggtcgagtcggcctgcgcggaagatgtaacggggctaaaccatgcaccgaagctgcggcagcgacgcttatgcgttgttgggtaggggagcgttctgtaagcctgtgaaggtgtactgtgaggtatgctggaggtatcagaagtgcgaatgctgacataagtaacgataaagcgggtgaaaagcccgctcgccggaagaccaagggttcctgtccaacgttaatcggggcagggtgagtcgacccctaaggcgaggccgaaaggcgtagtcgatgggaaacaggttaatattcctgtacttggtgttactgcgaaggggggacggagaaggctatgttggccgggcgacggttgtcccggtttaagcgtgtaggctggttttccaggcaaatccggaaaatcaaggctgaggcgtgatgacgaggcactacggtgctgaagcaacaaatgccctgcttccaggaaaagcctctaagcatcaggtaacatcaaatcgtaccccaaaccgacacaggtggtcaggtagagaataccaaggcgcttgagagaactcgggtgaaggaactaggcaaaatggtgccgtaacttcgggagaaggcacgctgatatgtaggtgaagcgacttgctcgtggagctgaaatcagtcgaagataccagctggctgcaactgtttattaaaaacacagcactgtgcaaacacgaaagtggacgtatacggtgtgacgcctgcccggtgccggaaggttaattgatggggtcagcgcaagcgaagctcttgatcgaagccccggtaaacggcggccgtaactataacggtcctaaggtagcgaaattccttgtcgggtaagttccgacctgcacgaatggcgtaatgatggccaggctgtctccacccgagactcagtgaaattgaactcgctgtgaagatgcagtgtacccgcggcaagacggaaagaccccgtgaacctttactatagcttgacactgaacattgagccttgatgtgtaggataggtgggaggctttgaagtgtggacgccagtctgcatggagccgaccttgaaataccaccctttaatgtttgatgttctaacgtggacccgtaatccgggttgcggacagtgtctggtgggtagtttgactggggcggtctcctcctaaagagtaacggaggagcacgaaggttggctaatcctggtcggacatcaggaggttagtgcaatggcataagccagcttgactgcgagcgtgacggcgcgagcaggtgcgaaagcaggtcatagtgatccggtggttctgaatggaagggccatcgctcaacggataaaaggtactccggggataacaggctgataccgcccaagagttcatatcgacggcggtgtttggcacctcgatgtcggctcatcacatcctggggctgaagtaggtcccaagggtatggctgttcgccatttaaagtggtacgcgagctgggtttagaaacgtcgtgagacagttcggtccctatctgccgtgggcgctggagaactgaggggggctgctcctagtacgagaggaccggagtggacgcatcactggtgttcgggttgtcatgccaatggcactgcccggtagctaaatgcggaagagataagtgctgaaagcatctaagcacgaaacttgccccgagatgagttctccctgactccttgagagtcctgaaggaacgttgaagacgacgacgttgataggccgggtgtgtaagcgcagcgatgcgttgagctaaccggtactaatgaaccgtgaggcttaaccttacaacgccgaagctgttttggcggatgagagaagattttcagcctgatacagattaaatcagaacgcagaagcggtctgataaaacagaatttgcctggcggccgtagcgcggtggtcccacctgaccccatgccgaactcagaagtgaaacgccgtagcgccgatggtagtgtggggtctccccatgcgagagtagggaactgccaggcatcaaattaagcagtaagccggtcataaaaccggtggttgtaaaagaattcggtggagcggtagttcagtcggttagaatacctgcctgtcacgcagggggtcgcgggttcgacgtcccgtccgttccgccaccctaattaggggcgtagttcaattggtagagcaccggtctccaaaaccgggtgttgggagttcgagtctctccgcccctgccagaaatcatccttagcgaaagctaaggatttttttatctgaaataaccctctctgaagtaaatccttctaccggcatccttgccagccattcatattaatacacttcatccagcacgttaattttcaatagatcgcgaatcaacgtatttttatcgctattttgcagccatatggcataaagcggccgtgaaagtgttgtgctatcgacaacggtatgcaggccgccttttttacgcgcccagctgacgggtagccaggtgcaaccattaagcatcgcaatctgttgctgtgccagttcagcagaactggttgtcagaatgggcacttcgtcagcaccgatcaaacctgcctcatgctgttgaaaatctggcccccactccagtcgcagatagttaagatctccctttagtttagaaggggcactggtataaagcgctaaagtgaaataccccagcaactgactactaaattcgtccattttgggcgcttcagtggtaataagaagatcaagctggcgttcatgcagctgttttaccagagactgccgttgggcaattcgcgcttcgaactgtaagcctgtatgggcatcctgattttgatacaagcgtcccagccactgattaagcatacattcccacaacgaggcgctggcaccgatagaaaactcgttatgtcgtgaggtatgcgccacctccttgcgggcggcctgccaggtgctcatgagcgtttctgcataaggcagtagtttttcaccggcagcggttaaacggatattgtttctgtggcgggtgaaaaggttcacacccagttgattttccagttgtctgattcgaaagctcactgctgactgggtcagatagagcgattcagccgctcgaccaaagtgacgcgttcggctaacttccaggaaagtttttaacaattccgtatccacagtgctctccgcaaaattatttgtcgttatgatttaaatgttttgttttacactctgtcaagcgtaactaatactccgcgccataactagctcggtcaaagaattaggagcgtgcaggatggcggaaagctttacgacgactaatcgatatttcgacaataaacattatccacgtggattctctcgtcatggtgatttcaccatcaaagaggcacaactgcttgagcgtcatggttatgccttcaatgagttggatcttggcaaacgcgagccggttaccgaggaagagaaactcttcgtagcagtatgccgtggcgaacgtgagccagtgacagaagcagaacgcgtgtggtccaagtatatgacgcgtattaagcgtccaaaacgttttcacaccctttccggcggtaaaccgcaggttgaaggtgctgaagactacaccgattctgatgattaataaaaagggcgaaatgccctttttttatgtcagtagtttttgcagatggatgagcaaacggtcaatcgcacgatagctaactgcctcctgcaaatgctgacgtgtgataatgtcagactgatcaatatcagcaatggttcgtgcaactttcaataaccgctgccaggcacgaatcgataaccccagatggatcagtgttccttccaaccacatcgcatcttcgctctcaagtttgcagaattggcgtatttccggactatccagccaggcattcagtttattctgccgcttaaattggcgctctctggcggccattacgcgttgtttaacggtggcgctgctttctcccggcactaccgttttactcaaaatgccggggggtggtaatgggatctccagtgagagatcgaagcggtcgagaaagggccccgagagccggttgagataacgtaatgtctgttctggcgtgcagcggttatggtttccctgataatgtccggtagggctgggattcatcgccgcaacaagctggaaacgggctggataggttatttttgctcgcgtgcgtgaaagatggatctgcccggattcaatcggctctcgcaaggcatccagtgtacgccgttcaaattcaggtaactcatcaagaaaaagcacgccgttatgcgccagcgaaatttcacctggccctggaattgcaccaccgcccaccatcgcagttaacgacgcactgtgatgaggtgagcggaacgggcgctgccgccattgtttttgtactgactcagcatttaccagacttaatatcgcagcgctctccagtgcctcttcattgcttaaatctggcaacaggccattaatacggctggcgagcattgttttacctgttcccggcggcccaatcagtaaaaggttgtgcccgccagcggcggtaatttccagtcctcgctttccttgttcctgaccgacaacatcactgagatcatgttgtagcgcccgggatactgcatcagttggtttcgggcgttcgagagcgtgcttaccttccagaaacgcacagacagcttgcagatgatcggctatcaggcatccttcaccgttaattagccccacttcatcttcgttatctttcgcgacgataatttttctgcccgacttaatagcttcagttgcactggagattgcaccgggaacgccacgcagagcgcctgtaagagccagttctccgactaattcatattcatctaacttattggctgtaagctgttctgaggccgccagcaacgcaatggcgataggtaaatcatatcgtcccccttcttttggcagatcggctggagcaaggttgatggtgatttttttcgccggatattcatatccgctattgataatggcgctgcgcacgcgatcgcgagcttcttttacagttgtttctggtaagcctaccatcgttaagccgggtagacctttactgatatgtacctcaacagtgatcgggggcgcatttactcccagggctgcgcgggtatgaacaattgacagtgacataagccctccttgagtcaccattatgtgcataagatatcgctgctgtagcccgctaattcgtgaattttagtggctgattcctgtttatttgtgcaagtgaagttgagttgttctggcggtggaatgatgctcgcaaaatgcagcggacaaaggatgaactacgaggaagggaacaacatttatactgaaattgaatttttttcactcactattttctttttaaaaaacaacaatttctattgaaattattaaagccatcataaaaataggcccaaaaatatcttgtgctattcgcaaaatctatggtaactctttaggcattccttcgaacaagatgcaagaaaagacaaaatgacagcccttctacgagtgattagcctggtcgtgattagcgtggtggtgattattatcccaccgtgcggggctgcacttggacgaggaaaggcttagagatcaagccttaacgaactaagacccccgcaccgaaaggtccgggggtttttttgaccttaaaaacataaccgaggagcagacaatgaataacagcacaaaattctgtttctcaagattcaggacggggaactaactatgaatggcgcacagtgggtggtacatgcgttgcgggcacagggtgtgaacaccgttttcggttatccgggtggcgcaattatgccggtttacgatgcattgtatgacggcggcgtggagcacttgctatgccgacatgagcagggtgcggcaatggcggctatcggttatgcccgtgctaccggcaaaactggcgtatgtatcgccacgtctggtccgggcgcaaccaacctgataaccgggcttgcggacgcactgttagattccatccctgtcgttgccatcaccggtcaagtgtccgcaccttttatcggcaccgacgcatttcaggaagtggatgtcctgggattgtcgttagcctgtaccaagcacagctttctggtgcagtcgctggaagagttgccgcgcatcatggctgcagcattcgacgttgccagctcaggtcgtcctggtccggttctggtcgatatcccaaaagatatccagctagccagcggtgacctggaaccgtggttcaccaccgttgaaaacgaagtgactttcccacatgccgaagttgagcaagcgcgccagatgctggcaaaagcgcaaaaaccgatgctgtacgttggtggtggcgtgggtatggcgcaggcagttcctgctttacgagaatttctcgctaccacaaaaatgcctgccacctgcacgctgaaagggctgggcgcagttgaagcagattatccgtactacctgggcatgctgggaatgcatggcaccaaagcggcgaacttcgcggtgcaggagtgcgacttgctgatcgccgtgggtgcacgttttgatgaccgggtgaccggcaaactgaacaccttcgcaccacacgccagtgttatccatatggatatcgacccggcagaaatgaacaagctgcgtcaggcacatgtggcattacaaggtgatttaaatgctctgttaccagcattacagcagccgttaaatatcaatgactggcagcaatactgcgcgcagctgcgtgatgaacatacctggcgttacgaccatcccggtgacgctatctacgcgccgttgttgttaaaacaactgtcggatcgtaaacctgcggattgcgtcgtgaccacagatgtggggcagcaccagatgtgggccgcgcagcacatcgcacacactcgcccggaaaatttcattacctccagcggcttaggcaccatgggtttcggtttaccagcggcggttggcgcacaagtcgcacgaccgaacgatactgtcgtctgtatctccggtgacggctctttcatgatgaatgtgcaagagctgggcaccgtaaaacgcaagcagttaccgttgaaaatcgtcttactcgataaccaacggttagggatggttcgacaatggcagcaactgttttttcaggaacgatacagcgaaaccacccttactgataaccccgatttcctcatgttagccagcgccttcggcatccctggccaacacatcacccgtaaagaccaggttgaagcggcactcgacaccatgctgaacagtgatgggccatacctgcttcatgtctcaatcgacgaacttgagaacgtctggccgctggtgccgcctggcgccagtaattcagaaatgttggagaaattatcatgatgcaacatcaggtcaatgtatcggctcgcttcaatccggaaaccttagaacgtgttttacgcgtggtgcgtcatcgtggtttccacgtctgctcaatgaatatggctgccgccagcgatgcacaaaatataaatatcgaattgaccgttgccagcccacggtcggtcgacttactgtttagtcagttaaataaactggtggacgtcgcacacgttgccatctgccagagcacaaccacatcacaacaaatccgcgcctgagcgcaaaaggaatataaaaatgaccacgaagaaagctgattacatttggttcaatggggagatggttcgctgggaagacgcgaaggtgcatgtgatgtcgcacgcgctgcactatggcacttcggtttttgaaggcatccgttgctacgactcgcacaaaggaccggttgtattccgccatcgtgagcatatgcagcgtctgcatgactccgccaaaatctatcgcttcccggtttcgcagagcattgatgagctgatggaagcttgtcgtgacgtgatccgcaaaaacaatctcaccagcgcctatatccgtccgctgatcttcgttggtgatgttggcatgggtgtaaacccgccagcgggatactcaaccgatgtgattatcgccgctttcccgtggggagcgtatctgggcgcagaagcgctggagcaggggatcgatgcgatggtttcctcctggaaccgcgcagcaccaaacaccatcccaaccgcggcaaaagccggtggtaactatctctcttccctgctggtgggtagcgaagcgcgccgccacggttatcaggaaggtatcgcgctggatgtgaacggttatatctctgaaggcgcaggcgaaaacctgtttgaagtgaaagatggtgtgctgttcaccccaccgttcacctcctccgcgctgccgggtattacccgtgatgccatcatcaaactggcgaaagagctgggaattgaagtgcgtgagcaggttctgtcgcgcgaatccctgtacctggcggatgaagtgtttatgtccggtactgcggcagaaatcacgccagtgcgcagtgtagatggtattcaggttggcgaaggccgttgtggcccggttaccaaacgcattcagcaagccttcttcggcctcttcactggcgaaaccgaagataaatggggctggttagatcaagttaatcaataaatacaaaaatgggacggcacgcaccgtcccatttacgagacagacactgggagtaaataaagtatgcctaagtaccgttccgccaccaccactcatggtcgtaatatggcgggtgctcgtgcgctgtggcgcgccaccggaatgaccgacgccgattttggcaagccgattatcgcggttgtgaactcgttcacccaatttgtaccgggtcacgtccatctgcgcgatctcggtaaactggtcgccgaacaaattgaagcggctggcggcgttgccaaagagttcaacaccattgcggtggatgatgggattgccatgggccacggggggatgctttattcactgccatctcgcgaactgatcgctgattccgttgagtatatggtcaacgcccactgcgccgacgccatggtctgcatctctaactgcgacaaaatcaccccggggatgctgatggcttccctgcgcctgaatattccggtgatctttgtttccggcggcccgatggaggccgggaaaaccaaactgtccgatcagataatcaaactcgatctggttgatgcgatgatccagggcgcagacccgaaagtttctgactcccagagcgatcaggttgaacgttccgcgtgtccgacctgcggctcctgctccgggatgtttaccgctaactcaatgaactgcctgaccgaagcgctgggtctgtcgcagccgggcaacggctcgctgctggcaacccacgccgaccgtaagcagttgttcctcaatgccggtaaacgcattgttgaattgaccaaacgttactacgagcaaaacgacgaaagtgcactgccgcgcaatattgctagcaaagcggcgtttgaaaacgccatgacgctggatatcgcgatgggtggatcgactaacaccgtacttcacctgctggcggcggcgcaggaagcggaaatcgacttcaccatgagtgatatcgataagctttcccgcaaggttccacagctgtgtaaagttgcgccgagcacccagaaataccatatggaagatgttcaccgtgctggtggtgttatcggtattctcggcgaactggatcgcgcggggttactgaaccgtgatgtgaaaaacgtacttggcctgacgttgccgcaaacgctggaacaatacgacgttatgctgacccaggatgacgcggtaaaaaatatgttccgcgcaggtcctgcaggcattcgtaccacacaggcattctcgcaggattgccgttgggattctctcgatgacgatcgcgccaatggctgtatccgctcgctggaacacgcctacagcaaagacggcggcctggcggtgctctacggtaatttcgcagaaaacggctgcatcgttaaaaccgcgggcgtcgatgacagcatcctcaaattcaccggcccggcgaaagtgtacgaaagccaggacgacgcggtagaagcgatcctcggtggcaaagttgtcgcgggcgatgtggtggtgatccgctatgaaggcccgaaaggcggccctggcatgcaggaaatgctctacccaaccagcttcctgaaatcaatgggtctcggtaaagcctgtgcgctgatcaccgacggtcgtttctctggcggcacctctggtctttccatcggccacgtctcaccggaagcggcaagcggcggcagcattggcctgattgaagatggtgacctgatcgctatagacatcccgaaccgtggcattcagttacaggtaagcgatgccgaactggcggcgcgtcgtgaagcgcaggacgctcgaggtgacaaagcctggacgccgaaaaaccgtgaacgtcaggtttcctttgccctgcgcgcctacgccagcctggcaaccagcgccgacaaaggtgcggtgcgcgataaatcgaaactggggggttaataatggctgactcgcaacccctgtccggtgctccggaaggtgccgaatatttaagagcagtgctgcgcgcgccggtttacgaggcggcgcaggttacgccgctacaaaaaatggaaaaactgtcgtcgcgtcttgataacgtcattctggtgaagcgcgaagatcgccagccagtgcacagctttaagctgcgcggcgcatacgccatgatggcgggcctgacggaagaacaaaaagcgcacggcgtgatcactgcttctgcgggtaaccacgcgcagggcgtcgcgttttcttctgcgcggttaggcgtgaaggccctgatcgttatgccaaccgccaccgccgacatcaaagtcgatgcggtacgtggattcggcggcgaagtgctgcttcatggcgcgaactttgacgaagcgaaagctaaagcgatcgaactgtcacagcagcaggggttcacctgggtgccgccgttcgaccatccgatggtgattgccgggcaaggcacgctggcgctggaactgctccagcaggacgcccatctcgaccgcgtatttgtgccagtcggcggcggcggtctggcggcgggcgttgcggtgctgatcaaacaactgatgccacaaatcaaagtgatcgccgtagaagcggaagactccgcctgcctgaaagcagcgctggatgcgggtcatccggttgatctgccgcgcgtagggctatttgctgaaggcgtagcggtaaaacgcatcggtgacgaaaccttccgtttatgccaggagtatctcgacgacatcatcaccgtcgatagtgatgcgatctgtgcggcgatgaaggatttattcgaagatgtgcgcgcggtggcggaaccctctggcgcgctggcgctggcgggaatgaaaaaatatatcgcccagcacaacattcgcggcgaacggctggcgcatattctttccggtgccaacgtgaacttccacggcctgcgctacgtctcggaacgctgcgaactgggcgaacagcgtgaagcgttgttggcggtgaccattccggaagaaaaaggcagcttcctcaaattctgccaactgcttggcgggcgatcggtcaccgagttcaactaccgttttgccgatgccaaaaacgcctgcatctttgtcggcgtgcgcctgagccgcggcctcgaagagcgcaaagaaattttgcagatgctcaacgacggcggctacagcgtggtggatctctccgacgacgaaatggcgaagttgcatgtgcgctatatggtcggcgggcgtccgtcacatccgttgcaggaacgcctctacagcttcgaattcccggaatcaccgggcgcgctgctgcgcttcctcaacacgctgggtacgcactggaacatttctttgttccactatcgcagccatggcaccgactacgggcgcgtactggcggcgttcgaacttggcgaccatgaaccggatttcgaaacccggctgaatgagctgggctacgattgccacgacgaaaccaataacccggcgttcaggttctttttggcgggttagggaaaaatgcctgatagcgcttcgcttatcaggcctacccgcgcgacaacgtcatttgtggttcggcaaaatcctccagaacgcctcaatcagcggctcatgcagccgctttttttgtgcacacacgcccagttcaaacggcgttttttcatcgctgcgctctaaaatcatcacgcggttacgcaccggttcggggctgttttccagcactacttccggcaacagcgccacaccacagccgagcgccaccatcgataccatcgcttcatgcccgccaaccgtggcgtaaatcatcgggttgctgattttattgcgtcgaaaccacagttcaatgcggcgacgcaccggtccctgatcggccatgataaacggcactgtagaccagtccggcttctctgccgaaacctggttacgcaccgggcagggcagcgcgggcgcaatcagcactactgccagattctccagcatcgaaaacgccacagcgccgggtagcgtctccggtttcccggcaatcgccagatccgcttctcccgtgaccactttttccattgcatctgccgcatcaccagtggtgagtttgatctccaccgacgggtgttccgcgcggaagcgatccagaatcggcggcagatggctgtaggcagcggtcaccgagcagaagatatgtaattcgccagagagcgacggcccttgctgatcgatggtgtggcgcaattgctgatactgcaacagcgtttgctgggcgaaaacgcgcagctcttcgcccgcttccgtcagcgttaccgtgcggttatcgcgcacaaatagcggctgaccaagatcttcttccaggcgctgaatctgccgtgagagcgtggatgggctaacgtgcatcgcccgcgcgctgcggccaaaatggcggctttccgccagatgcaggaaggttttcagatcgcgtaaatccaatggcgcagccctcgatgttgacgttgcaaaaattgcaatgtgacgttgtgaatatatcaatttccgcaataaatttcctgtcatatagtgaattcaatctcgcaaacgcgaaccgaacaataagaagcacaacatcacgaggaatcaccatggctaactacttcaatacactgaatctgcgtcagcagctggcacagctgggcaaatgtcgctttatggggcgcgatgaattcgccgatggcgcgagctaccttcagggtaaaaaagtagtcatcgtcggctgtggcgcacagggtctgaaccagggcctgaacatgcgtgattctggtctggatatttcttacgctctgcgtaaagaagcgattgccgagaagcgcgcgtcctggcgtaaagcgaccgaaaacggttttaaagttggtacttacgaagaactgatcccgcaggcggatctggtggttaacctgacgccggacaagcagcactctgatgtagtgcgcaccgtacagccactgatgaaagacggcgcggcgctgggttactcgcacggtttcaacatcgtcgaagtgggcgagcagatccgtaaagatatcaccgtagtcatggttgcgccgaaatgccctggcaccgaagtgcgtgaagagtacaaacgtggattcggcgtaccgacgctgattgccgttcacccggaaaacgatccgaaaggcgaaggtatggcgatcgctaaagcatgggcggcagcaaccggtggtcaccgtgcgggcgtgctggaatcgtccttcgttgcggaagtgaaatctgacctgatgggtgagcaaaccatcctgtgcggtatgttgcaggctggctcgctgctgtgcttcgacaagctggtggaagagggcaccgatccggcatacgcagaaaaactaattcagttcggttgggaaaccatcaccgaagcgctgaagcagggcggcatcaccctgatgatggaccgtctctctaacccggcgaaactgcgtgcttatgcgctttctgaacagctgaaagagatcatggcaccgctgttccagaaacatatggacgacatcatctccggcgaattctcttccggtatgatggcggactggaccaacgatgataagaaactgctgacctggcgtgaagagaccggcaaaaccgcgtttgaaaccgcgccgcagtatgaaggcaaaatcggcgagcaggagtacttcgataaaggcgtactgatgatcgcgatggtaaaagcgggcgttgaactggcgttcgaaaccatggtcgattccggcatcattgaagagtctgcatattatgaatcactgcacgagctgccgctgattgccaacaccatcgcccgtaagcgtctgtacgaaatgaacgtggttatctctgataccgctgagtacggtaactatctgttctcttacgcttgtgtgccgttgctgaaaccgtttatggcagagctgcaaccgggcgacttgggtaaagctattccggaaggcgcggtagataacgcgcaactgcgtgatgtgaacgaagcgattcgcagccatgcgattgagcaggtaggtaagaaactgcgcggctatatgacagatatgaaacgtattgctgttgcgggttaagtgcgcgctgatgccctcaccccgaccctctcccacagggagagggagaaaacactcaaggccttctcctggagaaggccttgctattagttgcggtacagcaccttaatgatgtgatatccgaactgggtgtgcagcgggccggtcggctccagtaccggacaagagaaaaccactttatcgaacgccggaaccatctgaccctggcggaattcacctaaatcaccgccgcgtttgcctgacgggcaaatagagtgtttcttcgccagcttgccgaaatcggcaccgttcttaatctgctcgagaagatccagagccagtttctcttcttttacaaggatatgcagtgctgctgctgtttttgccatgatcgtgccttgagtgaataattgtcaggcggcgattttagcatgatccgcagatgctaacgtaattgtcagtcagggaggggctggtacatatatggcaaaagcccggaaaatccgggcttcgcaggtccctcaaggggagaaaacttagggcctctatgggctacaaagtcattatcggggatggttattttattgtcaatttatgagcgatatggcattgattgacttgatgaccgccctctgtatgtctgcaaccaactcatgtggcaaacattgattaagataccctctgtaagtccttgctctatttaatcggtttcgactgacttgttgtaccaggtcggctttggcccaacgaatctgctgatcaaagaattgcaggccattgataacattactggctatttcaacatgcattccacgatttaacttgtcatgatcgcgagtggttgataatggaacgacgatacatgcgttgccattaatttttccgttgagcacgacaactaacctgttttttatcatttcaggaggaatgcggccatcgtaatacttggtgctgaactgtccattctggctaacaggatagttaccaaagttgcattccagtatttcaccaaccttaggactgaaattaatcgccacgagtacacctctccttagtaaactctgaaaaagtaataacacaacgttacgacccgatattttctaagtctaatggattcacgatgaactccggtttcggtcttctctctctgatttaaacatccgcagccaaccggttagcggcttacacgcggtcacattcaaatgcgattctgctacaatcctccccccgttcgaagattgagcaatacacctatgcgtctaaaccccggccaacaacaagctgtcgaattcgttaccggcccctgcctggtgctggcgggcgcgggttccggtaaaactcgtgtgatcaccaataaaatcgcccatctgatccgcggttgcggttatcaggcgcgacatatcgcggcggtgacctttaccaataaggcggcgcgcgagatgaaagagcgtgtcggacagacgctgggtcgcaaagaggcgcgtgggctgatgatctcaaccttccacacgctggggctagatatcatcaagcgtgagtatgcggcgctggggatgaaggcgaacttttcgctgtttgacgataccgatcagctggcgttgctcaaagagttgaccgaagggctgattgaagatgacaaagttctcctgcaacagttgatttcgaccatctctaactggaagaacgatctcaaaacaccgtcccaggcggcagccagtgcgattggcgagcgggaccgtatttttgcccattgttatgggctgtatgatgcacacctgaaagcgtgcaatgttctcgacttcgatgatcttattttattgccgacgttgctgctgcaacgcaatgaagaagtccgcgagcgctggcagaacaaaattcgctatctgctggtggatgagtatcaggacaccaacaccagccagtatgaactggtgaaactgctggtgggcagccgcgcgcgctttaccgtggtgggcgatgacgaccagtcgatctactcctggcgcggcgcacgtccacaaaacctggtgctgctgagtcaggattttccggcgctgaaggtgattaagcttgagcagaactaccgctcttccggacgtattttgaaagcggcgaacatcctgatcgccaataacccgcacgtctttgagaagcgtctgttctccgaactgggttacggcacagagcttaaagttttaagcgcgaataacgaagaacatgaagccgagcgcgtcactggtgaactgattgtgcatcacttcgtcaataaaacgcagtacaaagattacgccattctttatcgcggtaaccatcagtcgcgggtgtttgaaaaattcctgatgcaaaaccgcatcccgtacaaaatttctggtggtacgtcgtttttctctcgtcctgaaatcaaggacttgctggcttatctgcgcgtgctgactaacccggacgatgacagcgcatttctgcgtatcgttaacacgccgaagcgagagattggcccggcgacgctgaaaaagctgggtgagtgggcgatgacgcgcaataaaagcatgtttaccgccagctttgatatgggcctgagtcagacgcttagcggacgtggttatgaagcattgacccgcttcactcactggttggcagaaatccagcgcctggcggagcgggagccgattgctgcggtgcgtgatctgatccatggcatggattatgaatcctggctgtacgaaacatcgcccagcccgaaagccgccgaaatgcgcatgaagaacgtcaaccaactgtttagctggatgacggagatgctggaaggcagtgaactggatgagccgatgacgctcacccaggtggtgacgcgctttactttgcgcgacatgatggagcgtggtgagagtgaagaagagctggatcaggtgcaactgatgactctgcacgcgtcaaaagggctggagtttccttatgtctacatggtcggtatggaagaagggtttttgccgcaccagagcagcatcgatgaagataatatcgatgaggagcggcggctggcctatgtcggcattacccgcgcccagaaggaattgacctttacgctgtgtaaagaacgccgtcagtacggcgagctggtgctcccggagccgagccgctttttgctggagctgccgcaggatgatctgatttgggaacaggagcgcaaagtggtcagcgccgaagaacggatgcagaaagggcaaagccatctggcgaatctgaaagcgatgatggcggcaaaacgagggaaataatcaaggccggaaaagatgcgtcagcatcgcatccggcacttactcattaatgcacttccagcggccagtggacatagctctgccactggctttcctgagcaataatctctttacccagcggatgttgggttagccaaccttgcggaagcgtcaaggtcaacagttcatggttagcctgtaatgtcatctctggcactaaatcgtcacgacgacggctggcaaaaatgatggccaggcggagtaaacggcagagttgttctgcgacgcgcggtggtacggcattttgctgatgcagcgatgagagatcgaccgggttagtctggttgagcagtagcgtcgccagcagttttttctgtgcagggtaaaaccgggaagatccaggttacgcaccagataagcagcgtgttgcggcgcttgtttgaagtcaacgctcaggccgatttcatgaagctgacaagcgctgatgagcaaatcgcggcttattgcttcaagataccattcgttttccacctgatcgaagaagttagctgcaactttggctacgcgctgcgcctgatcaatatcgatcataaagcggcgctgaatattacgcagcgtacggctgcgaatatcctgctcgacggccagatgcaacatgccgtagaccaggccttcacgcagcgcaccgcccgccagggtcatacactgaatattcagttcggtaaaaatggcgatcaggatcgccagaccactcgggaacactaacgcacgttccagcgtcagcccgtcaatctccagttcctccagccgaccgcaatgaatggctcgctgtttcaattgctgcaacttttccagggtaatgcgttcatccatcccctgtgccatcatgatttcctgtaacgcctgcacggtgccggaagcaccaacgcacactttccagccgtgataccgtaattcatcggcaaccggacgtaacacttcgcgtgccgctttttctgcagcatcaaaattttcctgccccagattacgatcggcaaaatagcgttccagccaggtgacgcagcccatcgacaggctgaacaacgaggtggtttgtgcacccgtgccggttaccagttcagtactggcaccgcctatatccaccaccaggcgctgatcggcaccgccagttgtgtgagcaacgccctgataaatcagacgtgcttcctcttcaccgctgattacctgtaccggacaaccgaggatttcctgcgctttggcaataaaatcacccgcattgacggcaagacgtaatgtcgccgtagcgacaacgcgaatttgcgagggagggatatcttgcagacgttcagcaaacaggcgcagacattgccaaccgcgctccattgcttcattagacagggcattttcgctattcaggccagcagccagacgcactttgcgttttattcgcgtcagcgtctggatgcttccagccacctcgcgcacaaccagcatatgaaaactattcgaaccgagatcaatggctgcatacagcgacgaggtggaacccatactcttcatccttcaatctgtctctgtgttggctgcattctttcacctgaatcacttactacagtatgctcatcgggattcattctcttgccatcttgatacagtttgaatgattttgagtatgacattttatttaacctgaacgacgacgattacgcggagcgccagtacgacgcggaccattgcctgtacgtgggcgcgtgaggcgcagcggttttggcagatcggtcatcaatgcgtccggattgtatttgcttaccggaattgagtgaccaatataggtctcaatagcaggcaaattcaatgcatactcttcacacgccaggctgatagagtgaccgcttgcgcctgcgcgacctgtacgaccaatacggtgaacgtaatcttcacagtcatcgggtaaatcgtagttaaagacgtgcgtcactgccggaatatgcaaaccacgcgcggcaacgtcggtggcaaccagaatatccagatcgccacgggtaaattcatcaagaatacgcagacgttttttctgcgcgacatcgcctgtcaacaaaccgacacgatgaccatctgccgccaggtggccccagatctcttcacaacggtgtttggtattggcgaaaataatcgctctgtctggccactcttcttcgatcagcgtttgcagcaaacgcattttttcttcgttagaagggtagaaaagctcttctttaatacggtggcccgttttctgttccggttccacttcaatatattcggcattgttcatctgctcgaacgccagttcacgtacccggtacgaaagcgtggcggagaacagcatgttgaggcgctggtttgcaggcggcatacggcggaacagccagcggatatctttaataaagcccagatcgtacatgcgatcggcttcgtccagtaccaccacctgaatggcaccgaggttaatgtggttctgcttggcgtagtcaattaaacgccccgtagtgccaatcagaatgtcaacgccgctttccagcactttcagctgtttgtcgtagccatcaccaccgtaagccagacccagcttcaggccggtagcttccgccagcggttctgcgtcggcatggatctgcacggcaagttcacgcgtcggtgccataattaaggcacgtggttgattcaccttgcgatcggcaatcgcaggatgagagagaagataatgaaacgttgacgtaagaaacgccatcgttttcccggtaccggtttgcgcctgcccggctacgtcacgacccgccagcgtcagcggaagggccagtgcctgaatgggcgtacagttatgaaacccttttttttcaagggcttctacaaccttcggatgcagggcgaagtcggaaaacttctgttctgttaaatgtgttttgctcatagtgtggtagaatatcagcttactattgctttacgaaagcgtatccggtgaaataaagtcaacctttagttggttaatgttacaccaacaacgaaaccaacacgccaggcttattcctgtggagttatatatgagcgataaaattattcacctgactgacgacagttttgacacggatgtactcaaagcggacggggcgatcctcgtcgatttctgggcagagtggtgcggtccgtgcaaaatgatcgccccgattctggatgaaatcgctgacgaatatcagggcaaactgaccgttgcaaaactgaacatcgatcaaaaccctggcactgcgccgaaatatggcatccgtggtatcccgactctgctgctgttcaaaaacggtgaagtggcggcaaccaaagtgggcgcactgtctaaaggtcagttgaaagagttcctcgacgctaacctggcgtaagggaatttcatgttcgggtgccccgtcgctaaaaactggacgcccggcgtgagtcatgctaacttagtgttgacttcgtattaaacataccttattaagtttgaatcttgtaatttccaacgcttcccgttttatcttaaatgcgaagtgaacagatttctggctcgtcactcaatccgtcttgtcgtttcagttctgcgtactctcctgtgaccaggcagcgaaaagacatgagtcgatgaccgtaaacaggcatggatgatcctgccataccattcacaacattaagttcgagatttaccccaagtttaagaactcacaccactatgaatcttaccgaattaaagaatacgccggtttctgagctgatcactctcggcgaaaatatggggctggaaaacctggctcgtatgcgtaagcaggacattatttttgccatcctgaagcagcacgcaaagagtggcgaagatatctttggtgatggcgtactggagatattgcaggatggatttggtttcctccgttccgcagacagctcctacctcgccggtcctgatgacatctacgtttcccctagccaaatccgccgtttcaacctccgcactggtgataccatctctggtaagattcgcccgccgaaagaaggtgaacgctattttgcgctgctgaaagttaacgaagttaacttcgacaaacctgaaaacgcccgcaacaaaatcctctttgagaacttaaccccgctgcacgcaaactctcgtctgcgtatggaacgtggtaacggttctactgaagatttaaccgctcgcgtactggatctggcatcacctatcggtcgtggtcagcgtggtctgattgtggcaccgccgaaagccggtaaaactatgctgctgcagaacattgctcagagcattgcttacaaccacccggattgtgtgctgatggttctgctgatcgacgaacgtccggaagaagtaaccgagatgcagcgtctggtaaaaggtgaagttgttgcttctacctttgacgaacccgcatctcgccacgttcaggttgcggaaatggtgatcgagaaggccaaacgcctggttgagcacaagaaagacgttatcattctgctcgactccatcactcgtctggcgcgcgcttacaacactgttgttccggcgtcaggtaaagtgttgaccggtggtgtggacgccaatgcccttcatcgtccgaaacgcttcttcggtgcggcgcgtaacgtggaagagggcggcagcctgaccattatcgcgacggcgcttatcgataccggttctaaaatggacgaagttatttacgaagagtttaaaggtacaggcaacatggaactgcacctctctcgtaagatcgctgaaaaacgcgtcttcccggctatcgactacaaccgttccggtacccgtaaagaagagctgctcacgactcaggaagaactgcagaaaatgtggatcctgcgcaaaatcattcacccgatgggcgaaatcgatgcaatggaattcctcattaataaactggccatgaccaagaccaatgacgatttcttcgaaatgatgaaacgctcataaatttgtcttatgccaaaaacgccacgtgtttacgtggcgttttgcttttatatctgtaatcttaatgccgcgctggcgatgttaggaaaattcctggaatttgctggcatgttatgcaatttgcatatcaaatggttaatttttgcacaggactggtgggttcggaacggactttcccttctgaataaaggtcttcgtggttatacttctgctaataattttctctgagagcatgcattgtgaatttactgacagtgagtactgatctcatcagtattttttattcacgacactgtttctgttttttgcccgtaaggtggcaaaaaaagtcggtttagtggataaaccaaacttccgcaaacgtcaccagggattgatacctctcgttggggggatttcggtttacgcagggatttgcttcacgttcggaattgtcgattactatattccgcatgcatctctctatctcgcttgtgccggtgtgcttgttttcattggcgcgctggatgaccgttttgatatcagcgtaaaaatccgtgccaccatacaggccgctgttggcattgttatgatggtgttcggcaaactttatctcagtagcctgggttatatctttggctcctgggagatggtgctcggaccgtttggttacttcctgacgctatttgccgtctgggcggccattaatgcgttcaacatggttgatggcattgatggcttgctgggcgggttgtcctgcgtctcgtttgcagcaatcggtatgattttgtggttcgacgggcaaaccagcctcgcaatctggtgctttgcgatgatcgccgccatcctgccatacatcatgcttaaccttggtatcctgggtcgccgctacaaagtctttatgggtgatgcgggcagtacgctgattggttttaccgttatctggatcctgctcgaaacgacccagggcaaaacccatcccatcagcccggttaccgctttgtggataatcgccattccgctaatggatatggtggcgattatgtaccgtcgcctgcgtaaaggcatgagcccattctctcctgaccgtcagcatattcaccatttgatcatgcgtgccgggtttacttcccgtcaggcgtttgtgctgattacccttgccgcagcactgctcgcttccattggcgtgctggcagaatattctcattttgtcccggagtgggtcatgctggtgctctttttgctagcattcttcctctatggatattgcattaagcgtgcctggaaagttgctcgctttattaagcgcgtaaaacgcagactgcgtagaaatcgtggtggcagccccaatttaaccaaataaatgaggatgtgatgacacaaccaatgcctgggaaaccggccgaagacgctgaaaatgaactggatattcgtgggttgtttcgtaccttgtgggctgggaagctatggattattggcatggggctggcgtttgcgttaatcgcgctggcgtatactttttttgctcgacaagagtggagcgcgacggcgattaccgatcgtccaacggtgaatatgctggggggatattactcgcagcagcaatttttgcgtaacctggatgcccgttcaaacatggcttctgccgaccaaccatcggtcatggacgaagcctataaagagtttgttatgcaactggcctcgtgggatacccgcagagagttctggctgcaaaccgactattacaagcagcggatggtgggcaacagcaaagccgatgcggcgttgctggatgaaatgattaacaacatccagtttatccccggagactttacccgcgcggtcaatgacagcgtgaagcttattgccgaaaccgcgcctgacgctaataacctgttacgtcagtatgttgcttttgccagccagcgtgcagccagccatctgaatgatgagctgaaaggcgcatgggcggcacgcaccatccagatgaaagctcaggtgaagcgtcaggaagaggtggcgaaagccatctacgaccgccggatgaacagcattgagcaggcgctgaaaattgctgagcagcataatatttcgcgcagtgcgacagatgtgcctgccgaggaattacctgattcagaaatgttcctgcttgggcgtccaatgctccaggctcgactggaaaatttacaggccgtcggtccggcctttgatctcgactatgatcagaatcgggccatgttaaacaccctgaatgttggtccaaccctggatccgcgttttcagacctatcgctatttgcgtacgccggaagaaccggtaaaacgcgatagcccacgtcgtgccttcctgatgattatgtggggcattgtcggggggctgatcggggctggtgtcgcattaacccgccgttgctcgaaatagcaacactgctgctgcgagcgcaaaggcgctcgccgcttattcgaagagaatcgatgtgaaagtactgactgtatttggtacgcgcccggaagccatcaagatggctccgttggtgcatgcgttggcaaaagatcctttttttgaggctaaagtttgcgtcactgcgcagcatcgggagatgctcgatcaggtgctgaaactcttttccattgtacctgactacgatctcaacataatgcagccaggacagggcctgacagagataacctgtcggattctggaagggctaaaacctattcttgccgagttcaaaccagacgtcgtgctggttcacggcgacacaacaacgacgctggcaaccagcctggcggcgttttatcagcgtattcctgttggtcacgttgaggctggtttacgcacgggcgatctctattcgccgtggccggaagaggctaaccgtacattgaccgggcatctggcgatgtatcacttctctccaaccgaaacttcccggcaaaacttgctgcgtgaaaacgttgcggatagccgaatcttcattactggtaatacagtcattgatgcactgttatgggtgcgtgatcaggtgatgagcagcgacacgctgcgttcagaactggcggcaaattacccgtttatcgaccccgataaaaagatgattctggtgaccggtcacaggcgtgaaagtttcggtcgtggctttgaagaaatctgccacgcgctggcagacatcgccaccacgcaccaggacatccagattgtctatccggtgcatctcaacccgaacgtcagagagccggtcaatcgcattctggggcatgtgaaaaatgtcattctgatcaatccccaggagtatttaccgtttgtctggctgatgaaccacgcctggctgattttgaccgactcaggcggcattcaggaagaagcgccttcgctggggaaaccggtgctggtgatgcgcgataccactgagcgtccggaagcggtgacggcgggtacggtgcgtctggtaggcacggataagcagcgaattgtcgaggaagtgacgcgtcttttaaaagacgaaaacgaatatcaaactatgagccgcgcccataacccgtatggtgatggtcaggcatgctctcgcattctggaagcgttaaaaaataatcggatatcactatgagttttgcgaccatttctgttatcggactgggttacatcgggctgcctacagcagcagcgtttgcctcacggcaaaaacaggtgattggtgtcgatatcaaccaacacgcggttgataccatcaatcgtggcgaaatccatatcgtcgagcctgatttggcgagcgtagtaaaaactgccgtagaaggcggttttttacgagcgagcacgacgccagttgaagcggatgcctggctgattgctgtacccacgccgtttaaaggcgatcatgagccagatatgacctacgttgaatcggctgctcgctccattgcgccagtgctgaaaaaaggcgcgctggtgatccttgaatccacctcgccggtggggtcaaccgagaagatggcagaatggttagcagagatgcgtccggatctcactttcccacagcaggtgggcgagcaggcggacgtcaacattgcttactgcccggaacgcgtgttaccgggccaggttatggtcgagctgattaaaaacgatcgcgtgattggtggtatgacgccggtttgttcgacccgcgccagcgaactgtacaaaattttcctcgaaggtgagtgtgtcgtcactaactcgcggacggcggaaatgtgtaagctcaccgaaaacagcttccgcgatgtgaatatcgcttttgctaatgaattgtcgctgatttgtgccgatcaggggattaacgtctgggaactgattcgcctggcgaatcgtcaccctcgcgttaatattcttcagcctggccctggcgtgggcggtcactgcattgctgttgatccgtggtttatcgtggcacagaacccccagcaggcgcggcttatccgtaccgcgcgcgaagttaacgatcacaaaccgttctgggttatcgatcaggtgaaagcggcggttgccgactgccttgctgctaccgataaacgcgccagtgaactgaaaatcgcctgctttggtctggcgtttaaaccgaatattgatgacctgcgcgaaagcccggcgatggaaatcgctgaactgatcgcccagtggcatagcggcgaaactctggttgttgagcctaacatccaccagttgccgaaaaaactgaccgggctttgtactctggcgcagcttgacgaggcgctggcaacggcagacgtgctggtgatgctggtcgatcatagtcagttcaaagttatcaatggcgacaatgtccatcagcagtatgtcgtcgatgccaaaggagtctggcgctgatgagaaaaattctgataacaggtggtgccgggtttattggctcggcgctggtgcgttatatcatcaacgaaacgagcgacgcggtggtagtggtcgataagctgacctacgccggaaacctgatgtcgctggcaccggtcgcgcaaagcgagcgctttgcctttgagaaagttgatatctgcgatcgggcagaactggcacgcgtattcactgagcatcagccagactgtgtcatgcatctggcagccgaaagccatgttgaccgttctattgacggcccggcagcgtttattgaaaccaacattgtcgggacttatacattgcttgaagcggcgcgggcttactggaatacgctgacggaagataaaaaatcagcgttccgttttcatcatatctccaccgacgaagtatatggtgacctgcactcgacggatgatttcttcaccgaaaccacgccgtatgcgccgagcagcccttattccgcgtcaaaagccagcagcgaccatctggtgcgcgcctggctgcggacctacggtctgccgacgctgatcaccaactgctcgaataactacggtccttaccactttccggaaaaactgatcccgctgatgatcctcaacgcgctggcgggtaaaccgctgccggtatatggcaacgggcagcaaatccgtgactggctgtatgtggaagatcacgcccgcgcgctgtattgcgtggcgaccaccgggaaagtcggtgaaacctataatattggtggtcacaacgagcgtaagaatctcgatgttgtggaaaccatttgcgagctgctggaagaactggctccgaacaagccgcacggcgtggcgcactatcgtgacttgatcacctttgtcgctgaccgtccggggcatgatctgcgttatgccattgatgcttcgaaaattgcccgtgaacttggttggctgccacaggaaacctttgaaagtggaatgcgtaaaacggtgcagtggtatctggctaatgaaagctggtggaagcaggtgcaggacggcagctatcagggcgagcgtttaggtctgaaaggctaattttcagcggaggcaaacatgaaaggtattatcctggcgggcggttccggcacccgattgcatccgattacgcgcggcgtatcgaagcaactgttgccgatttacgataagccaatgatttactatccgctgtcggtgctgatgttggccggtatccgcgaaattctcatcatcactacgccggaagataaaggttatttccagcgcctgctgggcgatggtagtgagttcggtatccagctggaatacgccgaacagcccagcccggacggtctggcgcaggcctttatcatcggtgaaaccttcctcaacggtgaaccttcttgtctggtgctgggcgataacatcttcttcggtcagggcttcagtccgaagctgcgtcatgttgcggcgcgcacggaaggggcgacggtatttggctatcaggtgatggacccggaacgctttggcgtggtggagtttgacgacaatttccgcgctatctcgctggaagaaaagccaaaacagccgaagtcaaactgggcggtgaccgggctttatttctacgacagtaaagtcgtggagtacgcaaagcaggtgaagccgtcggagcgtggtgaactggagattacctccatcaaccagatgtacctcgaggcgggcaacctgaccgttgaactgctcgggcgcggatttgcctggctggacactggcactcacgacagcctgattgaagccagtacctttgtgcagacagtagaaaaacgccagggctttaagattgcctgcctggaagagatcgcctggcgtaacggctggctcgatgacgagggtgtgaagcgtgctgccagttcattagcgaaaactggctacggccaatatctgctggagttacttcgtgcccgtccgcgccagtattgagccactaacctgggaaaacgccttctttggtgttaacagcgccatcgtgcgcattacgtctgaagcaccgctcctgacgccagacgtgttagcgccgtggtcacgggtgcaggccaaaattgcggcatcaaatacgggtgaactggatgccctgcaacagctgggattctccctggtagaaggtgaagttgatttggcactacccgtgaacaatgtcagtgatagtggtgctgtagtggcacaagagaccgatattcccgcattacgtcagttagccagcgccgcatttgcgcaaagccgttttcgtgcgccgtggtatgcgcctgacgccagcagacgcttttatgcacagtggattgaaaatgccgtgcgcggcacctttgatcatcaatgtctgattttacgtgcggcgtccggcggtattcgtggttatgtctctttacgggaactcaatgcgacagatgcgcgaattggcctgctggctggacgcggtgtaggtgctgagctgatgcaaacggcgctaaactgggcgtatgctcgcggtaaaacaactttgcgggtggcgacccaaatgggcaacaccgccgcgcttaaacgatacatacaaagtggtgcgaatgtagaaagcaccgcgtactggttatacaggtgatcacatgattccatttaacgcaccgccggtggtgggaaccgaactcgactatatgcagtcggcaatgggtagcggcaaactgtgtggcgatggcggttttacccgtcgctgccagcagtggctggagcaacgttttggcagcgccaaagtgttactgacgccgtcctgcaccgcttcgctggagatggcggcgctgctgctcgatatccagcctggcgatgaagtgatcatgccgagctacacctttgtctccaccgccaatgcctttgtgctgcgtggcgcaaaaatcgtttttgtggatgttcgcccggacaccatgaacatcgacgaaacgctgattgaagcggcgatcaccgacaaaacgcgcgttatcgtgccggtccattacgcgggtgtggcctgcgaaatggacaccattatggcgttggcgaaaaagcataatctgtttgtggtagaagatgccgctcagggcgtgatgtccacttacaaagggcgtgcactgggaaccattggtcatattggctgctttagcttccatgaaaccaaaaactatacggcgggtggtgaaggcggcgcgacgctgattaacgataaagcgttaatcgaacgagccgagatcatccgtgaaaagggcactaaccgcagccagttcttccgtggtcaggtcgataaatatacctggcgcgatattggctccagctatttgatgtccgatctgcaagctgcgtacctgtgggcgcaactggaagcagcggatcgtatcaaccagcaacgtctggcgctgtggcaaaactactacgatgcgttagcgcctctggcgaaagccgggcgtatcgagctgccgtcgattcccgatggctgcgtgcagaacgcgcatatgttctacattaaactgcgggatattgatgaccggagcgcgttgattaactttctgaaagaagcggaaatcatggcggtgttccattacattccgctgcacggttgccctgcgggggaacgctttggtgagttccacggtgaagatcgctacaccaccaaagagagcgagcgcctgctgcgcctgccgctgttctacaacctgtcgcccgtcaatcagcgtacggtaattgcgactttgttgaactacttctcctgatatgtcgttggcaaaagcgtccttgtggacggcggccagtacactggtcaagattggtgccgggttactggtcggtaagttgctggctgtgtcatttggtccggcggggcttgggctggcggcaaatttccgccagttgattaccgtgctcggcgtgcttgccggagctggcatctttaacggtgtaaccaaatacgttgcccagtaccatgataatccgcaacagctgcgccgcgtggtcggcacttcatcagcgatggtacttggtttctctacgctgatggcgctggtttttgtgctggcagctgcgccaatcagccagggattgtttggtaataccgactatcaggggctggtgcgtttagtggcgctggtgcaaatggggatcgcctggggcaacctgttactggcgctgatgaaaggctttcgcgatgccgcaggtaatgcgttatcgctgattgtcggcagcttgattggcgttctcgcgtactacgtcagttaccgtttgggcggttatgaaggggcgttgctgggtctggcgctgattcccgcgctggtggtaattcctgccgccatcatgttgatcaaacgtggtgtcatcccgttaagctatctgaaacccagctgggataacggtctggcagggcagttgagcaaatttacgctcatggcgttgattacgtcggtgaccttgcctgttgcttacatcatgatgcgtaaactgctggcggcgcagtatagctgggatgaggtggggatctggcaaggggtgagcagtatttccgatgcctacctgcaatttattacggcatcgttcagcgtatatttgctgcccacgttgtcgcggctaacggaaaagcgcgatatcacccgggaagtggttaaatcgctgaaattcgtcttaccggcagtggcggcggcgagttttaccgtctggctgctgcgtgattttgctatctggctgctgttgtcgaataaatttaccgctatgcgcgatctctttgcctggcagttagtgggtgatgtgttaaaagtgggcgcttatgtctttggttatctggtgatcgccaaagcgtcattgcggttttatattctggcggaaatcagccagttcactttattgatggtatttgcccactggctaatccctgcgcatggtgcactgggcgcggcgcaggcatatatggcaacttatatcgtctatttttctctttgttgtggcgtgtttttactctggcgtaggcgggcatgactgtactgattcacgtactgggatcggatatccctcaccataaccgaaccgttttgcggtttttcaatgacgcgctggccgcgacgagcgagcacgcgcgcgagtttatggttgttggcaaggacgacggcttaagtgatagctgtccggcgctttctgtgcaatttttccctgggaaaaaatcgctggcggaagcggtcatcgcgaaagcaaaagctaaccgtcagcagcgttttttcttccacggtcagttcaatcccacactgtggctggctctgctgagtggtggcattaagcccagccagtttttctggcatatctggggggcagacctgtatgagctttccagtggcttgagatataagcttttttacccactacgtcgcctggcgcaaaagcgagtcggctgtgtatttgccacccgcggcgatttgagctttttgccaaaacgcatccaaaggtgcggggcgaactgctgtacttcccgacgcggatggacccttctctcaatacgatggcgaacgatcggcaacgtgaagggaaaatgaccattctggtggggaactccggtgaccgcagcaatgaccatattgctgccttgtgcgccgttcatcagcaatttggcgatacggtaaaagtggtggtgccgatgggatatccgcctaataacgaagcgtacattgaggaagttcgtcaggcggggctggagttattcagcgaagaaaatctgcaaattttgagcgaaaaactggaatttgacgcctatctggcgctacttcgtcagtgcgatcttggttactttatttttgcccgccagcagggcattggtacgctttgcttactgattcaggcgggcattccttgtgtgcttaaccgggaaaatccgttctggcaggatatgacggaacagcatttgccggtgctgtttactaccgacgatctcaacgaggatattgtgcgtgaagcgcagcgccagttggcgtcggtggataaaaacaccattgccttctttagccctaactatctacaaggctggcagcgggcgttggcgattgccgccggggaggtcgcatgagtctgctgcaattcagtggcctgtttgttgtctggctgctctgcacgctgtttattgccacgctgacctggtttgagtttcgccgtgtgcgctttaacttcaatgtcttcttttcattgctgtttttgctcacctttttcttcggcttcccgctgaccagcgtgctggtatttcgctttgatgttggtgtcgcgccgccagaaatcttgttgcaggcgttgctttctgcgggctgcttctacgcggtttactatgtcacctacaaaacccgcctacgcaaacgcgttgctgatgtaccgcgccgtccgctgtttaccatgaaccgcgtggagaccaatcttacgtgggtgatcctgatgggcatcgcgctggtaagcgtcggcatcttcttcatgcacaacggctttttgctgttccggcttaactcctacagtcagatcttctccagtgaagtctccggcgtggcgttaaaacgcttcttttactttttcatcccggcgatgctggtggtctactttctgcgccaggatagcaaagcgtggctgtttttcctcgtcagcacggtcgcctttggcttgctgacttatatgattgtcggcggcactcgcgccaatatcatcatcgcattcgctatcttcctgtttattggcattattcgcggctggatttcgttgtggatgctggcggcggcgggcgtgctggggattgtgggcatgttctggctggcgctaaaacgctatggaatgaatgtgagcggcgatgaagcgttctatacgtttctctatctcactcgcgacaccttctcgccatgggagaatctggcgttgctgttgcagaactacgacaacatcgacttccagggcctggctccaattgtccgcgatttctatgtctttatcccttcctggctgtggccgggtcgcccgagtatggtgctgaactcagccaactactttacctgggaagtgctgaataaccactccggactggcgatctcgcctacgcttataggctcactggtggtgatgggcggcgcgttgttcatcccactcggggcgattgtggttggactgatcatcaaatggttcgactggctgtatgagctgggcaaccgcgagactaatcgctataaggctgcgatattgcacagtttctgctttggggcgatcttcaatatgatcgtgctggcacgtgaagggctggattcgtttgtctcacgcgtagtcttttttatcgtggtcttcggcgcatgtctgatgatcgcaaaactgttgtactggctttttgaaagcgccggactcattcataaacgtacaaaatcatcgctccggacgcaggttgaaggataacaatgaataacaacaccatggcaccgacctatacgctgcgtggcttacagttgattggttggcgtgatatgcagcacgccctcgattatctgtttgctgacgggcatcttaagcagggaacgctggttgccattaatgccgaaaaaatgctgaccattgaagataatgctgaggtcagggagctaattaacgctgccgaatttaaatatgcggatggcatcagcgttgtacgttcagtacgtaaaaagtacccgcaggcgcaggtttcccgcgttgccggtgctgatctctgggaagagctgatggcgcgcgcaggcaaagaagggacgcccggtatttcttgtgggcggtaaacctgaagtgctggcgcaaactgaagctaaactgcgcaaccagtggaatgtgaatatcgttggcagtcaggatggttattttaaacccgagcagcgtcaggcgctgtttgaacgcattcatgccagcggagcgcaaatcgtcaccgttgcgatgggatcgccaaagcaggagatcttcatgcgcgactgccgtctggtgcatccagatgcgctgtatatgggcgttggcgggacttacgatgttttcaccggtcacgtaaaacgcgcaccgaaaatctggcaaacgctgggactggagtggctctaccgcctgctttcgcagccgagccgcattaagcgtcagcttcgtttgctgcgttatttacgctggcactacaccggcaacctctgattttcctctctttgtaaagcgacggagtggtcactccgtcgcctgtctgcttttttattacacaaagcattcaaatttttaatgctttatttgccatttctcctgaattacgaaaacattcgcaacactcgatgtacccataacgataaccggtaacaccggaaagcatgcaaacacaacacgaggatttatggcagataacaaaccagagctacagcgtgggctggaagctcgacatatcgaactcatcgccctggggggcaccattggcgtcggcctgtttatgggggccgccagtaccttgaaatgggccgggccatccgtattgttggcctatatcatcgccgggctattcgtctttttcatcatgcgttcaatgggcgaaatgttgttcctcgaaccggttaccggttcgttcgccgtttatgcgcatcgttatatgagcccgttctttggttatctcaccgcctggtcttactggtttatgtggatggccgtggggatctcagaaatcaccgccattggcgtttatgtccagttctggttcccggagatggcgcagtggatacccgcattgatcgcagtggcgctggtggcgttggcgaatctggcggcggtgcggttgtacggcgaaatcgagttctggttcgcgatgatcaaagtcaccacgattatcgtgatgattgtcattggcctgggcgtgattttctttggctttggcaatggcgggcagtcgattggttttagcaatctcacagagcatggcggtttctttgcgggtggctggaaagggttcctgaccgcgctgtgtattgtggtggcgtcctaccagggcgtggagctgattggcattactgccggtgaagcgaagaatccgcaggtgacgctgcgcagtgccgtaggcaaagtgctgtggcggatcctgattttctacgtaggcgcgattttcgttatcgtcaccatcttcccgtggaatgaaattggcagcaacggcagcccgttcgtactgacttttgccaaaatcggtattaccgcagcggcgggcattatcaactttgtggtgctgacggctgcgctctctggctgtaacagcggcatgtacagttgcggacgtatgctctacgcactggcgaaaaaccgtcagttaccggcggcgatggcgaaagtttcccgtcacggcgtaccagttgcgggtgtggcagtatctattgctattctgctaattggctcatgcctgaactacatcattcccaatccgcagcgtgtgtttgtctacgtctacagtgccagcgtgcttccggggatggtgccatggtttgtgatattgataagccagctgcgttttcggcgtgcacataaagcggcgattgccagccatccgttccgctcaatcctgttcccgtgggccaactacgtaacaatggcattcctgatttgcgttttgatcggcatgtactttaatgaagatacgcgtatgtcgctgtttgttggcatcatctttatgctggcggtgacggcgatttataaagtttttggccttaatcgccacgggaaagcgcataaactggaggaataagcagcaaaacgcacaaaccgtaaccaaacgcgcaatttatttaaaaagggactagacagaggggtgggaagtccgtattatccacccccgcaacggcgctaagcgcccgtagctcagctggatagagcgctgccctccggaggcagaggtctcaggttcgaatcctgtcgggcgcgccatttagtcccggcgcttgagctgcggtggtagtaataccgcgtaacaagatttgtagtggtggctatagctcagttggtagagccctggattgtgattccagttgtcgtgggttcgaatcccattagccaccccattattagaagttgtgacaatgcgaaggtggcggaattggtagacgcgctagcttcaggtgttagtgtccttacggacgtgggggttcaagtcccccccctcgcaccacgactttaaagaattgaactaaaaattcaaaaagcagtatttcggcgagtagcgcagcttggtagcgcaactggtttgggaccagtgggtcggaggttcgaatcctctctcgccgaccaattttgaaccccgcttcggcggggttttttgttttctgtgcatttcgtcaccctcccttcgcaataaacgcccgtaataactcattgccccacggtatgatttcgcccttaacgtattgaaggatgacttcaggcaaggagtgaccatgctgcaacaggttccaacgcgtgcttttcatgtgatggcgaaaccgagtggttccgattgtaatctgaactgtgactactgtttttatctcgaaaaacaatccctttaccgcgaaaagccagtcacgcatatggacgatgacacgctggaagcgtatgtccgtcactatatcgctgccagcgaaccgcaaaacgaagtggcttttacctggcagggcggcgaaccaacgttactcgggctggagttttaccgccgtgccgtaaagttacaggcgaaatacggtgctggcaggaagataagtaacagcttccagactaacggcgtgctgctcgatgataaatggtgtgcatttctggcagaaaatcattttcttgttgggttatcgctggacggtccggctgagatccacaatcaatatcgcgtgaccaaaggtggcagaccaacgcataagctggtgatgcgtgccctgacgctgctgcaaaaacatcatgtcgactataacgtgctggtctgcgtcaaccgcaccagcgcgcagcaaccgttgcaggtttatgattttttgtgcgatgcgggagtcgaattcatccagtttattccggtggtcgagcgcctggctgatgaaacagctgccagcgatggactgaaactacatgcgcctggtgatattcagggggaactgacggaatggtcggtgcgccccgatgaatttggtgaatttctggtggcgatattcaaccactggatcaaacgcgacgtcggcaagattttcgtgatgaatatcgaatgggcgtttgccaattttgtcggtgcgccgggtgcggtttgccatcatcagccaacctgtgggcgctcggtgattgttgagcacaacggcgacgtttacgcctgcgatcactatgtttatccgcaatatcggctggggaatatgcatcagcaaacaattgcagaaatgatcgattccccgcaacagcaggtgtttggtgaagataaatttaagcaattaccggcgcagtgtcgcagttgtaacgtgttaaaagcgtgctggggaggctgcccgaaacaccgcttcatgctcgatgccagcggcaaaccggggctgaattatttgtgtgccgggtatcagcgttatttccgccatctaccgccatatcttaaagcaatggctgatttgctggcgcacggtcgcccggccagtgacattatgcaggcacatttgctggtggtgaataagtaaaaaagcggccattttgtggccgcctgcggttgattgccggatgcggcgtaaacgccttatccggcctacatgatcgtgcaaattcaataaattgcagcgttctgtggatactggtttgggtgatcgtatccggcaaagcctttgcgtgcggtggcagttgacggggtatctgctgcgctggccatgagaggaagagcggcggcgacagcaacaacaagaagtttgggtgaaaacgaaaattccatgcaaaatgctccggtttcatgtcatcaaaatgatgacgtaattaagcattgataattgagatccctctccctgacaggatgattacataaataatagtgacaaaaataaattatttatttatccagaaaatgaattggaaaatcaggagagcgttttcaatcctacctctggcgcagttgatatgtaaggcaggtttattatatcgcgttgattattgatgctttttttagttttaacggcaattaatatatgtgttattaattgaatgaattttatcattcataataagtatgtgtaggatcaagctcaggttaaatattcactcaggaagttattactcaggaagcaaagaggattacagaattatctcataacaagtgttaagggatgttatttcccgattctctgtggcataataaacgggtagatgctcattccatctcttatgttcgccttagtgcctcataaactccggaatgacgcagagccgtttacggtgcttatcgtccactgacagatgtcgcttatgcctcatcagacaccatggacacaacgttgagtgaagcacccacttgttgtcatacagacctgttttaacgcctgctccgtaataagagcaggcgtttttttatgcatcagaaaggtcccggaggtgcttgcctccgggtgagaaggaactactgtggtgggtggttctgcaacgttaacatcaaaccgtcgcgacgcatcgctgcagcttcttccggcttgtgcagtctgtccagcgcgtcggcaagccatgcgtaatcgtaggcgtccggacgttgtttcagcgccgcgcggaaggcgagcgatgcttcctgccattctccgtgcttcatcagtgactggcccagtgtgctccacaacagcgggcgatcgccgacgtttttgatctgctggcgcagcactttttccagctgttccggattgttggttttcagtcgaggaatcggcagcagtaggcgatcgtcgtactggcgtttcaggccatcgatgataatttgctgggcagtatcatgatcgtcacattcaataagatgttccgccattgccacctgcaacgctacctgatgacgcgttttccggctttggtttttccaccagttacgcaaaccttcactaccgttatcggcacgcgcctgatccatcaggccaatccatgcctgttgttccagcattgcacgatgttcttcatcaccaacatgggctttcgccattgatgggatgatatccagcagcgaactccatgcacctgtgcggatatacgcctgttccgccagacgtaatacttccggatggcgtggcgtaacttccagcagcttatccacgccgtggcgtgcagcatggttttcattacgggccagttgcagacgtacacgggtgatttctaccggaatggtgtcattgccggccagctctgctgcgcgttccagatgttggttggcgcgtgcttcatcaccacgttgttgcgcggcttcggcagccagtagatagttcaccaccggttgttccgcgtgatcggcatttttcgccatcagcttttcaacttgctgataatcgccttccgccagtttcagcagcgcctgttcggtctgcttacgggcacggcgacgcttacgtccgacaaaccacccacgggtgtgtgcgcctgtgcggaagatccgccgcagtagccactcaatggcaaacagcactaccatcgccagaatcaaaataatcgccaggcccgtgacgctggtttcgatattgtagttgtcagtctggatcagcacgtaaccctgatgaccggcaatcatcgggccaaccactatccccgcaatcagcaaaacaaagagtaataacacttttagcatggttattctccttgcggcgcggctgccggagtatcaccttgcggtgcaggtgcaggtgcaggtgcaggtgcaggtgcaggtttagcttccgttgtccccgctgccggttgtgccagcaggttacgcacgcgggtctgcatcagttttccagcatcgcctggctttgcagggtttccggaagatccatcgagatattttgctggcttaactggtccacctcgtcgaggaacgctttggtggtggcatcatcagtatcgtagtaagctcgtacccaggtggagacgttctccagcgcctggcgataagtctcttcctggtgacgcggtacagcttgtgctgcgaccagcaggcgagagcgaatattttcgcgcagatagatatcctgatttggcgctaacagcggtacggcggtgtcatcacgacggcgaatcgtaatgaagttgtccataaagttctgccagcttttttgcagattgatacgccattcgctgatggaactggaaagctcttcaccgtcggaatccatcggcgaaccatcgctgtcattatcggccagacgcaggttatctacctgatttgaaagctgattaagcttaaggatgatgccgtcataatccacctgcgaaactgcagaaaggctggcgatatcatcggtaattgcccgacgaacggtaatcagactcgggtcattcatatccgccaggctggcatctgcacttttcagcaacgctgcagcggtcgtgacgtcctgatcgctccacagcttccgtccggcgagtttcaccagaaaatcggcctgagccagcagccaggttttagcatcgctgccggaaatggtggcgaccttttgttggacttcatccaactgttttgccagcgtttcttgctgacgattcgcctgcttaagctgtgcagcttgttgcttaataatgccttccagctcggctttttggctctcctgggctttttgcaatgccgtcagttggttagccagggcatcgctggtggcggtctgattgacggcctgttgtttaccccagccatacaaaccgacgcccgccgccagagcaatagcgatagccaccgcgctgagaatcaatgcggtattgttcttactctttttttctgttgcgacaggttgtgacgtggtgtccacggcctccctggtctcttcaaccacggcggaggttttttcttgttccgtcattatggcttcctgttatgagagttattgtaatgcccgtaaaagcgcatcgttgtcagcgttatcggcgaccttaatgtcttgccagcccagttcccgggcgagtttcgccaaacgctcactgacgaccaatagtcgacagtgtagtaaccagtgctcacgataccattgtgggatcagcgaccagagttgctgcaacatttcaccgctggtaacaacgaccatcgtcacctcgcgggattgccagcgcatcgcttcttctgcaccatcgtaatggattgcgcatcgttgataacattcacaaaaagtgacctcagcaccgcgcgctgtcagggtatccccaattagctcacgaccgccattgccacgtaatatcagcgcacgtttgcccgcaatattttgtaattcaggtaattgtagcaagacttcgctgatttcccgatcctgcgggtagagaatcttctgtccgcttacggtatgtagcgccagtgcggtggtgcgtccaatggcgaaataatcaggtagtcggggccatttacgatcttgctgatgcagctgtgattgggcaaaagcaaccgcgtgttgcgagagggcaaacaacagatcgctctcccccagcgccgccagttgatcagcaagttgcggtaattgtcgacccggagaaaactcaatcagcggaaaatgccaggccacctgccccagtgtgcgcagacggctcactaactcttctccagcgggagacgggcgggtgaccaggatactcatgccggggcgtctccgttatagacttcagcgaggatctcgcgcgcgccgttattcagtagctcttctgccagcgaaatccccatttgttcggcattttgcggcgcaccgcggcgttcaccgcgaataatctgcgaaccgtccggcgcgccgaccagcgcacgcagccagatttcaccatcaataagctcggcgtagctaccaattggcacctgacatccaccttcgagacgggtattcatggcgcgttctgcggtaacgcgcagtgcagtttcgtggtgattcagcgcggcaagcagctcgcgagtgcgcgtatcatcaaggcggcattcaataccgactgcaccttgtcctaccgccggaagagaaatctcgggtggtaacgcggcgcgaatgcgggactccagacctaaacgttttagtccggctacggcaagaatgatggcatcgtattcgccgttatctagtttgctcaggcgagtgccgacgttgccgcgcagggagcggataatcagatccgggcggcgttcagccagttggcactggcgacgtaaactggacgtcccgacgatactgcctgccggtaacgcatccagactgtcataattattggacacaaaggcatcgcgaggatcttcacgctcacaaatagtgaccaaccccagaccttgcgggaattcaaccggcacatctttcattgaatgtacggcgatatcggcgcgattctccaggagcgcgacttccagctcttttacaaataagccttttccgcctactttcgccagcggcgtatcaagaatcacatcgccgcgcgtcaccatcggtaccagttcaaccaccaggcccggatggctcgccatcaacttgtctttgacatagtgtgcctgccagagtgcaagtgggctttggcgtgtggcaattcttaaaacattgtctaacatgcttgttaccgtcattatcatccgtggtccatcctaacatccttgccagagtgatgtcagtgttgtggtgaaacgtagacgcctgcgcaaaccgtaaaatgaggtctggcagtggatcctgacaggcgtttcacgccgtcgtaataaggaatttacagagaataaacggtgctacacttgtatgtagcgcatctttctttacggtcaatcagcaaggtgttaaattgatcacgttttagaccattttttcgtcgtgaaactaaaaaaaccaggcgcgaaaagtggtaacggttacctttgacatacgaaatatcccgaatgccgcgtgttaccgttgatgttggcggaatcacagtcatgacgggtagcaaatcaggcgatacgtcttgtacctctatattgagactctgaaacagagactggatgccataaatcaattgcgtgtggatcgcgcgcttgctgctatggggcctgcattccaacaggtctacagtctactgccgacattgttgcactatcaccatccgctaatgccgggttaccttgatggtaacgttcccaaaggcatttgcctttacacgcctgatgaaactcaacgccactacctgaacgagcttgaactgtatcgtggaatgtcagtacaggacccaccgaaaggtgagcttccaattactggtgtatacaccatgggcagcacctcgtccgtagggcaaagttgttcctctgacctggatatctgggtctgtcatcaatcctggctcgatagcgaagagcgccagttactacaacgtaaatgtagtctgctggaaagctgggccgcctcgctgggtgtggaagtcagcttcttcctgattgatgaaaaccgcttccgtcataatgaaagcggcagcctggggggcgaagattgtggctccacccagcatatactgctgcttgacgaattttatcgtaccgccgtgcgtctcgccggtaagcgtattctgtggaatatggtgccgtgcgacgaagaagagcattacgacgactatgtgatgacgctttacgcgcagggcgtgctgacgccaaatgaatggctggatctcggtggcttaagctcgctttctgctgaagagtactttggtgccagcctttggcagctctacaagagtatcgattccccatacaaagcggtactgaaaacactgctgctggaagcctattcctgggaatacccgaacccacgtctgctggcgaaagatatcaaacagcgtttgcacgacggcgagattgtatcgtttggtctcgatccatactgcatgatgctggagcgtgttactgaatacctgacggcgattgaagattttacccgtctggatttagtacgtcgctgcttctatttaaaagtgtgcgaaaagctcagccgtgaacgcgcctgcgtaggctggcgtcgcgcagtgttgagccagttagtgagcgagtggggttgggacgaagctcgtctggcaatgctcgataaccgcgctaactggaagattgatcaggtgcgtgaggcgcacaacgagttgctcgacgcgatgatgcagagctaccgtaatctgatccgctttgcgcgtcgcaataaccttagcgtctccgccagtccgcaggatatcggcgtgctgacgcgtaagctgtatgccgcgtttgaagcattaccaggtaaagtgacgctggtaaacccgcagatttcacccgatctctcggaaccgaatctgacctttatttatgtgccgccgggccgtgctaaccgttcaggttggtatctgtataaccgcgcgccaaatattgagtcgatcatcagccatcagccgctggaatataaccgttacctgaacaaactggtggcgtgggcatggtttaacggcctgctgacctcgcgcacccgtttgtatattaaaggtaacggcattgtcgatttgcctaagttgcaggagatggtcgccgacgtgtcgcaccatttcccgctgcgcttacctgcaccgacaccgaaggcgctctacagcccgtgtgagatccgccatctggcgattatcgttaacctggaatatgacccgacagcggcgttccgcaatcaggtggtgcatttcgatttccgtaagctggatgtcttcagctttggcgagaatcaaaattgcctggtaggtagcgttgacctgctgtaccgcaactcgtggaacgaagtgcgtacgctgcatttcaacggcgagcaatcgatgatcgaagccctgaaaactattctcggcaaaatgcatcaggacgccgcaccgccagatagcgtggaagtcttctgttatagccagcatctgcgcggcttaattcgtactcgcgtgcagcaactggtttctgagtgtattgaattgcgtctttccagcacccgccaggaaaccgggcgtttcaaggcgctgcgcgtttctggtcaaacctgggggttgttcttcgaacgcctgaatgtatcggtacagaaactggaaaacgccatcgagttttatggcgcgatttcgcataacaaactgcacggcctgtcagtgcaggttgaaaccaatcacgtcaaattaccggcggtggtggacggctttgccagcgaagggatcatccagttctttttcgaagaaacgcaagacgagaatggctttaatatctacattctcgacgaaagcaaccgggttgaggtgtatcaccactgcgaaggcagcaaagaggagctggtacgtgacgtcagtcgcttctactcgtcatcgcatgaccgttttacctacggctcaagcttcatcaacttcaacctgccgcagttctatcagattgtgaaggttgatggtcgtgaacaggtgattccgttccgcacaaaatctatcggtaacatgccgcctgccaatcaggatcacgatacgccgctattacagcaatatttttcgtgatgaacgtgccggaaagcgaggcttatccggcatgcaatcttagcggaaactgactgtttcacccgcctgctgcgtcgccgcctgttccagcaaatcccagaaggtttcgccgctgcgatcgcaaatccactcatcgcctttcagatcaaaatggtagccgccttgtttggttgccagccatacctggtgcagcggttcctgtcggttgataatgattttgctgccgttttcaaaggtaatggtcagtacgccgccgttgatttcgcagtcgatatcgctgtcgccatcccagtcgtccaggcgttcttcaatggtcagccagagttgatcagccaggcgatgaaattcactgtcgttcattgttgtatcctgtttttaagtgatggcggcagtatagcggcatggggtcagggcttcaaagtttgcacctctgcggctgcgttccggcatgattcatccgtcaccggaataatgatgtctctgttttgaacttcacgtacgttctcctctctgacacgagttttcgccgggcagggggagggcgtaatccttacctctgtatcggtccatgtataaacattgcgatcgtcataagcgaagcgatcgtttttagttagcggaccgttaactggaataatttgcaagctctttgaccgtaattggcggataaaataagcatgctgtttgccgctattaaatgagcgatcaatgaccaggtctggcgtatccagcgggattatctcaagctggtcttcaccaaatgtcgataattttgttacatacaaccgatctttatattgcgcaatattgccagtaatcagatggaattgttcaggttcaatatctggtaggtctatccacttgctccactgacggtcggacgtgagctgtttacgccagcgaacgcgactttcccctacttcaaaagagacgtcatcatctacgggtatcgctttgtctgataattgaccaaagggataacgatgcatacccttattgtcgcgaaaaaccagcagtgaatgaggtatccagcgaattatctcaaatgagtctgcattcgccgtaaggtgaacgccatttaaataaatattctgcccactgcggataagcagatcattggaatacaaatttctgtttacactcataagacgtggattaataccccaccatcttttttctaatacagtaacattactgctgctcccctgacgtcgaccggacaaatagagatttttactatccaccagcgtggtagagttaccttcgatagcttttagtgtcgccagatcaacacgtgacgcgccgctattactttcggtgcgctgtccgtcaaaatagaggctatatttatcgaccgcgaagcggcccatagcctgaaagctggcaatatcgacagtgggtgttcccggtggattgctaacgattttgccacgccagagaataacgcggccgtctgtcacccagtggtattcctcattttttatgcttatttcatcggtgggtatatagccttccaccaactcccgctccccggatatatttgtcacaaggcgcaaatcggctctgttcatcttcggaaattgggcaatgattttcttatccccccaataacctttaccgtaagacataacaccgtgatcattgtaatagtcgaaccctatggcctgtacagcaggcgtcagaaatatgtgccccaacaggatgagtgcaacagtgattatttgaccattcattttgtcgcctcattgcgcggggcaggaataaattcgccgtcatcggtaatttttccgtccagatatcccgttttgtaatttacgccatagccatatcccgaatgttgttccttccagattaagcgaacttgtttcggatccgcagtgcggtatcgccagagctgcgcgccatcaaagctgtaaatgtagcggttatcgcgggcataccatctgcgcaaaaagggatggtcattaagatgggcttcgcgttcatccggagaacggttatccagtaagatcagcggtccgtcagattcaaacacatgtaaaccggaatggtatggccacccttcggcacgcgtaagtaaatagccgtggcgtttcccggcgttgaaacgtttgttgataataagattgggatcatcaagtttcacgatttccagcttgcggtcaccagactctgtttcgatgatggtataaagcgagtcctgatactgggcgacagcatcactgatgggttgaaactgctccggatcgagtccgggtaattcttcctgtttacaagcaggtcctttacgccagaacactttcttttccagcagagaaaaatccagacagtgctttgttaaatcttcatcccactccagattttccttgtcgaggactttacgctgcagcccgtttttatcacgccaggtcaagagtgagccgggcatccagcgcacgacggaaaaggtgtccgggtcggcatcaagctgttcgccgttgatcaggattttggtccgtgtacgagccagggtatcccaggggccaaatggcatagccacacagggattaaacgcggtagaaaactttcctcgctgatcccatgacttttgtgccagcacacggaaactatcgggatctgcgaggcgatgcccattgatatacaagaaattagcgtcacgtaatatcagccccagtaagtcaggatcccagggaggccggaattccacctgatgcagtgttttgatatctaagcgatttcccccgccattgttatcggtgcgcttgccttcgaaatagagactgtgtttatctgcggcaaaatcaccccacgccttgaacgaggcgacatcgacgggaggtttgtctggcgggttttgcacaacttcacccgcgtagaggatatagcgaccatcgctatgccaggagtaatgaggataccaggcctgtgcgccttcatagaggtagtcggttgtcagatcagtcagaggaggtactttatcccatttgtctagtgttgtcgggtctattaataaattgggtaaacggcgcaaacttttgtaattcacgtcaggaagagaaagatttgtttctttataagggcgcaggtataccacgccttttccctgtttctggtaaatattatgttcaggcggatcaagccgacatccccatgccgacgataaaaacaatgaacaagacaacaaacaaaccacattgcgatagtgcataaagccatcctggcgcgaggtgccgatcacgaaactaccagcagaacataattcctcgcacgtaagcgtaacttttgcggcaaatcgtcacttttcagaatctataaaggccatcgctattttctgatagttgctggggtaaacttgaggttttcattcacgatataaatacgagctactgcgccatggtgtgactgatcacgttaaaatgtgccggattgacgccgggaagggtgtcaacatgcgactctgcccaccgttacctactttattgtctttcgcgtgttgtacttaggtcccaccaccggtatctaacattccccacattattacgctttctgccgaacgtgatttttatagaaatctatcaattcattttccctgtaccataaagtttatctttcacatcctgctgaacgcgggtcttgtaccccccgttgtgaagatcttcatacggagaaaaagaatctttactccaccccagcagcactttatcgccaggcataaaatgcacatgcagaaaatcttctccccattctcttttggggagaggtaacgtcatattccgtttctccagacgcattccagcattatactgtgtacgagtagtacttaatgtccagataacctctgccgtatccccactaacatcaccacaacaggttgttgaaccgccaccatttgcaaaagcattcgcgcccgccacgccgttaacactgaatcccagtatcgcgcggtcaatttcactgtggatttccagaatcactccacctcttggtcctccccatactgcctgtcctatattccacaacacgaccagtaccggaacgacaattaacgtccgccatacccagcgcccccaccgggcataaccgcgcgtaagcttttggtcaaatttttccagttgggtaaatagccccatcagattttattccctcttatcaccaggttggcaaagttgtatgtcactggcgactaaggtcagacaacgaaattgcatggtgcgccactctattaaaagccccatgccgacgataagaacaatgaacaagacaacaaacaaaccacattgcgatagtgcataaagccatcctggcgcgaggtgccgatcacgaaactaccagcaaaacataaatccccacgtgtaagcgttatactcgcagcatttcctcacttttcagacttcataaagagtcgctaaacgcttgcttttacgccttctcctgcgatgatagaaagcagaaagcgatgaactttacaggcaatccataatgaaaaacgtgtttaaggcactcactgtattaattactctcttcagcctgacgggctgcggtctgaaaggtccgctctatttcccgcctgcagataaaaacgcaccgccgccgaccaaaccggtagagacgcaaacgcaatccacggtgccggataaaaacgatcgcgccactggcgatggtccatcccaggtgaattactaaaagtcagtttctgtacccgcgtgattggagtaaatgatgcagttctcgaaaatgcatggccttggcaacgattttatggtcgtcgacgcggtaacgcagaatgtctttttttcaccggagctgattcgtcgcctggctgatcggcacctgggagtagggtttgaccaactgctggtggttgagccgccgtatgatcctgaactggattttcactatcgcattttcaatgctgatggcagtgaagtggcgcagtgcggcaatggtgcgcgctgctttgcccgttttgtgcgtctgaaagggctgaccaataagcgcgatatccgcgtcagcaccgccaacgggcggatggttctgaccgtcaccgatgatgatctggtccgcgtaaatatgggcgaacccaacttcgaaccttccgccgtgccgtttcgcgctaacaaagcggaaaagacctatattatgcgcgccgccgagcagacaatcttatgcggcgtggtgtcgatgggaaatccgcattgcgtgattcaggtcgatgatgtcgataccgcggcggtagaaacgcttggtcctgttctggaaagccacgagcgttttccggagcgagccaatatcggttttatgcaagtggttaagcgcgagcatattcgtttacgcgtttatgagcgtggggcaggagaaacccaggcctgcggcagcggcgcatgtgcggcggtggcggtagggatccagcaaggtttgctggccgaagaagtacgcgtggaactccccggcggtcgtcttgatatcgcctggaaaggtccgggtcacccgttatatatgactggcccggcggtacatgtctacgacggatttattcatctatgaagcaaccaggggaagaactgcaggaaacactcacggagcttgatgaccgggcggttgtcgattatctgattaaaaatcctgagttttttatccgtaatgcgcgcgcagtagaagcgatacgtgtgccgcatccggtacgcggcaccgtttcgttggtcgaatggcacatggcccgcgcacgtaatcatattcatgttctggaagagaacatggcgttgttgatggaacaggctatcgccaacgaaggcctgttttatcgcttactctacctgcagcgcagtctcaccgccgccagcagtctcgacgatatgctgatgcgctttcaccgctgggcgcgcgatctcggtctggctggtgcgagtctgcgcctgtttccggatcgctggcgcttaggtgcgccgtcgaaccacactcatctggcattaagccgtcagtctttcgaaccgctgcgtattcagcgtttggggcaggaacagcactatcttgggccgcttaacggaccagagctgctggtggtgctaccggaagcgaaagcggtgggatcggtggcgatgtcgatgctgggaagcgatgctgatttgggtgttgtgctgtttaccagtcgcgatgccagtcactatcaacaagggcaaggaacgcagttacttcatgaaattgcgctgatgttgccggagcttctggagcgttggattgaacgcgtatgaccgatttacacaccgatgtagaacgctacctacgttatctgagcgtggagcgccagcttagcccgataaccctgcttaactaccagcgtcagcttgaggcgatcatcaattttgccagcgaaaacggcctgcaaagctggcagcaatgtgatgtgacgatggtgcgcaattttgctgtacgcagtcgccgtaaagggctgggagcagcaagcctcgcgttacggctttctgcgctacgtagcttttttgactggctggtcagccagaacgaactcaaagctaacccggcgaaaggagtttcggcaccgaaagcgccgcgtcatctgccgaaaaacatcgacgtcgacgatatgaatcggctgctggatattgatatcaacgatcccctcgctgtacgcgaccgtgcaatgctggaagtgatgtacggcgcgggtctgcgtctttccgagctggtggggctggatatcaaacacctcgacctggagtctggtgaagtgtgggtaatggggaaaggcagcaaagagcgccgcctgccgattggtcgcaacgctgtggcgtggattgagcactggcttgatttgcgcgacctgtttggtagcgaagacgacgcgctttttctgtcgaaactgggcaagcgtatctccgcgcgtaatgtgcagaaacgctttgccgaatggggcataaaacaagggctgaataatcacgttcacccacataaattacgtcactcgttcgctacgcatatgctggagtcgagcggcgatcttcgtggtgtgcaggagctgctgggtcatgccaacctctccaccacgcaaatctatactcatcttgattttcaacaccttgcctcggtgtacgatgcggcgcatccacgcgccaaacgggggaaataatgcgtttttaccggcctttggggcgcatctcggcgctcacctttgacctggatgataccctttacgataaccgtccggtgattttgcgcaccgagcgagaggcgcttacctttgtgcaaaattatcatccggcgctgcgcagcttccagaatgaagatctgcaacgcctgcgccaggcggtacgggaagcggaacccgagatttatcacgacgtgacgcgttggcgttttcgttcgattgaacaagcgatgctcgacgccgggctgagtgccgaagaagccagtgcaggcgcacacgcagcaatgattaactttgccaaatggcgcagccgaatcgacgtcccgcagcaaactcacgacaccttaaaacagctggcgaagaaatggccgctggtggcgatcaccaacggtaacgcccagccggaactgtttggtttgggggattattttgagtttgtgctgcgcgctggcccgcacgggcgctcaaaaccgttcagcgatatgtactttttggctgcggaaaaactcaacgtgccgatcggcgagatcttacatgttggggacgatctcaccactgacgtgggtggggcaattcgcagcggaatgcaggcttgttggatcagaccggaaaatggcgatctgatgcaaacctgggacagccgtttactgccgcatctggaaatttcccggttggcatctctgacctcgctgatataatcagcaaatctgtatatatacccagctttttggcggagggcgttgcgcttctccgcccaacctatttttacgcggcggtgccaatggacgtttcttacctgctcgacagccttaatgacaaacagcgcgaagcggtggccgcgccacgcagcaaccttctggtgctggcgggcgcgggcagtggtaagacgcgcgtactggtgcatcgtatcgcctggctgatgagcgtggaaaactgctcgccatactcgattatggcggtgacgtttaccaacaaagcggcggcggagatgcgtcatcgtatcgggcaactgatgggcaccagccagggcggcatgtgggtcggcaccttccacgggctggcgcaccgcctgctgcgtgcgcaccatatggacgccaatctgccgcaggatttccagatcctcgatagcgaggaccagctgcgcctgcttaagcgtctgatcaaagccatgaacctcgacgagaagcagtggccgccgcgccaggcaatgtggtacatcaacagccagaaagatgaaggcctgcgtccgcatcatattcaaagctacggtaatccggtggagcagacctggcagaaggtgtatcaggcgtatcaggaagcgtgtgaccgcgcgggcctggtggacttcgccgagctgctgctgcgcgctcacgaactgtggcttaacaagccgcatatcctacaacactaccgcgaacgttttaccaatatcctggtggacgaattccaggataccaacaacattcagtacgcgtggatccgcctgctggcgggcgacaccggcaaagtgatgattgtcggtgatgacgaccagtcaatctacggctggcgcggggcgcaggtggagaatattcagcgtttccttaatgatttccccggtgccgaaactattcgtctggagcaaaactaccgctctaccagcaatattctgagcgccgctaacgccctgattgaaaacaataacgggcgtctgggtaaaaaactgtggaccgatggcgcggacggtgagcctatttccctctattgcgcttttaacgaactcgatgaagcgcgttttgtggttaaccgcatcaaaacctggcaggacaacggcggggcgcttgccgagtgcgccattctctaccgcagtaacgcccagtcgcgtgtactggaagaagcactgttgcaggccagtatgccgtaccgtatttacggcgggatgcgcttcttcgaacgccaggaaatcaaagacgcgctctcgtatctgcgtctgattgccaaccgtaacgacgacgcggcgtttgagcgcgtggtgaatacgccaacgcggggtattggtgaccggacgctggacgtggtacgtcagacatcgcgcgatcgccagttaacactctggcaggcatgtcgtgaactgttgcaggaaaaagccctcgccgggcgagctgccagcgccttgcagcgatttatggaattaatcgatgccttagcgcaagaaactgccgatatgccgctgcatgtacagactgaccgggtaattaaagactccggcctgcgcaccatgtacgagcaggagaagggcgaaaaaggccagacgcgtatcgaaaacttagaggaactggtgacggcaacgcgccagttcagctacaacgaagaagatgaagatttaatgccgctgcaggcattcctctcccatgcggcgctggaagcgggcgaggggcaggcggatacctggcaggatgcagtgcagttgatgacgctgcactcggcgaaaggcctggagttcccgcaggtgtttattgtcggtatggaagagggtatgttcccaagccagatgtcgctggatgaaggcgggcgtctggaagaagaacgccgtctggcctacgttggtgtaacccgcgcgatgcagaaactgacgctgacctacgcggaaacccgccgtctgtatggtaaagaggtttaccatcgcccgtcgcgctttatcggcgagctgccggaagagtgtgtggaagaggtgcgcctgcgcgctacggtaagtcgtccggtcagccatcaacggatggggacgccgatggtcgagaacgacagcggctacaagctcggtcagcgtgtacgccacgctaagtttggtgaaggcaccatcgtcaatatggaaggcagcggcgagcatagccgtttgcaggtggcattccagggccagggtattaaatggctggtggcggcatacgcccggctggagtcggtgtaacgttgccggatgcggtgctgcgcaccttatttggcctaaaaaatcattcatattcaataaattgcaacttcatgtaggccggatagggcgtttacgccgcatccggcatctgcgccatcttcagtatctgacacaaaactatcgttttaacctttccgctctacggaaatcatggtgacaaaaggatagcgttgccacgggattgccccgcctttcatatacatatgtgaaatcgtgccatcaagataaagcagctgctcaacgttcagtttcgctttggcataacaggcaaaatcataaaaatttgtcgcctgctggctcaacaaaaacacggcattcccatgtttattaatcccaacaccgttacgaattttacgtgaggcgacgttgggatgaatacgcggattaattacactgttttccatcaacattggccctgactgcaccgcaaactgaatctctttactggttttgaaggcatccagacgaacgatgccgactttatctcccgcgacataaaacacgccgccaggacggataaagaaattcccttcacctgaagcgagatttaacgccaccttctgctgaccgttttcgatgtacaaaccgagcggcgcatagctttcatcatagatgccgccgttcatcgccatctgcacctgaccctgactattcatatccgccagcagagcatgtaaagttccccacgcttcgccattggctttttgccagtacattttcacccgctctgtttgaggattaacggtatacgcctgtacggtcagcgtcggatctgagagtgcgcaatcatcagcggcaacagcaaacaagggaagtaaggtgagggtgagaaaaatccgtttgagattcaaggtgatcattcctttaccaatgagtagccgatgcgccattataggtcctggatgttggatttttttatcctgttagcgaccttgacgagtaccaaaaagcgcgaagttcaactattgttctgtggtgttctgttgcgtgttgacggcaaaattttgctggcgtaacatgcgcgcacgatcactctaagaggacattcgccttggacacacccagtagatactggctcactatcctgtcatccaggatcaactcctaaggctatccctttttgctgatagccttagcggttgtcagcgacctcaatttttcccgtcgcgctgagtcaggctgtttaatggtctgaaacccaatttgtttctgtgtgcccaccgaactgtccgatattttaagcattgggagtcccggtcatgctgagcgcatttcaactggaaaataaccgactgacccggctggaagtcgaagagtcacaaccccttgtaaatgcagtatggattgatcttgtcgaaccggacgacgacgagcgactgcgcgtacaatctgaacttggccagagcctggcaacccgcccggaactggaagacatcgaagcatcggcacgtttctttgaagacgacgacggcctgcatattcactccttcttcttctttgaagatgcggaagatcacgccggtaactccactgtggcatttaccatccgtgatggtcgtctgtttactctgcgtgagcgtgaactgcctgcattccgtctgtatcgtatgcgcgcccgtagccagtcaatggtggacggtaacgcctacgagctgctgttggatctgttcgaaaccaaaatcgaacagctggcagatgaaattgaaaatatctacagcgatctggagcagttgagccgggtaattatggaagggcatcagggcgatgagtacgatgaggcgctctccacgctggcggaactggaagatatcggctggaaagttcgcctgtgtctgatggatacccagcgtgcgctcaacttcctggtacgcaaggcgcgtttaccgggtgggcaactggagcaggcgcgtgaaatcctgcgagatatcgaatccctgctgccgcataacgaatccctgttccagaaggtgaacttcctgatgcaggcggcgatgggctttatcaacatcgagcagaaccgcatcatcaaaatcttctcggtggtatccgtggtattcctgccgccgacgctcgttgcttccagctatgggatgaactttgagtttatgccagaactgaagtggagtttcggctacccaggcgcgattatctttatgatcctcgcgggcctggcaccgtatctgtactttaagcgcaagaactggctgtaatatgagtgccggataaagctatttttttatccggcttatttctaaaaattgtcgtatttaaagtcatgcggattgaaaactcgctctattttattttcttgtgttaattgatactcagtaaaatcgttaataccaatatgagtgttacgataagggtattcattaataaccattaagtaatttttcacgatgcaattatcattgctcttaattgtcgggaaacagtagagatcttcatacggcccttcgatatattttttatagtcagtgaagccattaccgatatcaatgacataccaggtatgccaactaccttctggtaggggatgttgatttttaatttcattctgatgcttcagataccaatttattttatcgctgtcagtccatggcagatgatcaacgaccagaaagactgaattgccagcatcagagtatgtatacaaaatctgtacaggacgcaatgtccataaattatagatgcagcatagaagaaataaacataatataattttctggagtttgcttttcatagataattttcgattctttcgatagtgttaaaattggtgaaaaaaggtttgaaagcaaagtctttatgccgttgtaaaaagaaccatatgcgaaaaaatctatatttgctgtaagtcttgtttttgatatcagttacatcaagaccgaagtggtcctgtgctacaaaatgaattgttgcactccatcctatagcgtagttttgaaaacttaaaagagatattttttgagctgaaatatcatgaacactgattcctaagccattaaaactgtcctcgaagtcattaaatttatttagtcttgatgaaagtaatttggttttaatgctttgcaggataagaggttggtatcctgtcgagggagttgaattaatgccattttcgatacattctttgattattcgtattggactattataaccatatttatttattttttcatgaaaagataaatttaattgttggctatgaaaattgctgccatttccatatctaaaatgttcaatcagatcttcgataagtgttttattttgtccaaaaaaggaaaacatttttgctagttctttcatttctgcaaataaaatatcagtgcattcacgttgtgatatttttgttccggaacttgaggcactaaaagcaacattaatagaacctgggccagggaaatggtatttaataagtctgtaaggatcaacttttgctgagatatcgcttaggccgagtgagagaaagtcttgttctaccatatcaccatattgcatatcatcagcagaaaaatcatctaataaactaatagtttcgaaaagtgtacagggaatattaattggcggaagtaatatgttattcatttgcatttgccttggttatatttaagctcaatgtcaattcgagaacaaatgctagggtaaaaaatatttaaaaaagaagtacatttcacattttttcattacatctctgaagagaacctcgttaatgattggtcttgctcattgttaataacaaaatgttgaatttaccgattaggaaactttttcctacgcggattgcctccagctatggcatgaactttgagtttatgccagaactgaagtggagctttggctaccctggcgcgattatctttatgatccttgcgggcctgacaccgtatctgtactttaagcgtaagaactggctgtaactatacgatgtcgctgtgagtaagttagtgtgctgacagcgacattttagccgagggaatcgcagataatataattgttgtgaataatatccatgccacgttgagttggacgcttaatgactcacatctcaccccttcaattgctgcagagataatagaaaaaagtgtcaaacccaatgaaatcaatacaaagtagattgccttacatccagtatctcttattctttttgctccaatattgatatttacataggtattattaataaccagaataaaactcaaagccaggttgatatcattcaaagttattaatattgaccatgatgttaatgtatagattatgaactgaaagcgtgataaatgctcaagcctggatgggtagaatatatttctgatggatgatttgaatattttttacattgttttttatatataattgttttgaatatatatattacctgaattatgaggtttgcatatatatatgcaatatagcagtctttgcattgataactatacagtagtaatttagagtgtgtaagtttttattgatggggtatattttaattaaatataattggaatgtatttttattctataaacaatatcttggggaatggattctatatggggaatggtaacttttggcagttgttcttgggtaaagaaccttacagcaaaaaatctgattttgttaaggcatggttattgtggtgggctattaccatccttgttctatttattttaagcctgactacgacattaaatttaagaagtataggtatagggttaagttttgggttttgtcaaatccttggtagatatacgatgtctctaggatggagtaagtactggggagttttgggggtacttcctgtaacaaatattgttctttttcttatcttaatttttttcaaaaaaagataaataagtcagtgggtaggctcattaaacggcctacccatgttaattcttaactttttctacgctgcgtataaatcgcatccatcacaaaaattgccagcgccacccaaataaaggcgaaagtcaccatcttatcggcacccggtttttcaccataaaacgtcacagccagcaggaacatcagcgtcgggccaatgtactggaaaagcctaacgttgagagacgcaggcgcgtggcagcggcagtaaaacacaacagcggtacggtagtgacaataccggcggcgatcagcagtaaattcagcgacatcgggttttgccccatatggctggttgagctgtcggcaatagcaaacaggtaaatcgccgccacgggcagcagccacatggtttcaattaacatgccggtttgtgcttctaccgcaatcttcttgcgcaccaggccgtagaaggcaaaactaaatgccagccccagcgcgataataggtagcgaaccaaaagtccacagctggaccaacacgccacatatcgccagaatcaccgccagccattgcatccggcggaatcgctcgccgaggaaaatcatccccagcacaatgttcaccagcgggttaataaagtaaccaaggctcgcttccagcatatggtgattgttcaccgcccagataaacagtagccagttgccaccaatcagcacggcagagactgccagcataaaaattttctgtggcgtctgaatcagcgtttttaaataggaccactggcggcaaatgctcatcagcaccaccataaagaaaaacgaccagatcacgcgatgcgtcaggatttcatcggcgggcacgtagtaaatcaacttgaagtacgctggcgcaataccccaaataaaataagcggcaagagcgagtaatacgccctgccgcgtttgttttgcatccatcgggaatactcatttttaattggtaacagcagtttacctgcttttatgtcttcaacctaccatataggtggcggtggcactggcaatataaagctgttcttcattgtgtaattcaacgcgggcgacggcgactttattgcctgcacgcaacaggctactggtagcagtaaaacgctcacccctgcctgggcgcagataatcaacgcgaagatcaatggtccccatccgcgatagccgctggcgtagttcatcttcactgatggtttcgtggcgggttaaggtacttcctacgcacaccagaccggcggcgacatccagcgccgacgcaatgaccccgccgtgcaaaatgctttgcgcccagttgcccaccatcattggctgatttttaaaggccagctgtgcgaactctttttcgtaacgctccagttccatccccaatgcgcggttaaatggcatgtgataaacaaacatctcacccactaatttcagggcttgttcagcggtcagtacggcagacatatcatccttacacttcattggttaatgaaatgttgattttatgcttctttgttgttggtttctactttaggaagggataactaacggcaatggagttaagtatgtaaaatagcccgcagaaaaacattcaccttatcaataattcgttacggagaacacgaccgatgcggactctgcagggctggttgttgccggtgtttatgttgcctatggcagtatatgcacaagaggcaacggtgaaagaggtgcatgacgcgccagcggtgcgtggcagtattatcgccaatatgctgcaggagcatgacaatccgttcacgctctatccttatgacaccaactacctcatctacacccaaaccagcgatctgaacaaagaagcgattgccagttacgactgggcggaaaatgcgcgtaaggatgaagtaaagtttcagttgagcctggcatttccactgtggcgtgggattttaggcccgaactcggtgttgggtgcgtcttatacgcaaaaatcctggtggcaactgtccaatagcgaagagtcttcaccgtttcgtgaaaccaactacgaaccgcaattgttcctcggttttgccaccgattaccgttttgcaggttggacgctgcgcgatgtggagatggggtataaccacgactctaacgggcgttcagacccgacctcccgcagctggaaccgcctttatactcgcctgatggcagaaaacggtaactggctggtagaagtgaagccgtggtatgtggtgggtaatactgacgataacccggatatcaccaaatatatgggttactaccagcttaaaatcggctatcacctcggtgatgcggtgctcagtgcgaaaggacagtacaactggaacaccggctacggcggcgcggaattaggcttaagttacccgatcaccaaacatgtgcgcctttatactcaggtttacagcggctatggcgaatcgctcatcgactataacttcaaccagacccgtgtcggtgtgggggttatgctaaacgatttgttttgatgaacggttgagtggttggcaaatctggaatccagcatccaggattaccctctcagagactaaaagcattgcagtttctcgcgcaggcgctgaaaatagcgcctgtttttatttcaggcaatcggggtgaatgtggcgcaggcggaagtgttgaatctggagtccggagctaaacaggttttacaagaaacctttggctaccaacagtttcgccccggccaggaagaaattatcgacactgtgctttccggtcgcgattgcctggtcgtcatgcccaccggtggcggaaaatccctttgctatcaaattcctgccttattgctaaacggccttaccgtggttgtttcaccgctgatttcgttgatgaaagatcaggtggatcaactgcaagccaacggcgtggcggcggcgtgccttaactcgacgcaaacccgcgaacagcaacttgaagtgatgacaggctgccgcaccgggcaaattcgtctgctttatatcgccccggaacgcctgatgctggataactttcttgagcatctggcgcactggaatccggtgttattagccgttgatgaagcgcactgtatctcccaatggggccacgatttccgcccggaatatgccgcgctcggtcagttgcgccagcggttcccgacgctgccgtttatggcgctgaccgccacagccgacgacaccacgcgccaggatatcgtgcgcctgctggggctgaacgatccgctgattcaaatcagcagttttgaccgtccgaatattcgctacatgctgatggagaaattcaaaccgctcgatcagttgatgcgctacgtgcaggaacagcgcggtaagtccggcattatctactgcaacagccgggcgaaagtagaagacaccgctgcgcgcctgcaaagcaagggtattagcgcggcggcctatcatgccgggctggaaaataatgtccgcgccgacgtgcaggagaaattccagcgcgatgacctgcaaattgtggtggcgacggtggcgttcggcatgggcatcaataaaccaaacgttcgcttcgtggtccactttgatattccgcgcaatatcgaatcctattatcaggaaaccggtcgcgccgggcgtgatggcctgcctgcggaagcgatgctgttttacgatccggctgatatggcgtggctgcgccgttgtctggaagagaagccgcaggggcagttgcaggatatcgagcgccacaaactcaatgcgatgggcgcgtttgccgaagcgcaaacttgccgtcgtctggtattgctgaactattttggcgaagggcgtcaggagccgtgcgggaactgcgatatctgcctcgatccgccgaaacaatacgatggttcaaccgatgctcagattgccctttccaccattggtcgtgtgaatcagcggtttgggatgggttatgtggtggaagtgattcgtggtgctaataaccagcgtatccgcgactatggtcatgacaaactgaaagtctatggcatgggccgtgataaaagccatgaacattgggtgagcgtgatccgccagctgattcacctcggcctggtgacgcaaaatattgcccagcattctgccctacaactgacagaggccgcgcgcccggtgctgcgcggcgaatcctctttgcaacttgccgtgccgcgtatcgtggcgctcaaaccgaaagcgatgcagaaatcgttcggcggcaactatgatcgcaaactgttcgccaaattacgcaaactgcgtaaatcgattgccgatgaaagtaatgtcccgccgtacgtggtgtttaacgacgcaaccttgattgagatggctgaacagatgccgatcaccgccagcgaaatgctcagcgttaacggcgttgggatgcgcaagctggaacgctttggtaaaccgtttatggcgctgattcgtgcgcatgtcgatggcgacgacgaagagtagtcagcagcataaaaaagtgccaggatgaagactccgtaaacgtttcccccgcgagtcaaatgtatgttgatgttatttctcaccgtcgccatggtgcacattgtggcgcttatgagtcccggtcccgatttcttttttgtctctcagaccgctgtcagtcgttcccgtaaagaagcgatgatgggcgtgctgggtattacctgcggcgttatggtttgggcagggattgcgttgcttggcctgcatttgattatcgaaaaaatggcctggctgcatacgctgattatggttggcggtggcctgtatctctgctggatgggttatcagatgctgcgcggcgcgctgaaaaaagaggcggtttctgcacctgcgccacaggtcgagctggcgaaaagtgggcgcagtttcctgaaaggtttactgaccaatctcgctaatccgaaagcgattatctattttggttcggtattctcattgtttgtcggtgataacgttggcactaccgcgcgctggggcatttttgcgctgatcattgtcgaaacactggcgtggtttaccgtcgttgccagcctgtttgccctgccgcaaatgcgccgtggttatcaacgtctggcgaagtggattgatggttttgccggggcgttatttgccggatttggcattcatttgattatttcgcggtgatgccagacgcgtcttcagagtaagtcggataaggcgtttacgccgcatccgacattatttttcacgcatgcctcgccgatgctaacagtgctcccaccagcataaacaacgagccgaaaatcttattcagcgccttcatctgctttggtcctttaatccatagagcaatccgttgagcaagggtggcgtaaccgatcatcacaataatatcgaccacaatagtggtgacgccgagcacgatatactgcatcagttgcggctgttgcggcatgatgaattgcggaaatagcgccgccagaaacacaatacttttgggattggtgagattcacaaaaactgcgcgctgaaacaaatgtcgacgcgattgagtagaggccagcgatttaaggtcaattgcaccagcggcgcgccactgctggattcccagccaaatcaagtaagccgcgcctgcccacttcaacacttcaaacgcaatcactgagcgggaaaatagcgtccccaaccccacgccaaccagcacaatatgaatcgccagtccggtctgaagcccagcaatagacgccaccgcgccgcgataaccgtggttgagcgaggtggtcatagtgttgattgcaccagagcctggcgacaggcttaaaatgatcgatgtcagcaggtaggcaaaccaccattctaaggtcatgatgaactcccggtgtgtctatttttgtgccacaatacgctactgtcgcagcgttgtgtcaggcacgctaaaaaaaacgattttacgtggtttaagaggcagattacccgatgtttcagcagcaaaaagactgggaaacaagagaaaacgcgtttgctgcttttaccatgggaccgctgactgatttctggcgtcagcgtgatgaagcagagtttactggtgtggatgacattccggtgcgctttgtccgttttcgcgcacagcaccatgaccgggtggtagtcatctgcccggggcgtattgagagctacgtaaaatatgcggaactggcctatgacctgttccatttggggtttgatgtcttaatcatcgaccatcgcgggcagggacgttccggtcgcctgttagccgatccgcatctcgggcatgttaatcgctttaatgattatgttgatgatctggcggcattctggcagcaggaggttcagcccggtccgtggcgtaaacgctatatactggcacattcgatgggcggtgcgatctccacattatttctgcaacgccatccaggtgtatgtgacgccattgcgctaactgcgccaatgtttgggatcgtgattcgtatgccgtcatttatggcacggcagatcctcaactgggccgaagcgcatccacgtttccgtgatggctatgcaataggcaccgggcgctggcgcgcgttgccgtttgctatcaacgtactgacccacagcagacagcgatatcgacgtaacttacgcttctatgctgatgacccaacgattcgcgtcggtgggccgacctaccattgggtacgcgaaagtattctggctggcgaacaggtgttagccggtgcgggtgatgacgccacgccaacgcttctcttacaagctgaagaggaacgcgtggtggataaccgcatgcatgaccgtttttgtgaactccgcaccgccgcgggccatcctgtcgaaggaggacggccgttggtaattaaaggtgcttaccatgagatcctttttgaaaaggacgcaatgcgctcagtcgcgctccacgccatcgttgattttttcaacaggcataactcacccagcggaaaccgctctacagaggtttaaatttcttatgtaccaggttgttgcgtctgatttagatggcacgttactttctcccgaccatacgttatccccttacgccaaagaaactctgaagctgctcaccgcgcgcggcatcaactttgtgtttgcgaccggtcgtcaccacgttgatgtggggcaaattcgcgataatctggagattaagtcttacatgattacctccaatggtgcgcgcgttcacgatctggatggtaatctgatttttgctcataacctggatcgcgacattgccagcgatctgtttggcgtagtcaacgacaatccggacatcattactaacgtttatcgcgacgacgaatggtttatgaatcgccatcgcccggaagagatgcgcttttttaaagaagcggtgttcaaatatgcgctgtatgagcctggattactggagccggaaggcgtcagcaaagtgtttttcacctgcgattcccatgaacaactgctgccgctggagcaggcgattaacgctcgctggggcgatcgcgtcaacgtcagtttctctaccttaacctgtctggaagtgatggcgggcggcgtgtcgaaaggccatgcgctggaagcagtggcgaagaaactgggctacagcctgaaggattgtattgcgtttggtgacgggatgaacgacgccgaaatgctgtcgatggcggggaaaggctgcattatgggcagtgcgcaccagcgtctgaaagaccttcatcccgagctggaagtgattggtactaacgccgaagacgcggtgccgcattatctgcgtaaactctatttatcgtaatcgttctttatttggtcagttgtcaacctgatacttcgctacaatggatactcgttaatcaaagagttttccattgtggcgctacttatcatcaccacgattctgtgggccttctcctttagcttttatggcgagtaccttgcggggcacgtcgatagctattttgcggtgctggtgcgcgttggcctggcggcactcgtttttctgccgtttctgcgtacccgtggcaatagcctgaaaacagtcggcctgtatatgctggtgggcgcgatgcagctcggcgtgatgtatatgctgagtttccgcgcttatctctacctgacggtttccgagctgctgctgttcaccgtgctgacgccgctctacatcacgctgatttatgacatcatgagtaagcgccgtctgcgctggggctatgcttttagcgccttgctggcggtgattggtgccgggattattcgctatgatcaggtcaccgaccatttctggactggcttgttgctggtgcaactctccaatatcacttttgccatcggcatggtgggttacaaacgcctgatggaaactcgcccgatgccgcagcataacgcctttgcgtggttctatcttggcgcgttcctggtggcggtaattgcatggttcttgctgggaaatgcgcagaaaatgccgcaaaccacgctgcaatggggcattctggtgtttcttggcgtggtggcttccgggattggctactttatgtggaactacggcgcgacgcaggtggacgccggaacgctgggcattatgaataatatgcacgttccggcagggctgctggtaaacctggctatctggcaccaacagccgcactggccaacgttcattacaggcgcgctggtgatcctggcctcactgtgggtgcatcgtaagtgggtcgctccgcgctcttcacaaacggcagatgatcgcaggcgtgattgcgcgctgagcgaataaatgcttctgtaatcggctgacgctgctcgccatcgcgcacggcggcgtacagtcggctccacaagccttcgcccagggttttggtcaccaccagaccctggcgctcaaaactctctactacccaatgcggtagcgcggcaatacccatccgcgcggcaaccatctgaatcaacaataaggtgttatcgacgcttttcagtgacgggctgacgcctgccggctgaagaaaatgccgccagacatccagtcgactacgctgcaccggataaatcaacagcgtctcgctggcgagatcttccggtgtaattcgcgttttcgccgccagtggatggtcaggtgctaacaccagacgcacttcatagtcgaacatcggcgaataatgcaggccactgcgcggcaggatatcggaggtcatcaccagatccagctcgccctgttgcaacgcgggctgcgggtcaaacgtcacgcccgatttaaaatccatctctacctgcggccagttcttatggaaattttctaacgcgggcgtcagccactgaatacagctatggcactcaatggcaatgcgcagacgcgtctgctgcggttcattgcaggcttgcagtgcctggctaatttgcggcagcacctggtttgccagttgcaacaggatttctccctgcggtgtaaagcgtagcggctggctcttacgcacaaatagccggaagccaaggcgttgttccagatcgctaaactggtgagacagggcggattgcgtctgatgcaacgtcgccgcagcggctgcgagagagccgcagttccgcaacgcttgtagcgttttcaggtgttttacttcgatcatgaaagtccttcacttcggcatgaataatttgcgcttgaggaatatacagtaaccgccaattatggatgtgtaaacatctggacggctaaatactaaaaattccataaggggcatataatgacaattcttaatcacaccctcggtttccctcgcgttggcctgcgtcgcgagctgaaaaaagcgcaagaaagttattgggcggggaactccacgcgtgaagaactgctgacagtagggcgtgaactgcgtgctcgtcactgggatcaacaaaagcaagcgggtatcgacctgctgccggtgggcgattttgcctggtacgatcatgttctgaccaccagtctgctgctgggtaacgttccgccacgtcatcagaacaaagacggttcggtagatatcgacaccctgttccgtattggtcgtggacgtgcgccgactggcgaacctgcggcggcagcggaaatgaccaaatggtttaacaccaactatcactacatggtgccggagttcgttaaaggccaacagttcaaactgacctggacgcagctgctggaggaagtggacgaggcgctggcgctgggccacaacgttaagcctgtgctgctggggccggttacttacctgtggctggggaaagtgaaaggtgaacagtttgaccgccttagcctgctgaacgacattctgccggtttatcagcaaatgctggcagaactggcgaaacgcggcatcgagtgggtacagattgatgaacccgcgctggtactggaactaccacaggcgtggctggacgcatacaaacccgcttacgacgcgctccagggccaggtgaaactgctgctgaccacttattttgaaggcgtaacgccaaacctcgacacgattactgcgctgcctgttcaggggctgcatgtggaccttgtacatggtaaagatgacgttgttgaactgcacaagcgcctgccttctgactggttgctgtctgcgggtctgatcaatggtcgtaacgtctggcgtgccgatcttagcgagaaatatgcgcaaattaaggacattgtcggcaaacgtgatttgtgggtggcatcttcctgctcgttgctgcacagccccatcgacctgagcgtggaaacgcgtcttgatgcagaagtgaaaagctggtttgccttcgccctacaaaaatgccatgaactggcactgctgcgcgatgcgctgaacagtggtgacacggcagctctggcagagtggagcgccccgattcaggcgcgtcgtcactctactcgtgtacataatccggcggtagaaaagcgtctggcggcgatcaccgcccaggacagccagcgtgcgaatgtctatgaagtgcgtgctgaagcccagcgtgcgcgttttaaactgccagcgtggccgaccaccacgattggttccttcccgcaaaccacggaaattcgtaccctgcgtctggatttcaaaaagggcaatctcgacgccaacaactaccgcacgggcattgcggaacatatcaagcaggccattgttgagcaggaacgtttgggactggatgtgctggtacatggcgaggccgagcgtaatgacatggtggaatactttggcgagcacctcgacggatttgtctttacgcaaaacggttgggtacagagctacggttcccgctgcgtgaagccaccgattgttattggtgacgtgagccgaccggcaccgattaccgtggagtgggcgaaatatgcgcagtcgctgaccgacaaaccggtgaaagggatgctgactggtccggtgacgattctctgctggtcgttcccgcgtgaagatgtgagccgtgaaaccatcgccaaacagattgcgctggcgctgcgtgatgaagtggcggacctggaagccgctggaattggcatcatccagattgatgaaccggcgctgcgcgaaggtttaccgctgcgtcgtagcgactgggacgcctatctccagtggggcgtagaggccttccgtatcaacgccgccgtggcgaaagatgacacacaaatccacactcacatgtgttattgcgagttcaacgacatcatggattccattgcggcgctggatgcggatgtgattaccatcgaaacttcgcgttctgacatggagttgctggagtcgttcgaagagtttgattatcccaatgaaatcggtccaggcgtctatgatattcactcgccaaacgtaccgagcgtggaatggattgaagccctgctgaagaaagcggcaaaacgcattccggcagagcgcctgtgggttaacccggactgtggcctgaaaacgcgcggctggccagaaacccgcgcggcactggcgaacatggtgcaggcggcgcagaacttgcgtcgggggtaaatccaaaccgggtggtaataccacccggtcttttctcattacagcgacttcttcccaccatactgcttaaaccattccagcatacgctgccagccatctttcgcagattcggcatgatagctcgggcgataatcagcgttgaatgcatgcccggcatccgggtacacgataatctctgctttcgcattagcagcccgcagcgcctggcgcatggtttcaacgctctcctgcggaatgctgttatcctgaccaccatataagccgagaaccggcgcgttaagatcggttgcgatatcaacaggttgtttcggtgaattcagcgacttgtcgcccgtcagtttgccgtaccacgccactgcggcttttagctgtggattatgcgcggcatacagccaggtgatacgtccaccccagcagaatccggtgatcattaaacgatgaacatcgccgccgttgcgggaagcccaactggcgacatgatcgagatcggccagcacctgcgagtcaggcacttttgctaccagaccgctaagcaacgtggggatatcggcaaaatcattcggatcgccttcgcggaagtaaagttcaggtgcgatagccagatacccctccagcgccagacggcgacaaatgtcgcggatatgttcatgcacgccaaaaatttcctgcactacaatgaccactggcagtgggccatcgctttgctttggtctggcatggtaagcaggcatgttatccccttgtgaagggatagaggtgaagcccgccacaatcgcgtcgttcggggtctgaacgatggtcgaagcgagaggcgatgcagcaggtgcaaatccagattgttgtgttgttgccatggtattctccgtacccttataaaaatgttgcgcaatgttaactatagtcagcatgcaacaaatcacattgcctgaatcggctcatcttttatgcagtcctgcagaatgaagagtgatttatgtgatttacatcacttttgatgggtaaatttatgcaacgcgtttgcgtcatggtgatgagtatcacgaaaaaatgttaaacccttcggtaaagtgtctttttgcttcttctgactaaaccgattcacagaggagttgtatatgtccaagtctgatgtttttcatctcggcctcactaaaaacgatttacaaggggctacgcttgccatcgtccctggcgacccggatcgtgtggaaaagatcgccgcgctgatggataagccggttaagctggcatctcaccgcgaattcactacctggcgtgcagagctggatggtaaacctgttatcgtctgttctaccggtatcggcggcccgtctacctctattgctgttgaagagctggcacagctgggcattcgcaccttcctgcgtatcggtacaacgggcgctattcagccgcatattaatgtgggtgatgtcctggttaccacggcgtctgtccgtctggatggcgcgagcctgcacttcgcaccgctggaattcccggctgtcgctgatttcgaatgtacgactgcgctggttgaagctgcgaaatccattggcgcgacaactcacgttggcgtgacagcttcttctgataccttctacccaggtcaggaacgttacgatacttactctggtcgcgtagttcgtcactttaaaggttctatggaagagtggcaggcgatgggcgtaatgaactatgaaatggaatctgcaaccctgctgaccatgtgtgcaagtcagggcctgcgtgccggtatggtagcgggtgttatcgttaaccgcacccagcaagagatcccgaatgctgagacgatgaaacaaaccgaaagccatgcggtgaaaatcgtggtggaagcggcgcgtcgtctgctgtaattctcttctcctgtctgaaggccgacgcgttcggccttttgtatttttgcgtagcgcctcgcaggaaatgcctttccaactggacgtttgtacagcacaattctattttgtgcgggtaagttgttgcgtcaggaggcgttgtggatttctcaatcatggtttacgcagttattgcgttggtgggtgtggcaattggctggctgtttgccagttatcaacatgcgcagcaaaaagccgagcaattagctgaacgtgaagagatggtcgcggagttaagcgcggcaaaacaacaaattacccaaagcgagcactggcgtgcagagtgcgagttactcaataacgaagtgcgcagcctgcaaagtattaacacctctctggaggccgatctgcgtgaagtaaccacgcggatggaagccgcacagcaacatgctgacgataaaattcgccagatgattaacagcgagcagcgcctcagtgagcagtttgaaaacctcgccaaccgtatttttgagcacagcaatcgccgggttgatgagcaaaaccgtcagagtctgaacagcctgttgtcgccgctacgtgaacaactggacggtttccgccgtcaggttcaggacagcttcggtaaagaagcacaagaacgccataccctgacccacgaaattcgcaatctccagcaactcaacgcgcaaatggcccaggaagcgatcaacctgacgcgcgcgctgaaaggcgacaataaaacccagggcaactggggcgaggtagtattgacgcgggtgctggaggcttccggtctgcgtgaagggtatgaatatgaaacccaggtcagcatcgaaaatgacgcccgctcgcggatgcaaccggatgtcatcgtgcggctgccgcagggaaaagatgtggtgatcgacgccaaaatgacgctggtcgcctatgaacgctatttcaacgccgaagatgactacacccgcgaaagcgcgctacaggaacatatcgcgtcggtgcgtaaccatatccgtttgctgggacgcaaagattatcaacagctgccggggctgcgaactctggattacgtgctgatgtttattcccgttgaacccgcttttttactggcgcttgaccgccagccggagctgatcaccgaagcgttgaaaaacaatatcatgctggttagcccgactacgctgctggtggcgttgcgtactattgccaacctgtggcgttatgagcatcaaagccgcaacgcccagcaaatcgccgatcgtgccagcaagctgtacgacaagatgcgtttgttcatcgatgacatgtccgcgattggtcaaagtctcgacaaagcgcaggataactaccgccaggcaatgaaaaaactctcttcaggtcgcggaaatgtgctggcgcaggcagaagcgtttcgcggtttaggagtagaaattaaacgcgagattaatccggatttggctgaacaggcggtgagccaggatgaagagtatcgacttcggtcggttccggagcagccgaatgatgaagcttatcaacgcgatgatgaatataatcagcagtcgcgctagcccattaggggtagttaagccgggtagaaatctagggcatcgacgcccaatctgttacacttctggaacaattttttgatgagcaggcattgagatggtggataagtcacaagaaacgacgcactttggttttcagaccgtcgcgaaggaacaaaaagcggatatggtcgcccacgttttccattccgtggcatcaaaatacgatgtcatgaatgatttgatgtcatttggtattcatcgtttgtggaagcgattcacgattgattgcagcggcgtacgccgtgggcagaccgtgctggatctggctggtggcaccggcgacctgacagcgaaattctcccgcctggtcggagaaactggcaaagtggtccttgctgatatcaatgaatccatgctcaaaatgggacgcgagaagctgcgtaatatcggtgtgattggcaacgttgagtatgttcaggcgaacgctgaggcgctgccgttcccggataacacctttgattgcatcaccatttcgtttggtctgcgtaacgtcaccgacaaagataaagcactgcgttcaatgtatcgcgtgctgaaacccggcggccgcctgctggtgcttgagttctcgaagccaattatcgagccgctgagcaaagcctatgatgcatactccttccatgtgctgccgcgtattggctcactggtcgcgaacgacgccgacagctaccgttatctggcagaatccatccgtatgcatcccgatcaggataccctgaaagccatgatgcaggatgccggattcgaaagtgtcgactactacaatctgacggcaggggttgtggcgctgcatcgtggttataagttctgacaggagaccggaaatgccttttaaacctttagtgacggcaggaattgaaagtctgctcaacaccttcctgtatcgctcacccgcgctgaaaacagcccgctcgcgtctgctgggtaaagtattgcgcgtggaggtaaaaggcttttcgacgtcattgattctggtgttcagcgaacgccaggttgatgtactgggcgaatgggcaggcgatgctgactgcaccgttatcgcctacgccagtgtgttgccgaaacttcgcgatcgccagcagcttaccgcactgattcgcagtggtgagctggaagtgcagggcgatattcaggtggtgcaaaacttcgttgcgctggcagatctggcagagttcgaccctgcggaactgctggccccttataccggtgatatcgccgctgaaggaatcagcaaagccatgcgcggaggcgcaaagttcctgcatcacggcattaagcgccagcaacgttatgtggcggaagccattactgaagagtggcgtatggcacccggtccgcttgaagtggcctggtttgcggaagagacggctgccgtcgagcgtgctgttgatgccctgaccaaacggctggaaaaactggaggctaaatgacgccaggtgaagtacggcgcctatatttcatcattcgcacttttttaagctacggacttgatgaactgatccccaaaatgcgtatcaccctgccgctacggctatggcgatactcattattctggatgccaaatcggcataaagacaaacttttaggtgagcgactacgactggccctgcaagaactggggccggtttggatcaagttcgggcaaatgttatcaacccgccgcgatctttttccaccgcatattgccgatcagctggcgttattgcaggacaaagttgctccgtttgatggcaagctggcgaagcagcagattgaagctgcaatgggcggcttgccggtagaagcgtggtttgacgattttgaaatcaagccgctggcttctgcttctatcgcccaggttcataccgcgcgattgaaatcgaatggtaaagaggtggtgattaaagtcatccgcccggatattttgccggtcattaaagcggatctgaaacttatctaccgtctggctcgctgggtgccgcgtttgctgccggatggtcgccgtctgcgcccaaccgaagtggtgcgcgagtacgaaaagaccttgattgatgaactgaatttgctgcgggaatctgccaacgccattcagcttcggcgcaattttgaagacagcccgatgctctacatcccggaagtttaccctgactattgtagtgaagggatgatggtgatggagcgcatttacggcattccggtgtctgatgttgcggcgctggagaaaaacggcactaacatgaaattgctggcggaacgcggcgtgcaggtgttcttcactcaggtctttcgcgacagctttttccatgccgatatgcaccctggcaacatcttcgtaagctatgaacacccggaaaacccgaaatatatcggcattgattgcgggattgttggctcgctaaacaaagaagataaacgctatctggcagaaaactttatcgccttctttaatcgcgactatcgcaaagtggcagagctacacgtcgattctggctgggtgccaccagataccaacgttgaagagttcgaatttgccattcgtacggtctgtgaacctatctttgagaaaccgctggccgaaatttcgtttggacatgtactgttaaatctgtttaatacggcgcgtcgcttcaatatggaagtgcagccgcaactggtgttactccagaaaaccctgctctatgtcgaaggggtaggacgccagctttatccgcagctcgatttatggaaaacagcgaagcctttcctggagtcgtggattaaagatcaggtcggtattcctgcgctggtgagagcatttaaagaaaaagcgccgttctgggtcgaaaaaatgccagaactgcctgaattggtttacgacagtttgcgccagggcaagtatttacagcacagtgttgataagattgcccgcgagcttcagtcaaatcatgtacgtcagggacaatcgcgttattttctcggaattggcgctacgttagtattaagtggcacattcttgttggtcagccgacctgaatgggggctgatgcccggctggttaatggcaggtggtctgatcgcctggtttgtcggttggcgcaaaacacgctgattttttcatcgttcaaggcgggccgtgtaacgtataatgcggctttgtttaatcatcatctaccacagaggaacatgtatgggtggtatcagtatttggcagttattgattattgccgtcatcgttgtactgctttttggcaccaaaaagctcggctccatcggttccgatcttggtgcgtcgatcaaaggctttaaaaaagcaatgagcgatgatgaaccaaagcaggataaaaccagtcaggatgctgattttactgcgaaaactatcgccgataagcaggcggatacgaatcaggaacaggctaaaacagaagacgcgaagcgccacgataaagagcaggtgtaatccgtgtttgatatcggttttagcgaactgctattggtgttcatcatcggcctcgtcgttctggggccgcaacgactgcctgtggcggtaaaaacggtagcgggctggattcgcgcgttgcgttcactggcgacaacggtgcagaacgaactgacccaggagttaaaactccaggagtttcaggacagtctgaaaaaggttgaaaaggcgagcctcactaacctgacgcccgaactgaaagcgtcgatggatgaactacgccaggccgcggagtcgatgaagcgttcctacgttgcaaacgatcctgaaaaggcgagcgatgaagcgcacaccatccataacccggtggtgaaagataatgaagctgcgcatgagggcgtaacgcctgccgctgcacaaacgcaggccagttcgccggaacagaagccagaaaccacgccagagccggtggtaaaacctgctgcggacgctgaaccgaaaaccgctgcaccttccccttcgtcgagtgataaaccgtaaacatgtctgtagaagatactcaaccgcttatcacgcatctaattgagctgcgtaagcgtctgctgaactgcattatcgcggtgatcgtgatattcctgtgtctggtctatttcgccaatgacatctatcacctggtatccgcgccattgatcaagcagttgccgcaaggttcaacgatgatcgccaccgacgtggcctcgccgttctttacgccgatcaagctgacctttatggtgtcgctgattctgtcagcgccggtgattctctatcaggtgtgggcatttatcgccccagcgctgtataagcatgaacgtcgcctggtggtgccgctgctggtttccagctctctgctgttttatatcggcatggcgttcgcctactttgtggtctttccgctggcatttggcttccttgccaataccgcgccggaaggggtacaggtatccaccgacatcgccagctatttaagcttcgttatggcgttgtttatggcgtttggtgtctcctttgaagtgcctgtggcaattgtgctgctgtgctggatggggattacctcgccagaagacttacgcaaaaaacgcccgtatgtgctggttggtgcattcgttgtcgggatgctgctgacaccgccggatgtcttctcgcaaacgctgttggcgatcccgatgtactgtctgtttgaaatcggtgtcttcttctcacgcttttacgttggtaaagggcgaaatcgggaagaggaaaacgacgctgaagcagaaagcgaaaaaactgaagaataaattcaaccgcccgtcagggcggttgtcatatggagtacaggatgtttgatatcggcgttaatttgaccagttcgcaatttgcgaaagaccgtgatgatgttgtagcgcgcgcttttgacgcgggagttaatgggctactcatcaccggcactaacctgcgtgaaagccagcaggcgcaaaagctggcgcgtcagtattcgtcctgttggtcaacggcgggcgtacatcctcacgacagcagccagtggcaagctgcgactgaagaagcgattattgagctggccgcgcagccagaagtggtggcgattggtgaatgtggtctcgactttaaccgcaacttttcgacgccggaagagcaggaacgcgcttttgttgcccagctacgcattgccgcagatttaaacatgccggtatttatgcactgtcgcgatgcccacgagcggtttatgacattgctggagccgtggctggataaactgcctggtgcggttcttcattgctttaccggcacacgcgaagagatgcaggcgtgcgtggcgcgtggaatttatatcggcattaccggttgggtttgcgatgaacgacgcgggctggagctgcgggaattgttgccgttgattccggcggagaaattgctgatcgaaactgatgcgccgtatctgctcccgcgcgatctcacgccaaagccatcatcccggcgcaacgagccagcccatctgccccatattttgcaacgtattgcgcactggcgtggagaagatgccgcatggctggctgccaccacggatgccaatgtcaaaacactgtttgggattgcgttttagagtttgcggaactcggtgttcttcacactgtgcttaatctctttattaataagattaagcaatagcatggagcgagcctcaccatcgggttcggtgaaaatggcctgaaagccttcgaacgcgccttcggtaataatcaccttatcacccggataaggggttgccggatcgacaatgtctttcggtttatataccgatagctgatgaatcaccgccgatgggactatcgctggcgacgcgccaaagcgcacgaagtggctgacaccgcgggtcgcgttgatagtcgtggtatgaatcacttctggatcaaattcgacaaacaggtagttgggaaacaatggctcactgactgcagtacgttttccacgcacgattttttccagggtgatcatcggtgccaggcaattcacagcctgtctttcgaggtgttcctgggcacgttgaagttgcccgcgcttgcagtacagtaaataccaggattgcataatgactcttatccgtttaatcggggcgcaaggatagcaaaagctttacgctaagttaattatattccccggtttgcgttataccgtcagagttcacgctaatttaacaaatttacagcatcgcaaagatgaacgccgtataatgggcgtagattaagaggctacaatggacgccatgaaatataacgatttacgcgacttcctgacactgcttgaacagcagggtgagctaaaacgtatcacgctcccggtggatccgcatctggaaatcactgaaattgctgaccgcactttgcgtgccggtgggcctgcgctgttgttcgaaaaccctaaaggctactcaatgccggtgctgtgcaacctgttcggtacgccaaagcgcgtggcaatgggcatggggcaggaagatgtttcggcgctacgtgaagttggtaaattattggcgtttctgaaagagccggagccgccaaaaggtttccgcgacctgtttgataaactgccgcagtttaagcaagtattgaacatgccgacaaagcggctgcgtggtgcgccctgccaacaaaaaatcgtctctggcgatgacgtcgatctcaatcgcattcccattatgacctgctggccggaagatgccgcgccgctgattacctgggggctgacagtgacgcgcggcccgcataaagagcggcagaatctgggcatttatcgccagcagctgattggtaaaaacaaactgattatgcgctggctgtcgcatcgcggcggcgcgctggattatcaggagtggtgtgcggcgcatccgggcgaacgtttcccggtttctgtggcgctgggtgccgatcccgccacgattctcggtgcagtcacccccgttccggatacactttcagagtatgcgtttgccggattgctgcgcggtaccaagaccgaagtggtgaagtgtatctccaatgaccttgaagtgcccgccagtgcggagattgtgctggaagggtatatcgaacaaggtgaaacggcgccggaagggccgtatggcgaccacaccggttactataacgaagtcgatagtttcccggtatttaccgtgacgcatattacccagcgtgaagatgcgatttaccattccacctataccgggcgtccgccagatgagcccgcggtactgggcgtggcgttgaacgaagtgtttgtaccgattctgcaaaaacagttcccggaaattgtcgatttttacctgccgccggaaggctgttcttatcgtctggcggtagtgacgatcaaaaaacagtacgccggacacgcgaagcgcgtcatgatgggcgtctggtcgttcttacgccagtttatgtacactaaatttgtgatcgtttgcgatgatgacgtcaacgcacgcgactggaacgatgtgatttgggcgattaccacccgtatggacccggcgcgggatactgttctggtagaaaatacgcctattgattatctggattttgcctcgcctgtctccgggctgggttcaaaaatggggctggatgccacgaataaatggccgggggaaacccagcgtgaatggggacgtcccatcaaaaaagatccagatgttgtcgcgcatattgacgccatctgggatgaactggctatttttaacaacggtaaaagcgcctgatgcgcgtttgttttgccctatttatcgatccgacagagaaagcgcatgacaaccttaagctgtaaagtgacctcggtagaagctatcacggataccgtatatcgtgtccgcatcgtgccagacgcggccttttcttttcgtgctggtcagtatttgatggtagtgatggatgagcgcgacaaacgtccgttctcaatggcctcgacgccggatgaaaaagggtttatcgagctgcatattggcgcttctgaaatcaacctttacgcgaaagcagtcatggaccgcatcctcaaagatcatcaaatcgtggtcgatattccccacggagaagcgtggctgcgcgatgatgaagagcgtccgatgattttgattgcgggcggcaccgggttctcttatgcccgctcgattttgctgacagcgttggcgcgtaacccaaaccgtgatatcaccatttactggggcgggcgtgaagagcagcatctgtatgatctctgcgagcttgaggcgctttcgttaaagcaccctggtctgcaagtggtgccggtggttgaacaaccggaagcaggctggcgtgggcgtactggtaccgtgttaacggcggtattgcaggatcatggtacgctggcagagcatgatatctatattgccggacgttttgagatggcgaaaattgcccgtgacctgttttgcagtgagcgtaatgcgcgggaagatcgcctgtttggcgatgcgtttgcatttatctgagatataaaaaaacccgcccctgacaggcgggaagaacggcaactaaaactttattcagtggcatttagatctatgtcgcatccggcaattggtgcacgacgcctgatgcgacgctggcgcgtcttatcaggcctacattggtgccggatcggtagaccggataaggcgttcacgccgcatccggcaagtggttaaacccgctcaaacaccgtcgcaataccctgacccagaccgatacacatcgtcgccagaccaaactgaacgtctttgcgttccatcagattcagcagcgtggtgctgatacgcgcaccggaacagcccagcggatgacccagcgcgatcgcaccaccattgaggttgatcttctcgtcaatctgctccattagcccgagatctttaatgcacggcaggatctgcgcggcaaaggcttcgttcatctcaaacacgccgatatcgctggcagaaagccccgcttttttcagcgccagcttcgaggccggaaccgggccgtaacccataatcgatgggtcacaaccaacgaccgccatcgaacgcacacgagcgcgcggcttaagacctaattcatgggcgcggctttcactcatcaccagcatggcagctgcgccatcggaaagtgcagaagatgtgcccgccgttaccgtaccgtttactggatcaaacgccggacgcagcgtggcgagggcttccacggtggtttccgggcgaatcacttcgtcgtaattaaactgcttcaggacgccgtcggcatcgtgaccaccggtcgggatgatttcatttttaaatgcgcccgactgcgtggcggcccaggcgcgggcgtgtgaccgcgcggcaaaggcatcctgcatttcacggctgataccgtgcatacgcgccagcatttctgccgttaagcccatcatgcccgccgctttggcgacattgcggctcaggccggggtgaaaatcgacgccgtgactcatcggcacatggcccatatgctccacgccgccaaccagacatgcctgcgcatcgccagtcatgatcattcgtgctgcgtcatgcagtgcctgcatggatgaaccacacaagcgattaacggtaaccgccgggacagagtgtggtacttctgccagcagcgccgcgttacgggcgatattaaaaccctgctccagcgtctgctgcacacaaccccagtaaatatcgtcgagggccgccgcttccagcgccgggttacgcgccagcaggctacgcattaaaggagcggagagatcttctgcacgcacgttacgaaaagcaccgcccttcgaacggcccatcggggtgcgaattgcatcgacaatgacaacctgttccattgtgactccttaagccgttttcaggtcgccaaccggacgggctggctcaaccggaggatagtacggttcgttatgacgcgctttattacgcagaccttccggcacttcatacagcgggccgaggtgctgatattgctgtgccatatcgaggtattttgcgctaccgagggtgtccagccagcggaacgcgccgccgtggaacggagggaagcccaggccgtagaccagcgccatatccgcttccgccggagtggcgataatgccttcctccagacagcgcaccacttcgttgaccatcgggatcatcatgcgggcgataatctcttcttcgctgaaatcgcgcttcggctggctcacttctgccagcaggtcttcaacggcggcgtcttcttctttcttcggcttacctttgctgtcttctttataacgccagaaaccgaggccgttcttctgaccaaagcggttggcatcaaacagcgcgtcgatggcatcgcggtaatctttctgcatccgctgcgggaagcctgctgccatgacagcctgagcgtgatgcgcggtatcaatgcccacgacatccagcagatatgccggacccataggccagccaaactgtttttccatcactttgtcgatcttgcggaaatccgcgccgtcgcgcagcagctggctgaaaccggcgaaatacgggaacagcacgcggttaacaaagaagccggggcagtcgttaaccacaatcggcgtcttgcccatcttgctcgcccaggcgacaactttcgcgatggtttcgtcggagcttttctcgccgcgaataatttctaccaacggcatccggtgtaccgggttaaaaaagtgcattccgcagaagttttccgggcgttccagcgcgttggccagttcgctgataggaatggttgaagtgttagacgccagcacggtatccgggcgtactttttgttcggtttctgccagtacggcttttttcactttcgggttttcgacaaccgcttctaccacaacatccacgcggtcaaacccggcgtagtcgagcgttgggtggattgtggagatcacgccagccagtttcagaccatcgatcttgccgcgctcaagctgcttgttcagcagtttcgcggcttcggtcatgccgagggttaacgacttgtcgttgatatctttcatgacaaccggcacgcctttccacgcagactggtaagcgatgccgccgcccataatgcctgcacccagcaccgcggcctgtttcggggtttcaacgtctttggtgagtttcttcgctttgccttttacatattgatcgttaaggaaaatgccgaccagtgcgcgggcttcgttggtatgcgccagcgggacaaaacttttgttttccaggtttaaggcttcttcacgaccaaaacgggccgcagcttcaatggtttttactgcggtgatgggggccggataatgtttccccgctgtttgtgcgaccatccctttagcgatggtgaagctcatggtggcttcaatcttgctcagttttagtggttccagcttcggctgacgttttgctttccagtcgaggtcgccgttaatggcctggcgtaaaaccgcctttgcgccttcaaccagtttttctgctttgactacgccatccaccagaccgattttcagcgcctgatccgcgccgacatctttaccggcggcaatgatttccagcgcactgtcagcgcccagcatacgtggcatacgtacagaaccgccaaagcccggcatgatgcccagtttggtttccggcagaccgatgcgcagatccggcgtcgccagacgataatcggtcgccagcacgcattcgcagccaccgcccagcgcatagccgttgacggcagcaatggtcggcaccggcagatcttccaggcgattaaacacgctattggcaaagtgcagccactgacttaactgttcttcaggaacgaggaacagggacaaaaattcggtgatatcagcaccgacgataaaggctgctttgttcgaacgcagcagcagcccttttagatctgattgctgttccagcacgccgatggcctcgccgaggctggcgacggtcgcagtgtcgagtttattaactgaacctggggcatcaaataccagttcggcaatgccatcttccagccagtcaaggtacagggtgtcgcctttgtaaagcatgtcagtctcctgaatccgcaaggtgatctggtcgtaccagatgagtcgaagtgtgtattttgtgttaaaaatatgcaaataaaagattaaagaaatgccaatctgatcacgctcggcagaaatcacgctctggatgaacgatgtgctaagatgcggagacttaaggtcaaaaaaacagaagggtaaaaaatggaatcactggcctcgctctataaaaatcatatagctaccttacaagaacggactcgcgatgcgctggcgcgcttcaagctggatgcattacttattcactccggcgagctgttcaacgtttttctcgacgatcatccctatccgtttaaagtgaacccgcaattcaaagcgtgggtgccggtaactcaggtgccaaactgctggttgctggtggatggcgtgaacaagccgaaactgtggttctatctgccggttgattactggcacaacgtcgaaccgctgccgacctccttctggactgaagatgtggaagtgatcgcactgccgaaagccgatggcattggtagcctgctgcccgctgcgcgcggcaatatcggttatatcggtccggtgccggaacgtgcgctgcaactgggtattgaggccagcaacatcaacccgaaaggggtgatcgactacctgcattactaccgctccttcaaaaccgagtacgaactggcctgtatgcgtgaagcgcagaaaatggcggtcaacggtcatcgcgcggcagaagaagcgttccgttctggcatgagcgagttcgatatcaacattgcctatctgaccgcgaccggtcatcgtgataccgacgtaccttacagcaacattgtggcgctcaacgaacacgctgcggtgttgcattacaccaaactggaccaccaggcaccggaagagatgcgcagcttcctgctggatgccggggccgaatataacggctatgcggctgacctgacccgtacctggtcggcaaaaagtgacaacgactacgcacagctggtgaaagacgtaaatgatgaacaactggcgctgatcgctaccatgaaagcaggcgtcagctatgtggattaccacatccagttccatcagcgcatcgccaaactgctgcgtaaacatcaaatcatcaccgatatgagtgaagaagcgatggtcgaaaacgatctcaccggaccgtttatgccgcacggtattggccatccgctgggcctgcaggtgcatgacgtagccggttttatgcaggatgatagcggtacgcacctcgcggcaccggcaaaatatccgtacctgcgctgcacccgtattctccagccgggcatggtgttaaccatcgaaccgggtatctacttcattgaatcgctgctggcaccgtggcgtgaagggcagttcagcaagcacttcaactggcagaaaattgaagcactgaaaccgttcggcggcattcgtatcgaagacaacgtggtgatccacgaaaacaacgtggaaaacatgacccgggatctgaaactggcgtgatggaaagctggttaattcctgcggcaccggtcacggtcgttgaagagatcaaaaaaagccgcttcataacgatgttggcgcataccgatggcgttgaggcggcgaaagcgtttgttgaatcggtgcgggcagaacaccccgatgcccgccaccattgcgtggcgtgggtggcgggtgcgccggatgattctcaacagctgggtttctctgacgacggggagccggcgggaacggcaggtaaaccgatgctcgcccagctaatgggcagcggcgtcggggaaattaccgctgtggtagtgcgctactacggcggcatattgcttggcaccggtgggttagtgaaagcgtatggcggcggcgtgaatcaggcgctgcgccagctaacgacccaacgcaagacgccattaaccgaatatactttgcaatgtgaatatagtcagttaaccggcattgaagcgttgctggggcagtgtgacggcaaaattatcaacagtgattatcaggcattcgttctgctgcgggtggcgcttccggcggcgaaagtggctgaattttccgcaaagctggcggattttagccgtggttcattgcaattgttagcgattgaagaataatccccacttcgttttgcagaactaaggaagcggcagagatgcattttcgcgccattacccgaatcgttggactactggtcatcttattttcagggaccatgattatccctgggctggtagcactcatctaccgggatggagcgggccgcgcttttacccagaccttttttgtcgccctcgccattggctctatgctgtggtggccgaaccgcaaagagaagggcgaactgaaatcccgtgaggggtttctgatagtggtgctgttttggaccgtgctgggtagcgtcggtgcgctcccttttatcttctcggaaagcccgaacctcacgattaccgatgcgttttttgaatctttctctggcctgaccaccaccggggccactacgctggtggggctggattcgctccctcatgccatcctcttttatcgccagatgctgcaatggtttggcgggatggggatcatcgtgttagcggttgcgatactgcctatcctcggcgtgggtgggatgcagctctatcgcgcagaaatgcccggcccgctgaaagataacaaaatgcgcccgcgaattgcggaaacggcgaaaaccctgtggttgatttatgtcttgctgaccgtcgcctgtgcgctggcgttgtggtttgccggaatggatgcctttgatgccatcggccatagctttgcgactatcgctattggcggcttctcgacacatgatgccagtatcggttatttcgacagcccgactattaacactatcattgctatcttcctgctgatctccggctgtaactacggtctgcacttttcactgttaagtgggcgtagtctgaaggtttattggcgcgatccggaatttcgcatgtttatcggcgtacagtttacgctggtggttatttgtacactcgtactgtggtttcataatgtctacagttcggcgctgatgacaattaaccaggcgtttttccaggtggtatcgatggcgacaaccgccgggtttacgactgacagcattgcccgctggccgctctttttgccggtactgcttttatgttcagcttttatcggcggttgcgccgggtcaacgggcggtggcctgaaagtgatccgcatcctgctgctgtttaagcaggggaaccgtgagctgaaacgactggtgcatccgaacgccgtctatagcattaagctggggaatcgcgcactgccggaacgtatcctcgaagccgtttggggatttttctccgcctatgcattggtgtttattgtcagtatgctggcgattatcgccacgggcgtggatgacttttctgcctttgcctcagttgttgcgacattgaataacctggggccagggcttggcgtggttgctgataactttaccagtatgaacccggtggctaaatggatcctgattgccaacatgctgtttggtcgtctcgaggtctttacattgctggtgctctttaccccgactttctggcgtgaatgatggagtaatacgtgaaaacattaattcttttctcaacaagggacggacaaacgcgcgagattgcctcctacctggcttcggaactgaaagaactggggatccagacggatgtcgccaatgtgcaccgcattgaagaaccacaatgggaaaattatgaccgtgtggtcattggtgcttctattcgctatggtcactaccactctgcgttccaggaatttgtcaaaaaacatgcgacgcgactgaattcgatgccgagcgccttttattccgtaaacctggtggcgcgcaaaccggagaagcgtactccacagaccaacagctacgcgcggaagtttctgatgaactcgcaatggcgtcccgatcactgcgcggtcattgccggggcgctgcgttacccacgttatcgctggtacgatcgttttatgatcaagctaattatgaagatgtcaggcggtgaaacggatacgcgcaaagaagttgtctataccgattgggagcaggtggcgaatttcgcccgagaaatcgcccatttaaccgacaaaccgacgctgaaataagcataaagaataaaaaatgcgcggtcagaaaattattttaaatttcctcttgtcaggccggaataactccctataatgcgccaccactgacacggaacaacggcaaacacgccgccgggtcagcggagttctcctgagagctccgacagagaaagcaaaaataaatgcttgactctgtagcgggaaagcgtattatgcacaccccgcgccgctgagaaaaagcgaggcggcactgctctttaacaatttatcagacaatctgtgtgggcactcgaagatacggattcttaacgtcgcaagacgaaaaatgaataccaagtctcaagagtgaacacgtaattcattacgaagtttaattctttgagcatcaaacttttaaattgaagagtttgatcatggctcagattgaacgctggcggcaggcctaacacatgcaagtcgaacggtaacaggaaacagcttgctgtttcgctgacgagtggcggacgggtgagtaatgtctgggaaactgcctgatggggggggataactactggaaacggtagctaataccgcataacgtcgcaagaccaaagagggggaccttcgggcctcttgccatcggatgtgcccagatgggattagcttgttggtggggtaacggctcaccaaggcgacgatccctagctggtctgagaggatgaccagccacactggaactgagacacggtccagactcctacgggaggcagcagtggggaatattgcacaatgggcgcaagcctgatgcagccatgccgcgtgtatgaagaaggccctcgggttgtaaagtactttcagcggggaggaagggagtaaagttaatacctttactcattgacgttacccgcagaagaagcaccggctaactccgtgccagcagccgcggtaatacggagggtgcaagcgttaatcggaattactgggcgtaaagcgcacgcaggcggtttgttaagtcagatgtgaaatccccgggctcaacctgggaactgcatctgatactggcaagcttgagtctcgtagaggggggtagaattccaggtgtagcggtgaaatgcgtagagatctggaggaataccggtggcgaaggcggccccctggacgaagactgacgctcaggtgcgaaagcgtggggagcaaacaggattagataccctggtagtccacgccgtaaacgatgtcgacttggaggttgtgcccttgagacgtggcttccggagctaacgcgttaagtcgaccgcctggggagtacggccgcaaggttaaaactcaaatgaattgacgggggcccgcacaagcggtggagcatgtggtttaattcgatgcaacgcgaagaaccttacctggtcttgacatccacggaagttttcagagatgagaatgtgccttcgggaaccgtgagacaggtgctgcatggctgtcgtcagctcgtgttgtgaaatgttgggttaagtcccgcaacgagcgcaacccttatcctttgttgccagcggtccggccgggaactcaaaggagactgccagtgataaactggaggaaggtggggatgacgtcaagtcatcatggcccttacgaccagggctacacacgtgctacaatggcgcatacaaagagaagcgacctcgcgagagcaagcggacctcataaagtgcgtcgtagtccggattggagtctgcaactcgactccatgaagtcggaatcgctagtaatcgtggatcagaatgccacggtgaatacgttcccgggccttgtacacaccgcccgtcacaccatgggagtgggttgcaaaagaagtaggtagcttaaccttcgggagggcgcttaccactttgtgattcatgactggggtgaagtcgtaacaaggtaaccgtaggggaacctgcggttggatcacctccttaccttaaagaagcgttctttgaagtgctcacacagattgtctgatgaaaatgagcagtaaaacctctacaggcttgtagctcaggtggttagagcgcacccctgataagggtgaggtcggtggttcaagtccactcaggcctaccaaatttgcacggcaaatttgaagaggttttaactacatgttatggggctatagctcagctgggagagcgcctgctttgcacgcaggaggtctgcggttcgatcccgcatagctccaccatctctgtagtgattaaataaaaaatacttcagagtgtacctgcaaaggttcactgcgaagttttgctctttaaaaatctggatcaagctgaaaattgaaacactgaacaacgaaagttgttcgtgagtctctcaaattttcgcaacacgatgatgaatcgcaagaaacatcttcgggttgtgaggttaagcgactaagcgtacacggtggatgccctggcagtcagaggcgatgaaggacgtgctaatctgcgataagcgtcggtaaggtgatatgaaccgttataaccggcgatttccgaatggggaaacccagtgatgwttcgacacactatcattaactgaatccataggttaatgaggcgaaccgggggaactgaaacatctaagtaccccgaggaaaagaaatcaaccgagattcccccagtagcggcgagcgaacggggagcagcccagagcctgaatcagtgtgtgtgttagtggaagcgtctggaaaggcgcgcgatacagggtgacagccccgtacacaaaaatgcacatgctgtgagctcgatgagtagggcgggacacgtggtatcctgtctgaatatggggggaccatcctccaaggctaaatactcctgactgaccgatagtgaaccagtaccgtgagggaaaggcgaaaagaaccccggcgaggggagtgaaaaagaacctgaaaccgtgtacgtacaagcagtgggagcacgcttaggcgtgtgactgcgtaccttttgtataatgggtcagcgacttatattctgtagcaaggttaaccgaataggggagccgaagggaaaccgagtcttaactgggcgttaagttgcagggtatagacccgaaacccggtgatctagccatgggcaggttgaaggttgggtaacactaactggaggaccgaaccgactaatgttgaaaaattagcggatgacttgtggctgggggtgaaaggccaatcaaaccgggagatagctggttctccccgaaagctatttaggtagcgcctcgtgaattcatctccgggggtagagcactgtttcggcaagggggtcatcccgacttaccaacccgatgcaaactgcgaataccggagaatgttatcacgggagacacacggcgggtgctaacgtccgtcgtgaagagggaaacaacccagaccgccagctaaggtcccaaagtcatggttaagtgggaaacgatgtgggaaggcccagacagccaggatgttggcttagaagcagccatcatttaaagaaagcgtaatagctcactggtcgagtcggcctgcgcggaagatgtaacggggctaaaccatgcaccgaagctgcggcagcgacactatgtgttgttgggtaggggagcgttctgtaagcctgtgaaggtgtactgtgaggtatgctggaggtatcagaagtgcgaatgctgacataagtaacgataaagcgggtgaaaagcccgctcgccggaagaccaagggttcctgtccaacgttaatcggggcagggtgagtcgacccctaaggcgaggccgaaaggcgtagtcgatgggaaacaggttaatattcctgtacttggtgttactgcgaaggggggacggagaaggctatgttggccgggcgacggttgtcccggtttaagcgtgtaggctggttttccaggcaaatccggaaaatcaaggctgaggcgtgatgacgaggcactacggtgctgaagcaacaaatgccctgcttccaggaaaagcctctaagcatcaggtaacatcaaatcgtaccccaaaccgacacaggtggtcaggtagagaataccaaggcgcttgagagaactcgggtgaaggaactaggcaaaatggtgccgtaacttcgggagaaggcacgctgatatgtaggtgaagckmcytgctsgtggagctgaaatcagtcgaagataccagctggctgcaactgtttattaaaaacacagcactgtgcaaacacgaaagtggacgtatacggtgtgacgcctgcccggtgccggaaggttaattgatggggtcagcgcaagcgaagctcttgatcgaagccccggtaaacggcggccgtaactataacggtcctaaggtagcgaaattccttgtcgggtaagttccgacctgcacgaatggcgtaatgatggccaggctgtctccacccgagactcagtgaaattgaactcgctgtgaagatgcagtgtacccgcggcaagacggaaagaccccgtgaacctttactatagcttgacactgaacattgagccttgatgtgtaggataggtgggaggctttgaagtgtggacgccagtctgcatggagccgaccttgaaataccaccctttaatgtttgatgttctaacgttgacccgtgatccgggttgcggacagtgtctggtgggtagtttgactggggcggtctcctcctaaagagtaacggaggagcacgaaggttggctaatcctggtcggacatcaggaggttagtgcaatggcataagccagcttgactgcgagcgtgacggcgcgagcaggtgcgaaagcaggtcatagtgatccggtggttctgaatggaagggccatcgctcaacggataaaaggtactccggggataacaggctgataccgcccaagagttcatatcgacggcggtgtttggcacctcgatgtcggctcatcacatcctggggctgaagtaggtcccaagggtatggctgttcgccatttaaagtggtacgcgagctgggtttagaacgtcgtgagacagttcggtccctatctgccgtgggcgctggagaactgaggggggctgctcctagtacgagaggaccggagtggacgcatcactggtgttcgggttgtcatgccaatggcactgcccggtagctaaatgcggaagagataagtgctgaaagcatctaagcacgaaacttgccccgagatgagttctccctgactccttgagagtcctgaaggaacgttgaagacgacgacgttgataggccgggtgtgtaagcgcagcgatgcgttgagctaaccggtactaatgaaccgtgaggcttaaccttacaacgccgaagctgttttggcggatgagagaaagattttcagcctgatacagattaaatcagaacgcagaagcggtctgataaaacagaatttgcctggcggccgtagcgcggtggtcccacctgaccccatgccgaactcagaagtgaaacgccgtagcgccgatggtagtgtggggtctccccatgcgagagtagggaactgccaggcatcaaattaagcagaaggcccagtcggaagattgggcctttttgcgctggtgcagaaaaaggtcggatgcgacactggctgcgtctgatccagcctactcttgcttatccgttctgcttttgcatccactccaccacaaaatcagccagcccctcaacatcattaatatccagtaatgcgacatcaagattaagcggcacatcactggctacagcaataacatgcctgtctatcactaattcttcaggtcgatgtccggctccatcgcgaaacagcacaatctttgcgatctcttcatgcttaaacccttcgaccagaatcaaatccagctttgaggtatccattcgacttgcgagaaactgtagatccagctcttcttcgtctggtgtttccgtcatcaaggcccatcgttgctggctggcaacgatggtttgtgccgcgccagccttgcgcagctcatagctatctttgcctggcttatcaacatccatatcatggtgcgtatgcttaatcagccctggacggatccctctggcgcataatgccgggatcagttgtttcaaaagcgtagtttttccggtaccactccacgcggcaaaggcgagtaacggtatcatcgtttttcctgccatcgggcaagctcctctggcgtattcacgttaataaatgcatctttattatcgctgaaatcaaccgcatgaccgccagccagacgcataaatgccattacccggcgttctcctgcttgcagatattccagtaataaaggctcaattgcgcggtttaccagagcaatagtcgggtgatcgcgttcaccgtcgtggacccacacgacaggcgcatctttgcgctgatgattaagccgggctgctaaatcctcgggaatataaggagtatcgcacggacaaaacaaaaaccactcgcctgcttcctgctgcattactgaaagcattcctgccagagggcctgggtaatccgccagtgaatcttcaatcactttcagaccgcttgcctgatagatttcctgatggcgattggcattaaccacgacgtgagagagctgcgtcataagcgcgtcagcgacatgttgccataatggtttgccgtttaattcaagcaatcctttatctacgccgcccattcgtctggctttaccgcctgccagcacaacgcctgttatcgtcgtcatcagattcaccgatatcgcctcttttattgtgggattgaccctgctaacgtgtctgtctcaagagtaaggagcattactatgaaatgtaaacgtctgaatgaagttattgaactcctccagccagcctggcaaaaagagccagaccttaacctgttgcaatttttgcagaaactggcgaaagagtcaggttttgacggcgaactggcggatttgacggatgacattctgatctatcacctgaaaatgcgtgattccgcgaaagatgcggtgatcccgggtttgcagaaagattatgaagaagacttcaaaacggcgctgttacgcgctcgcggcgtaattaaagagtaaaagcttgtaagcggtgccaccaaaatcatcgtgaaatgatatccttcatcattcgtaatgttttccggatgatgggatgaacaacagcgcttttactttccagacactacacccggataccatcatggatgctctatttgagcaagggatccgggtggattccggtcttaccccgcttaacagctatgaaaaccgtgtctatcaatttcaggacgaagatcgtcgacgttttgtcgtcaaattttatcgccctgaacgttggacagccgatcaaatcctcgaagaacatcaatttgcgttgcagttggtaaatgatgaagttccggtcgcagcacctgtggcctttaacggtcagactttattgaatcatcagggattttatttcgctgtttttccaagcgtcggtggtcgccagttcgaagctgataatatcgatcagatggaagcggttgggcgttatttagggcgtatgcaccagacggggcgcaaacagctttttatccatcgcccgaccatcggtctgaatgaatatctcattgagccacgcaagctgtttgaggacgctacactgatgccttccgggttgaaagcggcattcctgaaagcgacagatgagctgatcgccgccgttacagcacactggcgggaagacttcaccgttctgcggctacatggagactgccacgccgggaatattctctggcgcgatggtccaatgtttgttgatctggatgatgcacgtaatggtccagctattcaggatttgtggatgttgctcaatggcgataaagccgagcagcggatgcaactggaaactattattgaagcttatgaagaatttagcgagttcgacaccgctgaaatcggactgattgaacctttacgcgccatgcgtttggtttattatcttgcctggctaatgcggcgttgggctgatcccgcgttcccgaaaaatttcccgtggttaaccggggaagattactggctgcgacaaacggcgacttttatagaacaggcaaaagttctacaagaaccccctttacaattaacacctatgtattaatcggagagagtagatcatgaaaaagatttggctggcgctggctggtttagttttagcgtttagcgcatcggcggcgcagtatgaagatggtaaacagtacactaccctggaaaaaccggtagctggcgcgccgcaagtgctggagtttttctctttcttctgcccgcactgctatcagtttgaagaagttctgcatatttctgataatgtgaagaaaaaactgccggaaggcgtgaagatgactaaataccacgtcaacttcatgggtggtgacctgggcaaagatctgactcaggcatgggctgtggcgatggcgctgggcgtggaagacaaagtgactgttccgctgtttgaaggcgtacagaaaacccagaccattcgttcagcatctgatatccgcgatgtatttatcaacgcaggtattaaaggtgaagagtacgacgcggcgtggaacagcttcgtggtgaaatctctggtcgctcagcaggaaaaagctgcagctgacgtgcaattgcgtggtgttccggcgatgtttgttaacggtaaatatcagctgaatccgcagggcatggataccagcaatatggatgtttttgttcagcagtatgctgatacagtgaaatatctgtccgagaaaaaataattaaatgtaaattacataaagccgtgaataattcacgggctttttttattatttyaataaatataaatacattctgataatgcatcctgccgctggacattatttcagcataagcggatatttaaagttttgctgttttatcagggaatatttatatgatacataagtcagctacaggtgttattgttgcgttagccgtaatctggggtggtggcacatggtacacaggtacgcaaattcagcctggtgtcgaaaagtttattaaagattttaacgatgctaaaaagaaaggtgaacatgcctacgatatgacgttaagttataaaaattttgacaaaggtttttttaattctcgttttcaaatgcaaatgacattcgataacggtgcacccgatctcaatatcaagccaggccagaaagttgtatttgatgtggatgttgagcacggtccgttgcccatcacaatgttaatgcatggtaatgtcatcccagcactggcagcggcaaaagtgaacttagtgaataatgaactgacacaaccgctatttatcgccgcgaaaaataaatcgcccgtggaagcgacattgcgattcgcgtttggtggctcattctctacgacattagatgttgcccctgcagagtatggaaagttttcttttggtgagggccagtttacttttaatggtgatggtagttcattgtctaacctggatattgaaggcaaagtcgaagatattgttctgcaattatcaccaatgaacaaagtaacggcaaaaagttttaccattgattctctggcgcgattagaagaaaagaaatttccggttggtgaaagcgagtcgaaatttaatcagattaacattatcaatcacggggaagacgttgcccaaatcgatgctttcgttgcaaaaaccatgctggatcgcgttaaagacaaagattatatcaatgtcaatctgacctacgaacttgataagttaacaaaagggaatcagcaactcggtagtggtgagtggtcattgattgctgaatctattgatccctcagcggtgcgccaatttatcatccagtataacattgcaatgcagaagcagcttgctgcacaccctgagttagcaaacgatgaagttgctctgcaagaagtgaatgctgcattgttcaaagagtatttaccgttattacaaaaaagtgagccgaccattaaacaaccggtaaaatggaagaacgcactcggcgaactaaatgccaatctggatatcagtattgccgacccagccaaatcttcatcatccacaaacaaagatattaaatcgctcaattttgatgtgaagttaccgcttaatgtcgtcacagaaaccgcaaaacagcttaatttatctgaaggaatggatgcggaaaaagcgcaaaagcgggctgataaacaaatcagcgggatgatgaccttaggtcagatgtttcagttaatcacgattgacaacaataccgcctcgctgcaactgcgttatacaccgggtaaagttgtttttaacggacaggagatgagcgaagaagaatttatgtctcgtgccggacgttttgttcattaaaatactcactcgcctctgctcattcagaggcgagcaaaatttacttgtcctgccgctgtgatgacatcaacgacgtcagaagtcggtctttttcctgccacagtgagttcagccattgctgaaaatggcgcttaaagcttttgtcattgatgtagtcgccatgtaactcatcggcaataggctgtaaatccacatgaacgacaattcgcgtcagtttaccgcttaacatatcgaagaacggctgacggttattgtccggataacacagcgtaacattaagcagtttatcgaattgtttacccagtacatttagcgccatcgcaatgcctgccgcctttggtggcaacaagttttgaaaagtggagtgggtttgctgatgtttttcttgcgtgaaacgggagccttcaacgaaattgacaatggtggtgggatgcaggcgaaacttttcacaagaacgccgagtggtttcaacatctttaccacgtcgctccggatgacgtaataaataagcgcgggaataacgcttcataaacggcatatccagcgcccagcacgccaggccaagaaatggcacccaggccagctgttgcttgaggaaatatttattcatcggaatgtgcttacgaaacagcacgcacagtacgacaatatctgcccaactacggtggttacaaataagcagataccagttcttcttacttaacccttccagcccgtgaacttcccattgcaggtgtgggttcagatgcagtaataccgccagaccttcacaccagcaatacatcataaaatcacaaaaacgcgaaacctttcgccaaatgactggcacaggtagcaatagttttacaatcccggcaatgatgatcgggacggaacaaaaaatagtgaccaaaatggtcaatacgatactcagcaaaagggttatcgcagcgagtattctcgtcataatgaatttattcaaaaggttagccatagacagtgcgctaaagaagcgcaaggcgcagattttagcagaaaacgacccaaataacggatgatccttaaggagaaaaataattcatatctatccacattagaaaaaatcccattatctcaattattagggatggctttattttaactacatgaaaaacaaagacaaacatcatactgtaaaaagcatgataataaattaaaagcgatgtaaataatttatgcacaaagttatccacatgacgatttgcgagcgatccagaagatctacaaaagattttcacgaaaagcggtgaaaaactcatgtttttatcctgtctgtggcatcctttacccataatctgataaacaggcacggacattatggttcagatcccccaaaatccacttatccttgtagatggttcatcttatctttatcgcgcatatcacgcgtttcccccgctgactaacagcgcaggcgagccgaccggtgcgatgtatggtgtcctcaacatgctgcgcagtctgatcatgcaatataaaccgacgcatgcagcggtggtctttgacgccaagggaaaaacctttcgtgatgaactgtttgaacattacaaatcacatcgcccgccaatgccggacgatctgcgagcacaaatcgaacctctgcacgcgatggttaaagcgatgggactgccgctgctggcggtttctggcgtagaagcggacgacgttatcggtactctggcgcgcgaagccgaaaaagccgggcgtccggtgctgatcagcactggcgataaagatatggcgcagctggtgacgccaaatattacgcttatcaataccatgacgaataccatcctcggaccggaagaggtggtgaataagtacggcgtgccgccagaactgatcatcgatttcctggcgctgatgggtgactcctccgataacatccctggcgtaccgggcgtcggtgaaaaaaccgcgcaggcattgctgcaaggtctgggcgggctggatacgctgtatgccgagccagaaaaaattgctgggttgagcttccgtggcgcgaaaacaatggcagcgaagctcgagcaaaacaaagaagttgcttatctctcataccagctggcgacgattaaaaccgacgttgaactggagctgacctgtgaacaactggaagtgcagcaaccggcagcggaagagttgttggggctgttcaaaaagtatgagttcaaacgctggactgctgatgtcgaagcgggcaaatggttacaggccaaaggggcaaaaccagccgcgaagccgcaggaaaccagtgttgcagacgaagcgccagaagtgacggcaacggtgatttcttatgacaactacgtcaccatccttgatgaagaaacactgaaagcgtggattgcgaagctggaaaaagcgccggtatttgcatttgataccgaaaccgacagccttgataacatctctgctaacctggtcgggctttcttttgctatcgagccaagcgtagcggcatatattccggttgctcatgattatcttgatgcgcccgatcaaatctctcgcgagcgtgcactcgagttgctaaaaccgctgctggaagatgaaaaggcgctgaaggtcgggcaaaacctgaaatacgatcgcggtattctggcgaattacggcattgagctgcgtgggattgcgtttgataccatgctggagtcctacattctcaatagcgttgccgggcgtcacgatatggacagcctcgcggaacgttggttgaagcacaaaaccatcacttttgaagagattgcgggtaaaggcaaaaatcaactgacctttaaccagattgccctcgaagaggccggacgttacgccgccgaagatgctgatgtcaccttgcagttgcatctgaaaatgtggccggacctgcaaaaacacaaagggccgttgaacgtcttcgagaatatcgaaatgccgctggtgccggtgctttcacgcattgaacgtaacggtgtgaagatcgatccgaaagtgctgcacaatcattctgaagagctcaccttgcgtctggctgagctggaaaagaaagcgcatgaaattgcaggtgaagaatttaacctttcttccaccaagcagttgcaaaccattctgtttgaaaaacagggtattaaaccgctgaagaaaacgccgggtggcgcgccgtcaacgtcggaagaggtactggaagaactggcgctggactatccgttgccaaaagtgattctggagtatcgtggtctggcgaagctgaaatcgacctacaccgacaagctgccgctgatgatcaacccgaaaaccgggcgtgtgcatacctcttatcaccaggcagtaactgcaacgggacgtttatcgtcaaccgatcctaacctgcaaaacattccggtgcgtaacgaagaaggtcgtcgtatccgccaggcgtttattgcgccagaggattatgtgattgtctcagcggactactcgcagattgaactgcgcattatggcgcatctctcgcgtgacaaaggcttgctgaccgcattcgcggaaggaaaagatatccaccgggcaacggcggcagaagtgtttggtttgccactggaaaccgtcaccagcgagcaacgccgtagcgcgaaagcgatcaactttggtctgatttatggcatgagtgctttcggtctggcgcggcaattgaacattccacgtaaagaagcgcagaagtacatggacctttacttcgaacgctaccctggcgtgctggagtatatggaacgcacccgtgctcaggcgaaagagcagggctacgttgaaacgctggacggacgccgtctgtatctgccggatatcaaatccagcaatggtgctcgtcgtgcagcggctgaacgtgcagccattaacgcgccaatgcagggaaccgccgccgacattatcaaacgggcgatgattgccgttgatgcgtggttacaggctgagcaaccgcgtgtacgtatgatcatgcaggtacacgatgaactggtatttgaagttcataaagatgatgttgatgccgtcgcgaagcagattcatcaactgatggaaaactgtacccgtctggatgtgccgttgctggtggaagtggggagtggcgaaaactgggatcaggcgcactaagattcgcctgaacatgcccttttttcgtaagtaagcaacataagctgtcacgttttgtgatggctattagaaattcctatgcaacaactgaaaaaaattacaaaaagtgctttctgaactgaacaaaaaagagtaaagttagtcgcgtagggtacagaggtaagatgttctatctttcagaccttttacttcacgtaatcggatttggctgaatattttagccgccccagtcagtaatgactggggcgttttttattgggcgaaagaaaagatccgtaatgcctgatgcgctatgtttatcaggccaacggtagaattgtaatctattgaatttacgggccggatacgccacatccggcacaagcattaaggcaagaaaattattcgccgtcctgcgtttcttctacaggctgcatctcgctaaaccaggtatccagtttctgccgcagcttgtccacgccttgtttcttcaacgaagaaaacgtttcaacctgcacatcaccgttaaacgccagtacagcttcacgcaccatattcaattgcgctttacgtgcgccgcttgccagtttgtccgctttggtcagcagcaccagaacggcgatattgctgtctaccgcccactcaatcatctgctgatccaaatctttcagcggatggcgaatatccattagcaccaccagaccttgcaggctctgacgtttttctaggtattcgccgagcgcacgctgccatttgcgcttcatctcttccgggacttccgcataaccgtacccaggcaagtcaaccagacgcttgccgtcagccacttcaaacaggttgataagctgggtgcgccctggggtttttgaggtacgagccaggcttttctggttagtcagcgtgttcagcgcgctggatttacctgcgttggaacggcctgcaaaagccacttcaattccggtatcggaaggtaggtggcgaatatcaggcgcactcatcacaaaatgcgtctgttgataattcaaattagtcaaagcggtcgtctccgtcagtcaaagctttgtggcgattatacctgaaccataataaaaggcggatttttcggcgtgagcgttgtaagtaaaagccatacgctttgtgagacattgccgatagtctttatgcgaaatagcagagaaaattctgcgatgcatgtcaaataagctatataaatcagtgaattgcttttatataaaactctgaaaatgtgcaaatactgatggcggttgattgtttgtttaaagcaaaggcgtaaagtagcacccatagagcgaggacgctaacaggaacaatgactcaggatgagggtcaggagcgccaggaggcgaagacagaggattgtcaggaagacaaacgtccggagacgtaattaaacggaaatggaatcaacacggattgttccggctaaaggaaaaacagggtgtgttggcggcctgcaaggattgtaagacccgttaagggttatgagtcaggaaaaaaggcgacagagtaatctgtcgccttttttctttgcttgctttctgttagattccgccgcaaatctatactgaataaaacggctaaaagacgaaccattatgaaaccatcatcttcaaactcacgcagcaaaggtcatgcaaaagcgcgtcgaaaaacacgcgaggagctggatcaggaagctcgtgatcgcaagcgtcagaaaaaacgtcgtggtcatgcgccgggcagccgcgcagcgggcggaaacaccacgtcaggcagcaaaggccagaacgcaccaaaagatccacgtattggcagtaaaacccctattccattgggcgtgattgaaaaagtcaccaaacagcacaaaccgaagagtgagaaacctatgctttcaccgcaggcggagttggaattactggaaacggatgagcgtctggatgcgctgctggaacgtctggaagcaggcgaaaccctgagcgccgaagagcaatcctgggtggatgctaaactggatcgtattgatgagttgatgcagaaactcggcctctcttatgacgatgacgaagaagaggaagaagacgagaagcaagaagacatgatgcgtctgctgcggggcaactaacggattgccgccgtgggccttcccgttctgctgataacccttccggttatatgttatctggtgtggttattcgttaaactacagcggttgtcgcggcgacaaaagtggctgcgcaaccggctgatgacccgaaacgggcatccgccggtacgccgtagccgccagagacgccatcggaaggagtgagcatgtctgtacagcaaatcgactgggatctggccctgatccagaaatataactattccgggccacgatacacctcgtacccgaccgcgctggagttttcagaagacttcggcgaacaggcgtttttacaagccgtggcgcgctatcctgagcgtccattatctctctacgtacatatcccgttctgccataagctttgttacttctgcggttgcaataagattgttactcgccagcagcacaaggccgatcagtatctggacgcgctggagcaagaaatcgtccatcgtgcaccgctgttcgccgggcgtcacgtcagccaattgcactggggcggcggaacgccgacgtatctgaataaagcgcaaatcagccgcctgatgaagctgctgcgcgaaaacttccagttcaatgccgatgcggagatttcgatcgaagtcgatccgcgggaaatcgaactggatgtactcgatcatttacgcgccgaaggctttaatcgcctgagcatgggcgtgcaggacttcaacaaagaagtgcaacgtctggttaaccgcgagcaggatgaagagttcatctttgcactgcttaaccatgcgcgtgagattggttttacctccaccaacatcgacctgatttacggcctgccgaaacagacgccggagagtttcgcctttaccctgaaacgcgtggcggagctaaaccctgaccgtctgagcgtctttaactatgcgcatctgccgaccatttttgctgctcagcgcaaaataaaagatgctgacctgccgagtccgcagcaaaaactcgatatcttgcaggaaaccatcgccttcctgacacaatcgggctatcagtttatcggtatggatcactttgcccgcccggatgacgagctggcggtggcccagcgtgaaggcgtgctgcatcgtaacttccagggctacaccactcagggcgataccgatctgctggggatgggcgtttccgccatcagcatgattggcgactgctacgcgcagaaccagaaagagttgaagcagtactatcagcaagtggatgaacaaggcaatgcgctgtggcgtggtattgcgctaacgcgtgatgactgtattcgccgcgatgtgattaagtcgctcatctgcaacttccgtctggattacgcccctattgagaaacagtgggatttgcacttcgctgattactttgcggaagatctcaagctgctcgccccgttagcaaaagatgggctggtggatgtggatgagaagggaatacaggtgacggcgaaaggtcgcttgctgatccgcaacatttgcatgtgctttgatacctatctgcgccagaaagcgcggatgcagcagttctcacgggtgatttaaatagtgaatggcgcttcgtttacaaagtagaaaacgaaagcgccatcaatgtgctgagaacaagattgcctgatgcgctacgcttatcaggcctacaaaacctgttgaaaatattgcttttgtaggccggataaggcgttcacgccgcatccggcatgaacaaagagcacttcatcagcaatctgaaactcaactaaacagcccaatcattgcggcacacagcacggcagcaacggcagtttgcggtgtgtggctgtcaactgcgccactcgataccagattaattattgattccagcataatgactctccccgttttccgggcaagatcatactgaacttatcggaacagtaaagcgtaaaataccagcaatttgcgctcaataatcaatctttacacacacgccgtgaatcactccatccccagctcttttaacttacgcgtcagggtgttgcggccccagccgagtagccgcgccgcttcctgtttatgcccctgcgtatgtcgcaacgcggtcgtcagtaacgtccgctccagctctggctgcgcttcggaaagcagattttgatgaccggaacgcagcgctctgtctgcccactgcgcaagaagcgtcgcccagctgtccggttgcatttgcgaagtactctccgcaaccgttgattcaaacagttcgccgggcaaatcctgaatcaacacttcctgcccggcggccatcaccgttagccagcggcaggtgttttccagctggcgcacgttgcctggccacgccagacgcgtcagagcagcttcggtttccggatgcagtaacttcgcttctacgcccagttcgcgcgcggcaacctgtaaaaaatggcgcgccagacggggaatatcttcccgacgttcgcgcagcggcggcagatgaacgcggataacgttcaggcggtggaacagatcctcacggaacttaccttcctgcactcgctgttcgagattctggtgagtggcagcgataatccgcacatccactttcaccggcgcatagccgccaacgcggtaaaactgaccgtctgccagcacgcgcagcaaacgcgtctgcacatccagcggcatatcaccaatttcgtcgaggaataatgtaccgccatcggcctgttcaaaacgcccctgacgaatggtattcgcgccagtaaacgcgcctttctcgtggccaaacagttctgattcgatcaaatcttttgggatagctgccatattcagcgcgataaacggcgctttggcgcgcggactgtggcgatgcagggcatgagcgaccagttctttaccggtgccggattcgccgttaatcagcacgctaatagaagaacgcgaaagccgaccgataatacggaacacgtcctgcatggctggcgcttcgccgatgatatcggtcgttgggccgttaagctgaatattacgcggctgctgctgttcctggtaatgactgatggcgcgctcaaccagcgcgacggcttcgtcgatatcaaacggtttgggcagataatcaaacgccccttgttgataggcgctgacggcagcatccagatcggaatgtgcggtcataatgatgaccggaagcatcggatggcgctgtttaatctgcttgagcagtgccagcccgtccattcccggcatacggatatctgaaagcagcacatccggcgttttgctcgccagcgcctccagtacctccgcgccgttctcaaatgtcgtacaggttaaacccgctccagcgagcgcacgttcaagcacccaacggatggaactatcgtcatcgactacccagactatccctcgttgcataaacgtcacctttatttcctgataggcaggtaaaccgagaactcggtatgccctggccaactggtaaattcaattttgcctgaatgctgatcaatcaaattacgagcgatggataagccaagcccggtgccaccttcgcggccgctgaccatcgggtaaaacagcgtatcctgcaaatgaggcggaatgcctggcccgttatcttccacatcaatccgcgccgccagccggtagcgttcgccgtgtaaggtcagttgaaacgcggtgcgggtacgcagaatgatttcaccgccttccggccccagcgcctgtagcgcattgcgcacaatattcagcaagacctgttcaatttgatccgggtcgtgcgccagttccggcaggctgggatcgtaatcacgaatcaaccgcacgttgtccggcagttccatcgacaccagcgttaccacgcgttcagctactttgtgaatactttcggtaacgcgcgtaccgggcagctgcggccccaacagacggtcgaccagatttcgcagccggtccgcctgttcgataatcactttggtatattcgagtagtgatgggtcaggtaacgctttgctgagcagctgcgccgcgccacgtaaaccgccaagcggatttttaatctcatgtgccaggccgcgcactaaatcacgggcagcaacctgctgggcgtgctgtagctgttcctgacttaagcggcgctggttatccatcggagccatctccagcaggatcatgccgtccggcatacgctgggccgtcacagaaaggatatgcgagcgcccgtcgatgaccagcgtcacttcgttatcggtaaaaccttgccccgcctccagactttcttgcatcagctcgatatttaatgagaagtagctcaacagttccggtaacggtgtaccaaacaatttgcgggagctttgggcgagcagttgttgcgcggcggggttggcgtaatggatcgccaggttgtcatcgattaacaaaatactgttaatcagcgagttgaggatctgcccagcatcgggctgcgtgcctgttgccataaagcagtctcctgaacaggttgcaccattttagtgcattatagctttttacggataaaaagcgcgaagcatcagagaattgacggagaaaaaagcccatgcagagatgggctacagatagctgacaaacttcacgttggagagcgactcacctgctccggcctaccacatcatcaccgtgtaggccggataagacgcatttgcgtcgcatccggcgtgatgtgcttgccaccgatcccaggcctgccagagacaggcgaaaagtttccacggcaactaaaacacttagacgctgtagtacagctcaaactctaccggatgcggagtcatacgcacgcggtcatcttcttcgcgacgcagtgcgatgtacgcatcaattgcttcgtcagtgaacacgccaccggctttcaggaactcgcggtccagatccagttcgttcagtgcttcttccagagagcctgcaacctgtgggatctctttcgcttcttctggcggcaggtcatacaggtttttgtccatggcttcgcccggatggatcttgttcttgataccatcaagaccggccatcagcagggcagcaaagcacaggtacgggttagctgccggatccgggaaacgtacttcgatacgacgtgctttcggagaagaaaccaccggaatacggatagacgcagaacggttacgcgcagagtaagccagcattaccggtgcttcatagcccgggaccagacgcttataagagttggtggtcgggtttgccagggcgttaatcgctttagcgtgtttgattacgccgccaatgtagtacagcgcctgctcagacagacctgcgtatttgtcgcctgcgaacaggttaacgccgtttttagacagagacatgtggcagtgcataccggagccgttatcaccgaacatcggttttggcataaaggtcgcggttttaccgaagcggtgcgctacgttgtgcacaacatatttgtagatctgaatttcgtcagcttttttggtcatggtattgaagcgggtagccacttcgttctgaccagcagtcgctacttcgtggtgatgggcttcaaccaccagacccatctgttccatcaccagacacatttcagaacgaatatcctgagcagagtctaccggcggaaccgggaagtaaccgcctttcactgccggacggtgacctttgttaccaccttcgtattgggtggaggagttccatgcgccttcgatatcgtcgatagcaacgtgggaaccagagatagatgatccgaaacggatgtcatcgaacaggaagaattcaggttctggcccgaacagtacggtgtcggcaatgccagtggaacgcaggtaatcttcggcgcgcttcgcaatagagcgcgggtcacggtcatagccttgcagggtgccaggttcaaggatgtcgcaacggataatcagggtggagtcggcgaagaacgggtcaatcactgcggtggatgcgtctggcatcagcaccatgtcggattcgttaatgcctttccagccgccaatcgaggagccgtcaaacattttgccttcttcgaagaattcagcattcacctgatgagcagggatagtgacgtgctgttctttacctttagtatcggtgaagcgcaaatcaacaaacttcacttcgtgctcgttcagcatcgtcagtacgtgttcagcggacatactttaactctcctggattggtcatggtcgtcgtggtaacgaaatctgcaattattttggccgtgtcgccgtaaaaaagataaagcgaaatctgtgccaacttttaaattgcccctaaaaggcgttatcatgcgcaccatcgtgcaaaagggctgcaccacgatgtgaatgttgcaccaatatagtgcttcaatggaaacattaagcaccatgttggtgcaatgacctttggataaccctttttatgctccgtgaaagcgatcacaaagggactctgcaatacttgtttgcggaggatgtttgtgatcctgttttgtagtgcgattaatccgtgtacaataacgcgctatttctaatgcctgaggcaaagttgtgatcgaaaaattgcgtaatatcgccatcatcgcgcacgtagaccatggtaaaaccaccctggtagacaagctgctccaacaatccggtacgttcgactctcgtgccgaaacccaagagcgcgtgatggactccaacgatttggagaaagagcgtgggattaccatcctcgcgaaaaacaccgctatcaaatggaatgattaccgtatcaacatcgttgataccccggggcacgccgacttcggtggtgaagttgaacgtgtaatgtccatggtagactcagtgctgctggtggttgacgcatttgacggcccgatgccgcaaacgcgcttcgtaaccaaaaaagcgtttgcttacggcctgaagccgattgttgttatcaacaaagttgaccgccctggcgcgcgtcctgattgggttgtggatcaggtattcgatctgttcgttaacctcgacgcgaccgacgagcagctggacttcccgatcgtttacgcttctgcgctgaacggtatcgcgggtctggaccacgaagatatggcggaagacatgaccccgctgtaccaggcgattgttgaccacgttcctgcgccggacgttgaccttgacggtccgttccagatgcagatttctcagctcgattacaacagctatgttggcgttatcggcattggccgcatcaagcgcggtaaagtgaagccgaaccagcaggtcactatcatcgatagcgaaggcaaaacccgcaacgcgaaagtcggtaaagtgctgggccacctcggtctggaacgtatcgaaaccgatctggcggaagctggcgatatcgttgcgatcacgggccttggcgaactgaacatttctgacaccgtttgcgacacgcaaaacgttgaagcgctgccggcactctccgttgatgagccgaccgtttctatgttcttctgcgttaacacctcgccgttctgcggtaaagaaggtaagttcgtaacgtctcgtcagatcctggatcgtctgaacaaagaactggtacacaacgttgcgctgcgcgtagaagaaaccgaagacgccgatgcgttccgcgtttctggtcgtggcgaactgcacctgtctgttctgatcgaaaacatgcgtcgtgaaggtttcgaactggcggtatcccgtccgaaagttatcttccgtgaaatcgacggtcgtaaacaagagccatatgaaaacgtgactctggacgttgaagaacagcatcagggttctgtaatgcaggcgctgggcgaacgtaaaggcgacctgaaaaacatgaatccagacggtaaaggccgcgtacgtctcgactacgtgatcccaagccgtggtctgattggcttccgttctgagttcatgaccatgacttccggtactggtctgctgtactccaccttcagccactacgacgacgtacgtccgggtgaagtgggtcagcgtcagaacggcgtactgatctctaacggtcagggtaaagcggtcgcgttcgcgctgttcggtctgcaggatcgcggtaagctgttcctcggtcacggtgcagaagtttacgaaggtcagattatcggtattcatagccgctctaacgacctgactgtaaactgcctgaccggtaagaaactgaccaacatgcgtgcttccggtactgacgaagccgttgttctggttccgcctatccgcatgactctggaacaagctctggagttcatcgatgatgacgaactggtagaagtgaccccgacctctatccgtattcgtaaacgtcacctgacggaaaacgatcgtcgtcgcgccaaccgcgcaccgaaagacgattaatttcgttttttagttataaaaaacctgccatcgctggcaggttttttttacctgtcgtgagcgcacaccaatgcgagtatctcccttataagtctgggattacgtcaatagagagctttgtcacaattatctgcaaagtcatacgccgttaattgctttcttttttggcgtaagcgtaagatgcctcatctggtttaaaccaaaaggattaaacaatggcggagaatcaatccaccgtagaaaatgcaaaagagaaactggatcggtggttgaaagatggcatcaccacgccgggtggaaaactcccttcagaaagagagctgggagaactgctgggcattaaacgtatgacgctgcgccaggcgttgttgaacctcgaggcagaatccaaaatcttccgtaaggatcgtaaggggtggttcgtgacccagccgcgatttaattacagtccggagttgtcggcgagctttcagcgggccgcaattgagcaaggacgagagccttcctgggggtttaccgagaaaaaccgtaccagcgatattcccgagacgctcgcgccactgattgcagtgacaccatcaactgaactctatcgcatcaccggctggggggcgctggaaggacataaagttttctatcacgaaacatatattaatcctgaagttgctccgggttttattgaacaacttgaaaaccactcattttctgcagtctgggaaaagtgctaccaaaaagagacggtagtaaaaaaattgattttcaaacccgtcagaatgccgggcgatatcagcaagtatcttggcggttctgcgggtatgccagcgatcttaattgaaaagcatcgcgccgaccagcaaggcaatattgtccagatagatattgaatattggcgatttgaggccgtagacctcatcattaatctgtaggtgttttatggtgacaataaataacgcaagaaagattctacaacgtgtcgacactcttcctctttatttacatgcttatgcctttcatttaaatatgcggctggaaagagtgttgcctgctgatttacttgatatcgcaagtgaaaataatctacgtggcgtcaaaatccatgttctggatggcgagcgtttttctcttggtaatatggacgataaagaactctctgcctttggggataaagcccgccgtctgaaccttgatattcatattgaaaccagcgcttcagataaggcatctattgacgaagccgtcgccattgcgttgaaaactggggcatcgtccgtacgtttttatccacgttatgaaggtaatttgcgcgacgtattatcgatcatcgctaacgacattgcctatgtacgggaaacgtatcaggacagcggcctgacttttacgatcgaacagcatgaagatttaaaaagccatgagctggtgtcgctggtcaaagaaagtgagatggaatctctttccttactgtttgattttgcgaacatgatcaatgcaaatgagcatcccatcgacgctttaaaaacgatggcgccgcatattacccaggtccatatcaaagatgccttgatcgttaaagaaccgggtggcctgggtcataaagcctgtatttcaggtcagggtgatatgccgttcaaagcgttattaacgcaccttatatgcctgggtgatgatgagccgcaggtgacggcatatggcctggaagaagaggttgattactatgcgccggcgttccgctttgaagacgaagatgataatccgtggatcccttatcgccagatgagtgaaacaccattgccagaaaatcatttactggatgcgcggttacgtaaagaaaaagaagatgcaattaatcagataaatcatgtgcgtaacgtactacaacaaatcaaacaagaggcaaaccatcttctgaaccactaataagttttaactcatacgcagttaataaaaccattccatatgaatggtcggtatcttattgcctttaaaacagtgattttaaaaatcgcttaggggatgttatgctcacaaaaaagaaatgggcgttatttagtctattaacattgtgtggcggtacaatttataaattaccgtcgctgaaagatgcgttttatatcccgatgcaggaatatttccatttgaccaatggtcaaattggtaatgctatgtcggtaaactcatttgtcacgacagtgggtttttttctgtctatttattttgccgataaactaccgcgcagatacaccatgtcattctcactcattgcgacaggattactgggtgtttatttgacgacaatgccggggtattggggcatcctctttgtctgggcgctatttggcgttacttgcgacatgatgaactggccggtcttgctcaagtcggtaagtcgattgggcaatagcgaacaacaaggtcggttgtttggcttcttcgaaacagggcgtggcattgtcgataccgtggtggcattttctgcgttggcagtatttacctggtttggcagtggcttattgggttttaaagcaggcatctggttctattctcttattgtgattgccgtaggcattattattttctttgtcctgaatgacaaagaagaggcaccgtccgttgaggtgaaaaaagaagacggagcatcgcaaaacaccagtatgacctcggtgctgagagacaaaaccatctggcttatcgcttttaacgtcttcttcgtttacgcggtttactgtggcctgacattcttcattccattcctgaaaaacatctatctattgcccgttgcgctggtgggggcttacggcatcattaaccaatactgtctgaaaatgattggtggaccgattggtggcatgatttcagataagatcctgaaatcgccgagtaaatatctatgctacacctttatcatcagtaccgctgcgctcgtactgttgattatgctgccgcacgaaagtatgccggtctatttagggatggcatgtacgctgggctttggcgcgatagtctttacacagcgagccgtattttttgcacctatcggcgaagcaaaaattgctgaaaataaaacaggcgcggcgatggcgttgggtagctttattggttacgctccggcgatgttctgcttcagtctgtatggctacattctggatttaaatccggggattattggctacaaaatcgtgtttggcattatggcctgcttcgcattctgtggtgcggtggtttccgtaatgctggttaagcgtattagccaacgtaagaaagagatgctggcggctgaagcttaattaatggccggatgtgcttaatccggccaacgaaaaccgtatcaaccgtaggccgcatccggcaaaataaaatccgctgaatccccagcggatttttcgaagtttcaatttcaggaaacttcctgctcggcaaccaccagttcaacattctcttcacttaacaactggcagaaagaattgggaggcggggcatctgtaaaaaagccctgacattccgtgcattgccaattgaaacggcagcagacgcggcaaacttcgtatgatcggccactaacaatgtattccgcgcatgtttaatcatcgttctcgcgactaacgcttcatttacatcaaattccagtagggtgccgtcatgttcaatggcacctatactggtgattaaataatctgcgcggaagccttcaataaaatccacggctcctgggccgataatcccgccgttatgagcgcgtaaagtgcctcccggcaccatcacttcaatatcctgattcttataaagaatctgtgccacacgtaggctgttagtgataatgcgtaaatcacgccggttgagtaatgccctggcaacggcttctacggttgtaccgatggtgataaagacggtacagcgttcgggaaggtaatcggcgactgcctcagcgatcgcccgtttctcggcggtgagcgaaagttcccgttgctcaaaagcggtattcatgacgctggagacgcgcccggcccctccatgatgacgggtgatcaagccctgctcactgagttttcggatatcccggcgcacggtttgcgttgaaacatccagcagttgtgccagttcttcaatattcatataaccgcgttctgcgattagatgaacgagttggtcatggcgtggattacctgtcacttcgatgatactcatgaatactcccttgcccctcctcggtagatgtttaccattttacgcataaagtgacaaaaatgattcggtttgctcacgattaggaatgccggcccgaccgccaggctgggtacatttcatcgcggcaaccgcactggcaaaacgaatagcctcttttgttggcattttttctgccaacgctactgcgagtgcgccgtgaaaaacatcgcctgctccagtggtatcaaccacattgacagaaaatgcctcctgttgacacaaatgaccatcttcaatccacaacgatccttcagaacccagcgtaacatacactttacctgctgtttgtgtcgttgcctggaacaaaccttcttcaggtgactgcaggccagtcatgcgtttcagccctggtgttgagaacacggcgtgatcggcaagcgcgacaagtggagaaatatcctgcggtgtcatatcggcgtctaaaagcgttgtcacacccgcaagacgcgctagcgagaatgctttttcagtaccgctatgccagcgaacatcggccagaatcagatcataacgagagaaatcgatcgcttctaaccattcggcatcagtaccgagatcgggacttggataattaacgataatccgttcgccatgctgatcaacgaggatcgctgattgcgatgaacgggcgttaggatatcggcggcaaaatgcggtattgacgccccaaccctcaagttctgcaagtaaggtatttccacaactgtcatcgccgacgcgaccgatgaaatcaacctctacgccaagctttgcgattgcaacagcggctgttgctgccgggccgccaccaatctcaagataatgatttgcctgatattttccgccgccatccggcagagtgagcaaagaataaatcctgtcctgaactgtgatacccacgcatgcaattttggtcatatttgtcttgtcctgtttaattttgtcgtcttcggtcaatttaaatgacgcaaatgatcaaattagtgatgcgtgtcgtgtttttgaacataaattacaaatatgctcaaaaacagacgaaaacgaattttcaattgtcattattttgtcaatgtcagacaggagagtattcatggcaaccattgcatttctcgggctggggcagatgggtagcccaatggctaacaatctattgcaaaaagggcattcattgcaggtatttgatgtcaatgcacaggccgtcgatgcgctagttacgcagggggccactgcggcacaaaccccagcggaagcggcagcaggcgctgaatttatcatcactatgcttcccaatggtgacattgttcgacaggttctgttgggggaaaaaggcgtctgtgaggctgtttcatctgacgcgttattgattgatatgtcgactattcatcccttacagaccgatgcattaatacgggagttacaagaaaaaggcatcagtatgatggacgcccccgtgggcagaacgtccgtgaatgcgattgatggcacattgctgattttagcgggtggcactgatgagcagattgcacgtgcacgcccgattctcatgtgcatgggtaatgagctggtcgaggctggcggcccaggaatggggatccgcgtgaagctaattaacaactatatgagcattgcgcttaatgcgctgtcctccgaggccgctgtgttatgtgagtcactgggattaaatcttgatgtcgcaattaaggtgatgagtggtacggcagcagggaaaggacattttacgaccacctggccttgcaaagtgctgaaaggcgatctttcacccgccttcatggtggatctggcgttgaaagatctgcgtattgcagttgacgtcgctcgggagacgggggcaccgctcaatatggggattgcagcagaaagttattacgctgcagcaagtcaagacggcaaagggcggcaggactggagtgccctgctaaatcaggttcgccagcaggctggtctttaattttatctattaacaggagtttctatgtcatcccacttcaccccatttacgctgaaagatatctcccgcccaggtggtggatttgccatgttagctgtcgatcagcgtgaggccatgcgcttgatgtttgcggcagcagggcagccaaaacccatcgccgacagtgtactcaccgattttaaagttgccgcgacccgaatcctttctccttatgcttctgccgttctggcggataaacaattttgtcttgagcaaatagtcgagcagggcgctgttgctaattcttgcggcctgattgtcgctgccgatctttttatcccaggtaatggcatcccggttgatagcgttgaaatagatatgtccgtcgacccgcataaagcccgtgaaatgggggctaaggcaatgaaattacttgtactctggcgtgaagatgaacccgcagaggaacgtctggcaatggttgataaatttgttcgtcgctgccgtagtgccgggctggttagcattattgaacctgtggtgcgtccacctcgtcgcggttgggactttgatcgtgaaagcgccattgttgccgccgccgcagagcttggtggaacagaggctgatctttacaaagccgagatgccattagggggcaaaggcgatgaaaaaaccttacttgccgcctgtcagcaacttaacgatcagatgaagatgccgtgggtaattctttcttctggcgttgatgccgatatttttggccgtgcagtaagtattgccatgaaaggtggtgcgtcaggcttcctggctggacgagcggtttgggcgtcggttgttggtgcacaagatccacaaactatgctgcgcgatgtctctgttcctcgtttacaacggttggcagaaattgtcgatgaaggtatcgcgcaacgctaatcccctatggatatcgattctggagaataacaatggataaaattacccaggttttattttcagatattgggaaagtcaccactcaatatgttgaagtaccacaccaggaacttaaaccgcacgaagtgcggattgcgcctgtgttctatgggatatgcggttcggatctgcatgttctgaaaggcggtcatccgtttgctaaaccacctgtcgtccccggtcatgaaattgcagcgcgcgttacggaagttggcagcgacgttaaaaatgtacagccgggcgatcatgttgtggtcgatcccatcatggcttgcatggaatgccgagcctgcaaagcaggacgttttaatctttgtgaaccaccgcaggttgctggttttcgcgcaccgggctttgctcgctcacaacacattgttcctgcgcgtaattgccatgtcgcaccagcctctttaccgctaaaagtgttggcctttgccgaaccggcggcttgtgcccgtcactgcgttaaccgaatgccgaaagcttctctggaaagcgtactggtgattggtgccggaacgataggcttatccatcgtgcaggcactgcgcattatgggggcaggtaagattaccgtgattgaacctgacgctgccaaacgcgcgctggcgttaaagctgggcgcagcagaagtttgggcaccaggtgagctggccgcagatgtgcgatttacgggggcgattgatgtcgttgcagcgcaggccacgcttaacgatgcatgtacccgtgtatatgccggaggcaccgtcgtgtgcatgggcgtaccaagtgggccgcgtgaaataccattaccgatgatgcaacgtttcgagcgtgacttgctcaactctggcatgtacatccctgaagatttcgatgctgttatcgaatggctggcggatgggcggtttgataccagtgaactggttaccgatttatttgccattgaggatgcagcggcggcattcgaacgcgcgcagcaaaatgactccataaaggtcatgctgcaatttgcgccggaatgattttctaaatctctgtctggcgctgcgtcacgtcagcgccaccctacaacaattaaaaaggacactgcgatgagtcaaatcaccagtcctgcaacttattcaattagtcggccacaggacgtaattgatattgttaataagaactctgcaatcaacaccagtatcggcgttatttttattgctttgggcggcatattgattgatgcctaccaggcggcgatggtggggtttggtaataaatacattgccgctcaatttggcatttctccaggccttgccgcaaccgttaatgcgtcagtattaatcgccgcgttaattggcggtttattagcgaaccgagtaataaaccgctttgggcaaaagcgagcatttattattggcatggggctgtgcaccatcggggctgctgcggtagctattgcgcccagtatctggtgggtgctggtgtgccgcgtcatcatgggctttggtttaggcatcgacttccctttggcaaccaatgccgtggcagagcttcgtggttcaacgtcgaagaaaaccggaacgtcggtcaacctctggcaaatggcctggtatgtttcgacaactgttgtttatttggtgctcttgccgctgcttctgtcgggtatcgctgaagaacaattgtggcgttacggaatattcatcggagctatttttgcagtcatcttcatgattttgcgttacttctttattggtgaatccgcaatgtgggccgcacgcgtcgggcgttaccaggaagcgtgcgacattctgggaaaacgttatggtgttcaggctcgcgttgcggcatcgagtacaacagaagcgaaattctcggaaaaagcagagaataaatacagtggtggatatggcatcttatttaatgatcgttaccgcaaacgcaccattcttggctgtgtcgtggcaaccatgcaggcgtggcaatataacgccgtaggtgtttatcttcctcttacgttggcgggaataataagtggcgggcttactggtgcgttgacgggttctgccgtcgtgaatgccctttgtggggtgacaggcgggatgatcggctcgtttattctccaacgactgggtactcgccgacagtcgatgtatggatttgctgttgtgaccttagcattgctgtcgttaggcgcactggcaacgactaatccatggctgtctttagggttattgggatcaattattttcttccattcagcgggtcctggtgggctgggcatgaccattgccacactctcttatcctcccgctattcgccctactggggtcggatttgcccgcgctattatgcgcacaggggcaattgcaggactcattttctggccgatgctgtggggggcgttgaaaactgaagcgttttactggttggcaatcgtgccattcttggggttcctgacctgcgtattgattaattgggaaccactgggtgcaaatgttgatgctgaggatgcagaggttctggctgaattgaagaaataaattaatgcgcatcggcttaaaccgatgcgcattaattcaaactgcccacgtttagtggttcgtatcccagatttctcgcctaccaggagaggaaaattatgtctgaaaagttacccgcaccgcgtgaagggctttccggtaaagccatgagacgtgtcgttatgggcagtttcgcaggcgcgttaatggaatggtatgacttctttatttttggcacggcagcaggactggtatttgcaccgctgttttatccagacagcgatccttttataggtcttatagccgcctttgctacctttggcgttggttttttgacccgtcctttaggtggtatcgtctttggccattttggcgataaaattgggcgaaaaataacacttatctggacactggctattgtcggttgctccacatttttgattggttttattccgacgtatcaggaaattgggatctgggcaccgctcatattaatggcgctgcgtttaattcagggctttggtcttggtggcgagtatggcggagcggcattgatgaccatagaatcagcgcccgaatcccgacgcggatttttaggttcactcccgcaaacggctgcgtctgtgggtattatgctggcaaccggtatttttgctctctgtaaccattttcttacttcggagcagtttctctcctggggatggcgcattccgttttggctttctgcggtgatgttgatcgttgggctgtttatccgcctgcataccgaagaaacgctggattttcaaaagcaaaaaacgacgaataataaagaaaagtccgttcctccgttgattgaattattcaaaaaacatccacgaaatattttattggcactgggtgcgaggctggcggaaagtgtctcctctaatattattaacgcctttggtattgtctatatttccagccaattagcattgtcgcgagatattcccctgacgggtatgttgattgcctcggcgatcggtattttcagttgtccattggttggatggttatcagatcgtataggtcaaaaaagtctgtatttgtcgggagcaggattttgtgtcctgttcgcgtttcctttcttcttattactggatagcaaaagtacgctcatcatctggtgcagtatgatcctcggctacaacttaggtccgacgatgatgtttgccgtgcagccaacacttttcacccgcatgttcggtaccaaagtacgatataccggcctttcttttgcttatcaattttccgcgattcttggcggactaagcccccttatcgcctcaagtttgctggcgctagggggaggaaaaccgtggtatgtcgctctgtttttatttgctgtctcatttctttcctttgtttgcgtctggctgattgagccgaccgatgaacaagaaaccgcttcttaccgctacatcagggaacaatctcatgaaaactgaacgaaaaaacgagcattacctggcgctacaacaggcgtttgacgcgccatggcctgggcctgtaggagagttagtgacgctggaaaaaggcaatattcacctgcagatttatccgcatgatggtgccaggataacctcgttaaaggcatttggttctgaagtattacgccaatggcagccgcagcgcagagcttttcagtatggctgtttcccaatggtgccgtgggcagggcgactggggaatgcgacgctgaatgctggtgggcaatgttattctttacccgccaataaaccaccacatgcgttgcatggtatggcttgttactcaacgtgggaaatcatcgacaaaacagcagattccctgactttacgtatgcccctggcttcaccgtggccctggcaaggggaagtgattcagacttttttgctggagaacgatgcgctggttttgcaactggaagtccattcatatgccgatacattcccggcctccgcaggctggcatccgtggtttgcgaaaaagctgactccgcaaaatacagaatcgttgcaggtgctttttgatgcggactggcaagaagaagcgggtagtgatgaactgccaactggaaatcgtatctctcctcaagccggtccctgggatgactgttttggtttttatgacggggtgaaggttaagttactgtggcctggtaaactcgcgatgaccatgatctcttctgcaaacagtctggtggtatttgataaacagcccgatgccacctgtattaacccgctgactcaggcacctaacgcaataaatctaacgccggaattggtgacaccagataggccgctggtcatcgaaactcgttggcaatttacacctgaatcttaaccattcatctattgcgaaaaagccagtgaaattactctgctttttcgcaatcagcatcacaagattacccttattgccacatagccaaacccatcctttcccgctacagttaatttcttgtggcgcgaaaggaggcaaaaatgctctatatctttgatttaggtaatgtgattgtcgatatcgactttaaccgtgtgctgggagcctggagcgatttaacgcgtattccgctggcatcgcttaagaagagttttcatatgggggaggcgtttcatcagcatgagcgtggggaaattagcgacgaagcgttcgcagaggcgctgtgtcatgagatggctctaccgctaagctacgagcagttctctcacggctggcaggcggtgtttgttgcgctgcgcccggaagtgatcgccatcatgcataaactgcgtgagcaggggcatcgcgtggtggtgctttccaataccaaccgcctgcataccaccttctggccggaagaatacccggaaattcgtgatgctgctgaccatatctatctgtcgcaagatctggggatgcgcaaacctgaagcacgaatttaccagcatgttttgcaggcggaaggtttttcacccagcgatacggtctttttcgacgataacgccgataatatagaaggagccaatcagctgggcattaccagtattctggtgaaagataaaaccaccatcccggactatttcgcgaaggtgttatgctaaaaaccattcaggacaaagccaggcaccgtactcgtccactatgggcctggctaaaactactctggcaacgtattgatgaggacaacatgacaaccctggcaggtaaccttgcctatgtgtctttgctctcattagtgccgctggttgccgttgtttttgcgcttttcgccgcttttcccatgttttccgacgtcagcattcagttgcgtcactttatttttgccaactttctgcctgctactggcgatgttattcagcggtatatcgaacaatttgttgccaattccaacaagatgaccgccgttggcgcgtgcgggctgatcgtcaccgcattattgttgatgtactccatcgatagcgcgttgaataccatctggcgcagtaaacgagcgcgaccaaaaatttactcgtttgccgtgtactggatgattttaacgctggggccgctgctggcaggggccagtctggcgatcagttcctatttgctctccctgcgctgggcgagcgatctcaatactgtcatcgacaacgtgctgcgtatttttccgctgctgttgtcgtggatctccttctggttgctgtacagcattgttcctaccatccgcgtacctaaccgcgacgcgattgtcggcgcgtttgtcgctgcactcctgttcgaagcaggaaagaaaggtttcgcgctttatatcaccatgttcccgtcatatcagctcatttacggcgtgctggcggtgatccccattctctttgtttgggtctactggacatggtgtatcgtcttgcttggcgcggaaattactgtcactctcggggaataccgcaaactaaaacaagcagctgaacaagaagaagacgacgaaccatgattgcattaattcaacgcgtaacccgtgccagcgtcaccgtggagggagaagtgacgggcgaaattggcgcgggacttttggtgttattgggtgtcgaaaaggatgacgacgaacagaaagcaaaccgtctgtgcgagcgtgtgctcggctaccgcatctttagcgatgccgaaggcaagatgaatctcaacgtgcaacaggcgggcggcagtgtactggtggtttcccagtttaccctcgccgcagataccgaacgagggatgcgcccaagtttctccaaaggcgcatcaccggatcgcgcagaggcgttatatgactatttcgtcgaacgctgccgccagcaagagatgaacacgcaaacaggacgcttcgctgccgatatgcaggtatcgctggtcaatgatggccccgtgacattctggttgcaggtatgagccagcttccagggttgtcacgggaaacaagagagagtatcgctatgtatcaccttcgggttccacaaacagaagaagaattagagcgttactatcagtttcgctgggaaatgttgcgtaagcccctgcatcaaccaaaaggttcggaacgcgacgcgtgggatgcgatggcgcatcaccagatggtcgtcgacgagcagggtaatctggtggcggtaggccgactgtatattaatgccgacaatgaagcgtccattcgctttatggccgttcacccggacgtgcaggacaaagggttaggaacgctgatggcgatgaccctggagtcggtggcgcgtcaggaaggcgttaagcgcgtgacctgtagcgcccgtgaagacgcggtggagtttttcgccaagctggggtttgttaatcagggagaaatcaccacgccaaccaccacgccgattcgccattttttgatgattaagcccgtcgccactctggatgatattttgcatcgcggcgactggtgcgcgcagctgcaacaggcgtggtacgaacatatcccgcttagtgaaaaaatgggcgtgcgtattcaacaatataccgggcaaaaatttatcaccaccatgccggaaaccggcaatcagaatccgcaccatacgctgtttgccgggagtttattctcgctggcgacgctcaccggttgggggcttatctggctgatgctgcgcgaacgccatctcggcggaacgattattctggcggatgcgcatatccgctacagcaagccgattagcggtaaacctcatgcggtagccgaccttggtgccttaagcggcgatctcgaccgtctggcgcgcggacgaaaagcacgggtgcagatgcaagttgaaatctttggcgacgagacgccgggtgcagtgtttgaaggcacgtatatcgttctgcccgcgaagccatttggcccgtatgaagagggcgggaacgaagaagagtaggggcgttttacttgactgaaaaggttttcaatctgaaaaccttttcagggcccaggtccgaagttaccttcccgctctccaggcaacatcccgtagtgccgatcgcgcggcctcgctgataccacctaactgaaaaaatccgtggataacgccaaggtagcgttggcaggtgcattgcactccttgccctgtcatgcggtgatacaacgcttcaccttcatcgcaaagtgggtcgtattcagcggtaatgatatgtacaggtggcaagccattgaaatcatcgcgccaaagagggctggcttcaggatgcctgcgttcaatgcctggcagatacatctcaaagccgctcagtaaagtgtcgcgtgtgatgatgtaatcgtgaccattgcgtatgtagctttcgaaatgcgcagtcgcatcaagcataggataaattaagatgagttgtgccggttgccactcgccagcacgctttaatcgcaaagcagttaccagcgccagatgtccgcccgcactgtcaccggcaagagttatacgttgtttatcaacgccgagtcgttcggcgtgttgccagactatttctgcacctcgttgcgcatcatcatgggcggcggggaaagtatgttccggtgccagccgatactggacggcaataacccgacattgcccgtaataggctaactggcgcagctggttgtcgtgagttgcgaacccgccgctaacaaaacagccaccgtagtaataaattatcgtcgggagtaatgtcggggcattcagcggcgacactattcgtaaggtcatcccttcaagttcgatagtctgaatatctacccgcgtttctgtctcacccgcaaggacagcgctggcgatatagccctccctgcgctgcgcaatactttgttgacgcgatgaggggcgacccgcagcgataaacttttcgactaactctgcaattcctttttccagtgccatagtagaacttattttgctgtatgaatgtacagtcttatacacccgtttttgctggatggatacagggaaattcacgggcgtgaaaaatctggaaagcgcctcgcaaatctaaagacaaacccggcagagacgtggttttgctggagcactatcagtaagctagtggtttcaagggtacgtcaatgacgtacaaaaaggattgttactctaagccaatggcgtataattatgctcttcatcgaaacggaaatttttactgaagatgttcaaaaactgctgaccgacgatgaattcagtcgttttcagtttttcctggccttgaatcctgactatggtgaggtaatacctgaaactggtgggttaagaaaggttcgatgggtgtcaggaggaaaggggaaacgtgctggtgtcagggttatttactttcatcaggttaaacattatgagatcagattactgcttatttatcgtaagggtattaaagatgatctgtctccccaggaaaaagcaatgctccggttgttaaatacgaggtggtaaatggataaggcactttttgagcggttgactcacagcatggcccagatgaatgaaattattgaaggaacgcgacagccttcgcggacttttgaagttgatgctatgaaaatcaaagaaatacgccgcgcttcagggttgtcacaatctaaatttgccgatcttatttctgtcagcgtagacacgttgcgtaactgggagcaggggcgacgttcaccgaccgggcctgcaaaggctttgctgcgagcgattgccaatgatccgcaacatgtgctgcaagcacttaaccgttagaggcatggttatgccatacagaaagcactagcattcagaactcctgtgaaagcggcatagtggtcgcctgcccaggagttttgctatgacccgtaatcgtgctgaacgtcgccaccctatgatgcgattaaaaaaactcatcgtcgtgctgatgattgacgtcaatgctatcggatgataccggggggttccggaaggaattccttgtttcccgaactgttaccaacaaaattataacgatgagcaagtaaagaccggttggtggcagtactgaccggtctgtgatggatgattaatttcaccttaaatcctggtgctgttaggatgctgacgtttttcggctacaccattcagattatgcaaataaatatctctgaatataatatattcatagcatccataactcatcctgggcgataactaaaccatttttgagtaataaatgaaacaactgcaacactcttattatttctggaaaacacctcgcaaaaacaaaacaacatgcaaaaatccgctttttttaaatgattttccggcgtaattttcgcacatacattaatgagtaatatatgtaaggtggtggtaatggcgatgaatacggtttttcttcatttatcagaagaggcaattaaacggctgaacaagcttcggggctggcgtaaggtttcacgatctgcaattttacgcgaagcggttgagcaatatctggagcggcagcaatttccggtgcgtaaagcaaagagaggcaggcaaaggggtgagacagtaggtgtttatgatcagtgtaaggatcataaggaatgacaaaaatttttttattcttgaatataaaaaaccagatgcccttattctggtattaatacaaggttgttttacttgaacttataataactgcaactgttacatcatatctggaaaacgcctcgcaaaaataaaaaatgattcgtaaatgagctttctttaaagattcgacaagggtacttttctctccatagattcaaaaatgatattggcgagatatttatgaactctctggtaggtatagatatgggcagaattttactcgatttatcgaatgaggtgattaagcaacttgatgatctcgaggtgcagcgtaatcttcctcgtgcggacctattaagggaagcggtagatcaatacctgataaatcaatcgcaaacagcaagaaccagtgttcctggcatctggcaagggtgtgaggaagatggtgtcgaatatcagcgtaagctgcgcgaggaatggtaatgggaaaaaatgatgtcaatcagattgctgacaacgtgcgcgttgttcatgccggatgcggcgtgaacgccttatccggcctacaaagtcatgcaaattcaatatattgaagtttattggtagggctgataagcgcagcgcatcaggcaatcatacgcttgtcatcagtgacatacccataaccttatcgatgtgttggagggaagaacgaggcaaacagacaattgcggcatgatcttgaatgggtaacgcggaatacgagagatggtgtcgtcacaccctatgagctgtaatccgggcgaccagcgccacccggaaaacgtcagagattactccccttcacccggaaacaggaacgggttgatggaactgcgggcatagccttcttgctccattcgcgcgtccagtaccagagaagcgaggtcatctgccacggcttcaactttcggttctttttcctgataaagaatcttcaggtaagtgccacagtcatcgcagctttcggctttaatcgcggcctgttcgtcatccagcgaccagtaatgcagtttgccgctctgctcgcagttgctgcattttacgcgcactacgtgccattcggtttcacacaggttgcagtgcaggtaacgcagaccctgagtggtgccaatttgcaccatgctggacaccggcatagaaccacaaaccgggcaatattgacgttgctcgccgtattcagcgcgggctttgccggggatcagattggccatctgcgcccagtagagcgacagtgcagcccagataaacggcgctttatcgctgctgacggatgagaaatcagaggcaaacagtgcgctggccatatcttccagctcctgagttgatgccttctccagattctcaatcactgccagcgccgggccgctcatttcaggtttcagctcagcaatcagcgccatcagcagcttttgccagtgcttatcacgcggcagaacgtgaatatccagcgggggcttgccctgtgcgctggcttctttaatgcgcgcggtcagatccatctccagcggatggtcgtacagcaccacttcctgggcgtgggcgataagcgcagcaaagcgcaggtaatcacccagcggattattttctgccagctcgcgcagacgctcggcgcggcggttgtataaattcttgagccgagggaacaataacggcggaatcatatccgccgtacgtttctcgctcgaacccagctcatcttgcgggattatgcgaatactcattcagctttcttttccgttgtcttgcggacctcacggtaccagcgcgggtgatgtttcttcgcccaggcgctggtaacccatccttccaccatggcggtaatcgtgcctttcacccaaagggcggcgtagatatgcaccatgataaccacaattaacgccactgcggcaaatgaatgcagcattaacgcgaatcggatcaccgggattgagaaagcaggcgcaaaataaggacgccagataatcacgccgctcaccagcagcagaaccaggaaaataatcgccgcccagaaaacgcatttctgaccgaagttataacgcccggtgtcacctacttcctcgttgacgacgatcttacgaatattcttcgcccaaaagatatcatcccgattgattaggttgtgatgccagtaacggaaaaacatgatgatgaacgaggcaaacataaccacgccgacaaacgggtgcagaattcgcgccagctgcggtgtgcccatgatttgcatcaaccagttgaaggacgggaacaaaaagcccagcccgctcaccgccgccaggatgaagcagaaggcggtgatccagtggttgatacgttccggcgcggtgtagcgcacgatggtgtcacgtcgtttcatttgcgctcctcgtctttctcttcgtgcagattattctcttcctcatccgcacggttcggaccgacacccacgtagtggaagatactggccgcaaaggtagccgcaaagccaacagccgcgagcggtttccagatgcctttccagaatttcacggtttcgctgatttccgggttctccggcaagccatgatacagatttggcttgtcagcatggtgcagcacgtacatgacgtgtgtaccaccgacgcctgccggatcgtacagacccgcattgtcgtaaccgcgggttttcagctcagcaacgcgctcgctcgccagcgttttcatcgactctttcgtaccgaagtgaatcgcgcccgttgggcaggtcttcacgcaggctggttcttgcccaaccaccacgcggtcaacgcacagcgtacatttgtagacgcggttgtcttccgggttgaggcgcggaatgtcgaacggacagcccgcaatgcaataaccgcagccaatgcactgctcggactggaagtcgacgataccgttggcatactgaataattgcaccttccgccgggcacgctttcaggcagcctggatcggaacagtgcatacagccgtctttgcggatcagccattccagtttgtcgttctgctccacttccgagaagcgcattaccgtccacgatttggcgcttaaatcattggggttgtcgtacaccccaatgttattgccgacggtatcgcgaatgtcgttccactctgaacacgccacctgacaggctttacagccgatacaggtggtgacgtcgatgagtttcgccacttcttcctggaagtcccgcgcctgaggcgcgggggtcagaccgttagtcgcggaacgacgaatgatatcttgagattgataagccatatgtcgtctccgttacaccttttccacattcacaaggaaggacttaaactccggcgtctgcgtgttcgcatcaccaacgaatggcgttaacgtattggcaataaagccttttttagctacgccttcataaccccagtgaatcggaataccgatggtatcgatatctttgccgttcgctttcagcgtacgaatacgtttggtcaccaccgctttggctttgatatagccacggttggaggagactttcacggtatcgccctgggcaatgccaagtttattcgccagcgactccccgatttccacaaactgctctggttgcaaaatcgcgttcaacagcgcgtgtttggtccagtagtggaagtgctcggtcagacgataggtggttccgacatacgggaacttatcggctttacccaatgcttcggcgtcgtctttaaagatacgtgcagccgggttcgagataacgtttggatgcagcgggttagttcccagcggcgtttcaaacggctcgtagtgttccgggaacggaccttccgccatcttatcgagggcaaacagacgccccatgccttcctgctgcatgataaacggcccgacgccgctacccggaggcgctgcgctgtagtccggaatatcccagccggtccacttagtgccgtcccatttcagcaactgacgcttcggatcccacgggttaccctgcggatctgcggaggcgcggttatacagaatgcggcggttaagcggccatgcccatgcccagcccagcgtgttaccgaggccagacggatcggcgttatcacgacgcgccatctggttgccttccggcgtccagctaccggcgaaaatccagcagccacaggaggttgtaccgtcatcgcgcaattgggcgaacgagctaagttgttggcctttcttgacgataaccgcaccggttgccggatcggtaatatcggccagcgccttaccgttgctctccatcgctacttcttccgacttcggctcatgcggaatggcgtagttccaggtcatgttcagcacctggtccgggttcgcgccaccctgttcggcatacatcttgcgcaagcgcaggaagataccggagaggatctcgccatcagtcagcgcaatccccggggcgtccgcacctttccagtgccactgcaaccagcgacctgagttaacgattgaaccgttctcttctgcgaagcaggtcgatggcagacggaacacttcggtctggatcttcgacgagtcaacttcgttcagctcaccgtggttctgccagaagttagaggtttcagtgttcagtgggtcgatggtgacgaggaacttcagtttcgacagacaaccgatcactttgtttttgttcgggaatgaggcaacagggttaaagccctggcagatatagccattgaccttgccctctttcatcatctcgaagtactgcaggacgtcgtagcctttatcccacttcggcaaccagtcaaagccccagctattttccgccgtcgctttatcaccaaagaaggccttcatcatagagacgaagaatttcgggtagttgccccagtagtttacctggccttccagcagcggttttggcgtgttggcggtaaggtaggtttgcagatcggtctgcttctcgcttggcagcgtcatgtaacctggcagactctgcgacagtagccccaggtccgtcagcccctgaatattggagtgaccgcgcagggcgttaacgccgccgccggccatccccatattgccgagcagcagctggatcatcgccatcgtacgaatgttttgcgcaccaacggagtgttgcgtccagccgagggcatacaggaacgaggcagttttatcgtgagcactggtttctgcgatgtattcgcagactttcaggaacgcgtcttttggcgtaccacagatgttttcaaccacatctggcgtgtagcgggaaacgtgctgtttcagcaagttccacacgcagcgcggatgttgcagcgtggtatcgcgtttggcgaagccgttttcgtccagttcataagtccaggaggatttatcgtacttgcgtttttccgcgtcgtagccggtgaacaggccatcttcaaagccgtaatcctcacgcactatcaggctggcgttggtataggcttcggtgtattcgcggttgaatttttcattgttcagcaggtacagcaatacgcctgacaggaaagcaatgtcagtaccggaacgaataggggcatagtagtcagctaccgccgccgtacgcgtaaagcgaggatcgatcacaatcagcttcgcgccgttgtgaattttggcttccatcgcccagcggaacccgaccgggtgagcttcagcggcgttaccgcccatcaccacgacgaggttggcgttcttgatgtcgacccagtggttggtcatcgcaccgcgaccaaatgttggagcaagacttgctaccgttggtccgtgtcagacacgcgcctggttgtcgaccgcgagcatacccagcgcgcgggagaatttttgcgttaaatagccggtttcgttactcgacgcggaagcacacagcatcccggtggagagccagcggttaacagtcacgccttcggcgttttgcgcaatgtagttagcatcgcggtcttctttcatcagtttggcgatgcgatcaaacgcctcttcccaactgatttgctgccatttatcagaacctggcgcacggtattccggaaacttcagacggctttcggagtggatgaaatccaccaggccagcgcctttcggacaaagtgcaccgcggttgaccgggtgatccggatcgccttcgatatggaagatagatgctttggcgtttttgctccgtcaccgaggctgtacatcaacagcccacagcctacggaacaataggtgcaggtattacgggtttcgcgggtgcgcagcagtttatactgccgggtttccgcgagcgctacgctgggtgcaaaacccagtgccgctgccgtggtgcctgccataccgccagcgcagatcttaaagaactgccttctgctgacctgcatggattgctccttgtttcgacattgtcacgtcccatttacattcgcttgctgcgtgtgcagggagtgggagttatttttctttgcggaaggggccgcaaaggtccagaattggctcaatttccctccatccaggaagggtttgtaacagaataccataatgttggtgtgtgtgttcttatctggttaagagaaagtgaaaaaaacacagcaaaaagaaatcgaaaatgtgacaaatatcacaggtgttcgtcaaattgagttatggcggcgtgatgatttacaacacccacggttagatgaggtcgcggaagaagttcccgttgcgctggtctacaacggcatttcgcatgtggtgatgatggcgtcgcccaaagaccttgagtactttgcgctcggtttttcgctttccgaggggataatagaaagtccgcgcgatatcttcggcatggatgtcgttccttcctgtaatggtcttgaagtacaaattgagctttccagccgccgctttatggggttgaaggagcgccgccgggcgctggcgggacgtacgggctgtggcgtatgcggcgtggagcaacttaatgacatcggaaaaccggtgcagccgctaccgttcacccagacgtttgatctcaacaaactggatgatgcattacgtcatctcaacgattttcagccagtggggcaactgactggttgtactcacgccgctgcctggatgttgccatctggcgaactggtcggcgggcatgaagacgtgggtcgccatgtggcgctggacaaactgttaggccgccggtcacaagaaggggaaagctggcagcaaggtgcggtactggtttccagtcgtgccagttatgaaatggtgcaaaagtcggcgatgtgcggcgtagagattttgtttgcggtgtctgccgcgaccacgcttgctgtagaagtggctgagcgttgtaatctgacgctggtgggtttttgtaagccgggtcgggcaacggtttatacccatccgcagcgtttgagcaattaattaaaataagtcctgcgatatatattaaattgcaggacttattcatttcgtgaattttattattttatttataaataaaacgcgtgtagtggcgttttcttttttcatttattatgttcactctcttatctatatatttataaggcaattaaatgaaaaggaatttattatcttccgctattatagtcgccatcatggccctcggtctgacgggttgtgatgataaaaaagccgaaacagaaacgcccccgcctgccaatagtcaacctgccgcaccagctcctgaagctcccgttgcaaaagcagaagctaaacctgaaacacctgcgcaaccggtggtcgatgaacaagcggttttcgacgaaaaaatggatgtctatatcaagtgctataacaagttacagatccctgtacagagcagtctggcgcgttatgctgactggctgaaagattttaaacaggggcctaccggtgaagagcgtactgtttatggcatctacggcattagtgaatccaacctcgctgagtgtgaaaaaggcgtaaaaagtgctgtggcgttaacgcctgcgctgcaacctattgatggcgtggcggtgagttatatcgatgctgccgtggcgttgggtaataccattaacgaaatggataaatattacacccaggaaaattataaagacgatgcgtttgcgaaagggaaaacgctgcaccagacattcttaaaaaatctggaagcctttgaagctgtagcagaatcttatcatgcggcgattcaggaaattaacgataagcgccagcttgcggaactgaaaaatattgaagaaagagaagggaaaacattccactattactctctggcagtcatgatttcagcgaaacaaattaataacctgatatcgcaagataagtttgatgcagaagcggcaatgaagaaagtgtctgaactggaaacgctggtggcgcaggccaaagaagcggataaaggcggcatgaatttctcgtttattaattcggcaggccagtatcaactcgaggctaaaaaatacgttcgccgcgtcagaaataaagtcccgtactctgactgggataaagagcaactgcaggacgcaaactcaagctggatggtcgacgactctttcccgagagcattacgcgagtacaacgaaatggttgatgactataatagcctgcgttaaacgtttttgatgataaatgcagtgtcggatgcggcgcatccgacacagttcaccccttgtgaagtaactccataaatgcctcatatcctgttaacccggcaataacctctgccggatgctgacacaatacgcttgccagatagctaaatatttttagctcatgacgcgcatcggcggcggcgcaggcgatcaagacatggttaatgacttcgttattcacctcaactggttgggcgagggtaataaaaaatccacgaaaacgtcgctcctgttcgctccagcaatgtgggatggcgaggcgattaacaatcaggttttcaccttcgccttcgcgggcgatgatgcgttgtgcttcatcggcggtaatatggtgttgtgccactaattgcgcacaaatttgccgggtaatatgttgccagctttcaccgcgtacattcgaataatgaaaacttccgggggcagagaaaaaacgctccggctgttggcgaataaatgccgtcgccagaaaatgttttatttgttcgataccggcagccgtaatgatattttttacggtgatgtaattatttaccgcgtcatccagtaaataatggctgttgttaatgatcaataacggctcaatctcttcgcgaatggcaacaagttcgcttaagctacgggcaataatcacccgacaatgtaaaacatcgcgctcaatggcgagctgattaatagtggcaatcgcgttctggtccgagagcaaaatgatcggctggcgttcgttttgatgccgttccagcgcacaggcaaaatacaaaccgatcagatcgctgtcgaaaaggggaatatcgagctgttcacgcagtagcgtaataaagtgcagactcatatcaaaggccgcaggccaggcggctttcaggttattcatgctgctttggcggtgctcagcaatccacaccggtgcggcaaggcaacgtaataaatgcccggtaatgttctcaaccagctgcgtatcaataatattcaatgacgcgatgcccggcaccctttgcagcaaccgctgcacattatcggcagaaattatctgcgcttgctgatgctgtttctctatcaaacccgtcaggttcttacagcgttataaccaagaaacagaccgctatgttcaacgatttgttttatctcgtcaccgggatattgcggccactcatcggtcagttgattacgcagggcgtaaatcgccagaatcaggctggagagataatcaccctgcatgagcggccagcggtgttggttgtcgcaggccgtggataaatgctgaaggttgtctcgtgttatgcccgccagcggaattaaaaacggatctttgcgcagcaagttcgccagcaagataacgcgtttctcttctgtctcatcaatgaaatggcccaaaccagggcggctggccaggcaacaagtgcgttcataacgctgttttaaccggggcagacgctctgctacccacgtttctggcaaattaagcgccgaggcgagttgcgcacggggagtgaaagtattcagtaataacagcgccagcagccgatcgtcgttatcgtgcttttgcagcaactgaaaaaagctgcggcgctcgaagatttccagctgatagcccgcactaccactggcgaaaatgcgggctttgccgttaagggtgaagttgagatagtcaatatcacgcaggatggtcctgcctgaaacgccagtctgttgcgccagctctccaggcgtgcgcggctgttgctccagcagatcgacaatctttaactggcgttcgtttagcattaatccacctgacggaactggctaaacgcgttgactttctccgcagttaaggtcgtcagaaaatcccgtatcagcgtgagcagagcatcgtaatcggcttttgaaatcatgccgctgttagcgtgcagataacgggttggcagacacagcgcgacaaccggacgcccgccgcccatcacgttgtagcgcccgccatccgtcgctccggttttcatggtggaaaattgcagcggtaaatcgttatgtgcggcacagttttttaacactgctaccagtttctggttggggaagtagcgcttgtcaaacagcatcagccccggcccctggcccagtttcagcgggtatttaatgttatcaatgcccggaacatcacctgcgacagcggtatccagcacaatcaccacatccggtttaatgtgttccgccgaggtttgtgccccgcgtagcccaacttcttcttccacactgccaacgccgtacagcgtaatttctgggttatttactgtctgtagtagctccgccatcatcgcgcagccgatgcggttatccagcgcctttccgacaaatttatcttcgccccagcaggcaaaattggcttccgggctaataaaatcgccaatttcaacgccgcgcttttccgcttcttcgcgactgttcgcgccaatatcaatgaacatctcatcaaatgacagcggttgttgcttttgcttttccgttaacgcatgaggcgcgacggaaccaatcacaccagggattttaaatcccttgtgtgtgcgtatggttacccggtggttgagcatcgactgattccaccagccgccaatggtggtgaagcgcagaaaaccgctctcgtcgatgtgggtgaccataaagccgacttcatccatatgcccgacaatggcaacttttggacctttattccccttacgggcaacaaagctgcccagaccatcaaaggtgatttcattaacgcaaggttccagcgtgtttatcaggatgtcgcgaacttcctgttcatcgccgctgacggcgctggcttcgcacaactgttgcagtaactcaatgttcatggacaagctcctgttgcgcggctttcgctttgcggcgtaaccacaatcctttcaggacgataatgaatgaaatgtttagcgcgaggccaatcgccagcaccagataaaacgaacctaccggcgacatcaggccgatcagcgggtcaaagatacccaaaccaggtgccagacgtttgattccgaaagcgatcaccagcacgccggtaataccgcccgccagcgtattggcggtaatcatcggtaacggagctgccagagcgtaaggaatagcaggttcggttgcgactgtggcaccgaccacaatggcactactggcagcctctttttcctgtcgggtaaacagtttgggcgcaatgaacgtcgcaagacccgccgcgacgggcggcatcagcgcgacaacgccgacgatggcgtaccagtcataaatgtgtttttccagcagtgagaagcagaagaaccaggcggttttattgatggggccgcccatatcgaacgccagcatcgcaccgaccagaaacgctgccgcaaatttcattgatggaggaatggtgttcaggaagtgcagcaacccgcccatgaggtcggacattaccggtccgataacgtagtaagtgagcacgccgaaaaccagcagagtaacgaacgggatcagcattgaaccgagcagcggttgtaatgcttttccaaggcgcactttacggaaccagaagacgaaatagccaatcgccagccccagcaccaccgcgccgaggaatcccgcacctgactgggtgccgagcagggctttgtcattcgccagatagcaaaccagaaacgccggagcgaaagcgggtttatcggcaatcgacgaggcaatataagcgcccatgatggggatcataaaggtgaagccgagataaccgatggattcaaccacccaggtaaacgacggcgcgcctttcgacatatcggtatacggcaggccgaactgtaccagcatgttggcaagcgccaccaggataccgccaccgataacaaacggcagcgccgcagagacgcccgccatcaggtggctcattacgctgccgctttgtacttcctgtttgccgagcttcacgccgctatctgcggcaaaaagctgcgagtttgttggtaattcactgaaaatctggtcgatatttttcaacgcctgggagatggcaatctcataaaccttcttcccggcaaaccgcgcccggtcatcgccgctcaggccacgcccggtagcgagaatgacgtaatcggcagcggcaatctcttcgctggataagcggttttcaacgccactggacccttgagtttccacttttatggtatggccgagagaacgggctttctgttccagggcttccgccaccatgtaggtgtgagcgatcccggcggggcagttggtgatcgcgacaatacgtaaggatgactccatcgccacttccttatgagctgagggtttgatttaacaaggcaaacacctggtcggcgtcgcctcgtcgcagttggtgaataaaatcctggtggataattttgcgacacagtgtaccgatgattttgacctgatcctcttcgccgctttgcggcacgccgaggcagatccagcaattgacgtcttcgccatcgctggctttccagtcaatagcctgcgctttgcgggcgaataacacgaacggttgtttaacgcaggcgcttttaccgtgcggcacggcgatgccggaaccaaatccagtagagtgcattttttcgcgcagcagcagggtttgcaggaactggtgtgagtcggtgataaaaccgttttgtaacgccattgtcgccaactgcttcagaatggaataagcgccattgccctgaatattcaggtcaatacagcttgcagtaagagctgccattaatcggactccatgaaatatattttaatcaattgtaatggtggagcgattaagtgatgagaggcgatatgtcggtaaacaatgacaatttgagacagagtgaaaggtcagatttgcggagtaatgcacataatggttatttaaataaaccacatgaatcattaatgagttattcattatttttgtgatttactcacaatgcatcggggaaatataagttaccgggatatattaactgaaggtgtaatatgtttatttttcaaatcgaaattaaaaatattgtgccggaggcgtctccggcacattaggcaattacggcaggtaaaacacttcttgcagttcgctactcaccgggctgttatccgggttcgcgggcatgacgtcggtcatatatttccaccaacgttggcaaacatcagtactggcaaccgcattccagcgctcttcagattcaatctctaccgtggcaaacagcagattacgcgctttgtcgaggtaaatggcgtagttatgcgcaccgtgagatttcaacactgcttccagttccggccagatggggttatgccgacgctgatactcttcgtgagcgtcggggttaacctgcatgacaaaggctttgcggatcatgtttgctccttacagcgccagcgcactggctagtggtgtaacgccgaagcgcttgccgagcgctatcaactcttcacggctgatggtctgtttcatgccgcccatcgaataaaccttcactaatacttgtgctgatttttctgcggtgtcgattaaaccgaatgtttcatccaacgtcgacccgctgccgaagacgccgtggaagggccacaacaccagcgaatgtttttgcatctcttgtgcggtcgcctggccgatttcgtccgtgccgggcaccatccacggcagaatgccaacgccatccgggaataccaccagacactcggtgctgccttcccacagttggcgagtaaagaccgcggtgtcgttttccagtacataggtgagggcgatcaggttggtggcgtggcagtgcatgatcacccgatctttaccgttggtggctttaatgcgctcgcagtgggagagaaagtgagccggaagttcagaagttggaacggcttcgttggttaacccccagagaatatggtagcccgcgccgtcgctgtcgacttttacgacgcctaagttagctgcaggatcaagctggacgttacggaagaatttgccggagccggtgacaataaacggtgtatttgccagtaaaggcatgggctggctgagcgggatatagcgcggttgtgcatggaagttgtctttataaggcgcgatatcggcgtcatccaggcgcagcgtcaggttgccgccgttgcgctcgtcccagcctttcagccaggcatcggtggtggctttgatcattccctggacaaaccaggactgggtaatgttttgcatgttctgtgttcctgtaaattaggttgccttgtttagacatggtgcggcttgttcccctcaccctaaccctctccccgtaggggcgaggggactgtccggagcagtgttcagctccgttgccgcacgaggctatgtttttctccctcgccctttcagggagagggccggggtgagggtgacagcccgcatggacattcgacccgtaggccggataaggcgctcgtgccgcatccggcagtgtttacccacgctggctcaaaatcgctttctcataagcccgcacgctctccagccattcgctacccgttggggtatcgtgacgttggcaatacatttcccagaccgcctgccacggcaacgatttctgctcttccagcagtgccagacgcgcagtgtaatcgcccgccgcttccaacttgcgcagctcggcggtaggttccagcaacgcacgcagcagggcttttttcatattgcgtgtaccaatgacccacgcggcaatgcggttgatagaggcatcgaagaagtcaaggccgatatgcacccggtcaaacagatcgtgacgcacaatctcactggcaattgcctgggtttcatcatccagcagcactacgtgatcgctgtcccagcgaaccggacggctgacgtgcagcagcaactgcggcacatacagcatggcggcggaaatcttgtcggaaatcacttcagtcgggtggaagtgcccggcgtccaggcacagcgcagtctggcggctggtggcataccccatgtaaaactcattggagccaaccgtgtagctctctgcgccaatgccaaacaatttgctctcaacggcgtcgatatggtgcgcagggtttagcttctcgctgatcacctcatccagtgctgccagcagacgctgacgcggggcgagacggtcaacggtgatatctttcataccatccgggatccagatgttcatcaccgatggtgtgccgagttgctcgccaaaataggccgaaacgcgacggctggctttgcagtgatcaatccagaactggcgaatgctgtcgtcggcatgggaaagcgtaaagccatcggcgcttagcggatgcgaaaagcaggaggggttaaaatccagaccgagctgattggctttcgcccattcaacccagtttttgaagtgctctggtttgatctgatcgcgcgagactggcgtatctgattccagatagatggcatgtaaattaagccgtttcggccccggaatcagccgcatagcctgttccagatcggtacgtagctcactggcattacgcgctttgcccggataattaccagtagcttgaatcccaccggtcagcgaaccttccgggttttcaaaaccggaaacatcatcgccttgccagcagtgcattgaaacgggtaaacgatcaagttggcgcagcgcctcctcgacatcaatccccaccgccgcgaaacgctgtttcgccagctcccaggcctgttccagttgagtggtcatgcgcaaagctcctttgtctgtcgtgtagagtgaatctgcgccacatagtgggcaatttcactgtcaggattaggggtaaaggtggtcagattcgcggtggtgctgacgacctgacggaaatcatccacattgttgagttcatccagcgtcattaactggatgccgatattgccgagcgttgaggcttcaacaggcccggcgatcacccgaataccgcaggcatcggcgcatagctggttgagcagcgtgttctggcagccgccgccgacaatatgcagttgcgagaaatcttcaccgcgcagctgcgccagctcatgcaacacatcggcatacagcagcgccagactgtcgaaaatacagcgcgccagttcagcatcactttccgggatcggttgcgccgtttcccgacacgcagcctgaatttcgctgcacatcgcttcaggattaataaagcgatcgtcattgggattgatgatgaagcgacaggccggaagtgcctgtgtcgcggcgataagcgccgggagatcgttgatttgccgttcctgaagcactcgctgaagcagccataagcccataatatttttcagcacccgatagcgaccttccgccccgccttcattggtgatgttggctgccagcgccgtgtcattggtaaatggcgtctggctttcgaagcccatcaatgaccaggtgccagaagagagataagcggcgcgtgaaccgtttaacggcgaggcgataaccgcgctggcggtatcatggctggcaacggcgaccaccggaatctcattaccctgcgggcaaatccagtgcccaatgacattacccggatgcgtcgggcgaccaaaccaggctttgttggccccgctccacgccagtagcgactcgtcccagtcgtcgctattgatattgaccagttgtgtggtggtggcattggtgtactcccagttcatcttgccggtcaggcgatagctgaagtaatccggcatcagcagagcgtgagcaatgtgtggaataagttcaggttgttgctccgtcagcgcacgcagttgataaagcgtattgaagggcagaaactggatgccgctacgttgataaatatcgcgtttgccgagttgttgctgtgcctgcgccattaggccattggagcggctatcgcgataagcaacgggcaggcccacacgctgaccctgttggtcgagcagcacaaagtccacgccccaggtatcaatcccaatgctatcgatacgaatcccttcctcgcacaccttgtttaatccaaggcgaatggcactttccaggctatccacattccaggtgacataaccgttctggctatgcagcccatttttaaaacgatggatttcgcgcagcgtcaggctgcggcattcacgctggtaacgcgccagcatcacgcgcccactggatgcgccgagatcgacggcgacacaattgcgaaaggtcataatgtgatcctgctgaatttcattacgaccagtctaaaaagcgcctgaattcgcgaccttctcgctactgacaggaaaatgggccattggcaaccagggaaagatgaacgtgatgatgttcacaaattgctgaattgtggtggtgtgatgctcaccgcatttcctgaaaattcatgctgtatcttgaaaaatcgacgttttttacgtggtttcccgtcgaaaatttaaggtaagaacctgacctcgtgattactatttcgccgtgtttacgacatcaggaggccagtatgaccgtattacatagtgtggatttttttccgtctggtaacgcgtccgtggcgatagaaccccggctcccgcaggcggattttcctgaacatcatcatgattttcatgaaattgtgattgtcgaacatggcacgggtattcatgtgtttaatgggcagccctataccatcaccggtggcacggtctgtttcgtacgcgatcatgatcggcatctgtatgaacataccgataatctgtgtctgaccaatgtgctgtatcgctcgccggatcgatttcagtttctcgccgggctgaatcagttgctgccacaagagctggatgggcagtatccgtctcactggcgcgttaaccacagcgtattgcagcaggtgcgacagctggttgcacagatggaacagcaggaaggggaaaatgatttaccctcgaccgccagtcgcgagatcttgtttatgcaattactgctcttgctgcgtaaaagcagtttgcaggagaacctggaaaacagcgcatcacgtctcaacttgcttctggcctggctggaggaccattttgccgatgaggtgaattgggatgccgtggcggatcaattttctctttcactgcgtacgctacatcggcagcttaagcagcaaacgggactgacgcctcagcgatacctgaaccgcctgcgactgatgaaagcccgacatctgctacgccacagcgaggccagcgttactgacatcgcctatcgctgtggattcagcgacagtaaccacttttcgacgctttttcgccgagagtttaactggtcaccgcgtgatattcgtcagggacgggatggttttctgcaataacgcgaatcttctcaacgtatttgtacgccatattgcgaataatcaacttcgttctctggccgaggtagccacggtggcgcatcagttaaaacttctcaaagatgatttttttgccagcgaccagcaggcagtcgctgtggctgaccgttatccgcaagatgtctttgctgaacatacacatgatttttgtgagctggtgattgtctggcgcggtaatggcctgcatgtactcaacgatcgcccttatcgcattacccgtggcgatctcttttacattcatgctgacgataaacactcctacgcttccgttaacgatctggttttgcagaatattatttattgcccggagcgtctgaagctgaatcttgactggcagggggcgattccgggatttagcgccagcgcagggcaaccacactggcgcttaggtagcgtggggatggcgcaggcgcggcaggttatcggtcagcttgagcatgaaagtagtcagcatgtgccgtttgctaacgaaatggctgagttgctgttcgggcagttggtgatgttgctgaatcgccatcgttacaccagtgattcgttgccgccaacatccagcgaaacgttgctggataagctgattacccggctggcggctagcctgaaaagtccctttgcgctggataaattttgtgatgaggcatcgtgcagtgagcgcgttttgcgtcagcaatttcgccagcagactggaatgaccatcaatcaatatctgcgacaggtcagagtgtgtcatgcgcaatatcttctccagcatagccgcctgttaatcagtgatatttcgaccgaatgtggctttgaagatagtaactatttttcggtggtgtttacccgggaaaccgggatgacgcccagccagtggcgtcatctcaattcgcagaaagattaattcgccatgccgatgccgacgatgttagcggcgacaataatcaccacacaaccgaggctcaacaccgttaccggacggcgtcctgcattgttccactctttcagcaccagcccgacgataccgccgcacaatacatagaagctcatatgcagcatccaactgatgtagtcatattgcgccggaatgcgggcgtggccccaggcatagaaaaagaattgcagataccacatcaacccgcccagtgctgagagtaacacattgtgagtgatcagcggttttgccagcgagaagtcggcttttagcgacaaatccttcacttttgccagacgaataaaacagaaaccgaggttgatgatcgcgccgccgcccatgatgatgacatagcttggcagagcgacatacagtggatcgacgcctagtgcggcagcggcttcatgcatcggttttgcggcgttcatcgcaaaggacatcccggcagagaaaatgccgcacatcaccgccagcaccagcccttttttcagattgaactcttcggctttaatgcccatcttgcgctctttcaactgcccggctcgagttacaatccctacgccaatcagcgccaccagaacgccgagcaacgtcatgcgtccgccttcggtgttaatcagcacatcgaaattgccgttgataattggcgtcatcagcgtaccgacaatcaacgtaatgccaatggcgatgccaattcccatcgacatgccgagataacgcatggtcaggccatagttgatattaccgatcccccacatagcgccgaacagaaaaacaggcagcagcgtagagagactaaacgagctgtaatacgcccagaaattcggtagtaacagggcgctgatggcccacggcagaataatccacgaaacaatcccaccgactgaccacatggtttcccatgaccatttttttacttttttgaacggagcgtaaaaacaggctgcactggccgcgccgatcaaatgccaaaatatccccatcgtaatcgcgttactcatcttcttatcctcatcatttttcgtcgcttcacatctccgacgagatgagtgtaaaaatcgtgctgtcgattaacctttcgcctgttgccgccgttgtcgatttactggcaatcacggcattaagtgggtgatttgcttcacatctcgggcattttcctgcaaaaccatacccttacgaaaagtacggcattgataatcattttcaatatcatttaattaactataatgaaccaactgcttacgcggcattaacaatcggccgcccgacaatactggagatgaatatgagctataccctgccatccctgccgtatgcttacgatgccctggaaccgcacttcgataagcagaccatggaaatccaccacaccaaacaccatcagacctacgtaaacaacgccaacgcggcgctggaaagcctgccagaatttgccaacctgccggttgaagagctgatcaccaaactggaccagctgccagcagacaagaaaaccgtactgcgcaacaacgctggcggtcacgctaaccacagcctgttctggaaaggtctgaaaaaaggcaccaccctgcagggtgacctgaaagcggctatcgaacgtgacttcggctccgttgataacttcaaagcagaatttgaaaaagcggcagcttcccgctttggttccggctgggcatggctggtgctgaaaggcgataaactggcggtggtttctactgctaaccaggattctccgctgatgggtgaagctatttctggcgcttccggcttcccgattctgggcctggatgtgtgggaacatgcttactacctgaaattccagaaccgccgtccggactacattaaagagttctggaacgtggtgaactgggacgaagcagcggcacgttttgcggcgaaaaaataatcatttgccgcctgctgcaatgaggcgtataggccgcatatcagcttaaaaaatgaaccatcgccaacggcggtggtttttttgtgatcaatttcaaaataaaaacaatgatccgataaaaataaaacagtgtttcaattgatgtggttttgatcacttttattgattaaatgaatgtctatcttcgtttccatcaacactgatgctccattgaggaatgacgcatcagcccttaaaaatatgccgacaggtgatggaaatgcagataaaacgctcgattgagaaaatcccgggggggatgatgctcgtcccgctattccttggcgcactgtgccacaccttctcgccgggggcggggaaatattttggatcattcaccaacgggatgattaccggtacggtgcccattctggcggtgtggtttttttgcatgggggcgtcaataaaattaagcgcgacgggaacggtattgcgtaaatccggtacgctggtggtaacaaaaattgccgtcgcgtgggtggttgcggcaattgcctcgcgcattattccggaacatggtgttgaagttggattctttgccggactttcaacgctggcgctggtggcggcgatggatatgaccaatggcggactttacgcttccatcatgcagcagtacggcacaaaagaagaagctggggcatttgtgttgatgtcgttggagtccgggccgctcatgacgatgattattctgggcactgcagggattgcctcgtttgaaccgcatgttttcgtcggcgcagtattaccgttcctggtgggctttgccctggggaaccttgaccctgaattacgagaatttttcagcaaagcggtgcaaacgctgattccattctttgccttcgcgctgggcaataccattgatttgactgtgattgcccagactggtttgctggggatcctgttgggtgtggcagtaattatcgtgaccggtattccgttgattatcgccgataaattgattggcggtggcgatggcactgccggaattgccgcttccagttccgcaggggccgcggtagcgacacctgtgctgattgcagaaatggtgcctgcgtttaaaccgatggctccggcagcaacttcgctggtagcgacggcggtcattgtgacttcgattctggtgccaattcttacctctatctggtcacgtaaagtcaaagccagagcagcgaaaatcgaaattttaggtacggtgaaataaacctgcttccttaatccccacagccggatgaactaacgttcgtccggtttgctattgagttcctgcctggatacttaccgcgaaaacagcacgcctgacataaaataaatatggtctaatggggaaatttctcgtggagagggaacagatgcgatatccggttgatgtatacacaggcaagattcaggcttatcccgaaggcaaacccagcgcaattgccaaaatccaggttgatggtgagttgatgctgacggagctggggctggaaggtgacgagcaggcggagaaaaaggttcacggcggaccagacagagcgctgtgtcattatcctcgtgagcattatctctactgggcgcgggaatttccggaacaggcggagttgtttgttgcgcctgcgtttggcgaaaatctctcaaccgacggtctcacggaaagtaatgtttatatgggcgatattttccgctggggagaggcattaattcaggtcagccagccgcgctcgccttgctataaactcaattaccattttgatatcagcgatatagcgcagttgatgcaaaacacaggtaaggtggggtggttgtatagcgtgatagcgccagggaaagtgtctgcggacgcgccgctggagttggtttcccgtgtcagcgatgtgaccgtgcaggaggctgccgccatcgcatggcatatgccgtttgatgacgatcaatatcaccgtttactctccgccgccgggttatcgaaaagctggacgcggacgatgcaaaagcgccgactgagcggcaagatcgaagatttttcccgccggttgtggggaaaataacccccggagtgtaggcctgataagacgctatcagcgtcgcatcaggcatcctgctcaaatgccggatgcggcgtaaacgccttatcctgcctacaaatgcggagtttaactccgcttatacagcggcaaccaaatcaccagccgtaaaccgcccagcgggctgtcttctgccttcacccagccacgatgctgctgaatggcggtttcaacaatcgccagccccaatcctgtaccgccagattcacgatcgcgtgcttcatcggtccgatagaacggacggaaaatctgttcgcgatcttccgggctaacgccaggaccatcgtcgtccaccgtaatggtgataccgtctttatctaccgcaaagcccacttcaatcttcgtatgggaataacgcagagcattacgaacaatgttttccagcgcactttccagtgcgttcggattgccgtacagcggccacggcccaggcgggaagttaaccgtcaacgacttgcccatctgctcggcttcgaacgccgcgttatccagcacttcactccacaactggttggctttgatggtttcgctaaccagcgcgtttttttgctgattacgggacatcaccaacagatcgttgatcatgctgtccagacgttgcgcttcggtttcaatacgctccagttccttgctttcaccactacgacggcgcagtaacgccgtacccagttgcagacgcgtcagcggggtgcgcagctcgtgagagatatcagaaagcagacgctgctgagaggtcatcatgcgctccagcgcggtgaccatctggttaaaactggcacctgcggcaaggaattcctgtggccccgcttccagttccgggtgctggcgtaagtttccctgggcaacttcatcggcagcgtttttcagcttacgcgccggttttgccagactccaggccaaccacaacagcagcggcgtactgaccaacatggtgacaatcagcagtaatagcgggcggtcaaacagtaagttaatgaaatcggattgagaactgctggccggacgaatcagataaagttggtaattatcttcgccatcacgcacggagaacggaccgaccagttccacgcggccatactttttcttctgcggatgatcggcgttatcggcctgaccaataaagttacgaatgatctgcatttcgctgcgttcagcgccgatcacgcggccttcggtggtcaccaataacaaacgctgtcctggcggtgcccacttatcaatcgcccggaacagacgccgccaccacattaaatcgttgggcggatcgttcgccagctccgcttcgacatgctgctcaatcatcagcccctgacgctgttcgctatccagaagctcggtcatctggcgtgaatcgagcttgggtaacatcaaaaccaacatcaacaccagcgccagcgtcagccagaagatggcgaagatgcgcgcggttaagctgcctatcatgaagcagaaaccatcagatagccgcgaccacgcaaggttttaaaccacgggtgaccatctttacgatccggcagtttacgacgcaggttggaaatgtgcatatcaatagcgcggtcgaaaggcgtcaggcgtttgcccaacacttcctggcttaaatgttcacgggaaaccacctgacccagatgctgtgccagcaaatagagcagggtaaactcagtaccggttaactccagcgtttgcccgtcgaagctggcttcctgacggcctggattcagcactaaggcatcaacttccagtgtcggtgaaccgttgtcgttgttttgctgttgctcgctccagtgcgaacggcgcaggatcgcgcgaatacgtgccaccagctcacgatcattaaacggtttcgggagatagtcatctgcgcccagctcaaggccgagaacgcgatcaagttcactgccgcgcgccgtcaacataatgacaggcgtctggtgtgtctggcgaagtgcttttaatgtgtcgataccatttttcttcggcatcattacgtcaagcaaaagtaaatcaatgctgtcgtccagaagatcaagcgcctgttccccatcgtgggcaacaatcacgttgaagccttccatctcgagcagctcctttaatagggaagtcagctctcggtcatcatcaactaacaggattttattcattgtttaaatacctccgaggcagaaattacgtcatcagacgtcgctaatccatgactttacgttgttttacaccccctgacgcatgtttgcagcctgaatcgtaaactctctatcgttgaatcgcgacagaaagattttgggagcaaatgatgcgcatagttaccgctgccgtcatggcctcaacgctggcagtcagttcattaagccacgctgctgaagtcggttcaggcgataactggcatccgggtgaagaacttacgcagcgcagtacgcagagccatatgttcgacggcataagtttaaccgaacatcagcgtcagcagatgcgagatcttatgcaacaggcccggcacgaacagcctcctgttaatgttagcgaactggagacaatgcatcgccttgtcaccgcagaaaattttgatgaaaacgctgtgcgcgcacaggcagaaaaaatggcgaatgagcaaattgctcgtcaggttgagatggcaaaagtccgcaaccaaatgtatcgcctgttaacgccggagcagcaagcggttttaaacgagaaacatcaacaacgaatggagcagttgcgtgacgtgacgcaatggcaaaaaagttcatcgttgaagctattgagtagtagcaactcacgttcccagtagtaaaccctgttttccttgccatagacaccatccctgtcttcccccacatgatgtgggggttttttttatcctcaatttgcctgctgcttaatgcattgcagatgatttgcttccgttatactagcgtcagttgatagcgggagtatttatgaatcaatcttatggacggctggtcagtcgggcggcgattgctgcgacggcgatggcttcgttgctattgctgattaaaatttttgcatggtggtataccgggtcggtgagtattctcgccgcgctggtggattcgctggtggatatcggcgcgtcgttgacgaatttactggtggtgcgatattccctgcaacctgccgacgataatcactcgtttggtcacggtaaagcagagtccctcgcggcgctggcgcaaagtatgtttatctccggttcggcactattcctgtttttgacgggtattcaacatctgatatctccaacaccgatgacagatccaggcgtcggggttatcgtgacaattgtggcgctaatttgtacgattatccttgtctcgtttcagcgttgggtggtgcgccggacgcaaagccaggcggtgcggctgatatgctacattaccagtctgatgttatgatgaacggcgcaattctgctggcgctggggttgtcctggtacggctggcatcgcgccgatgctctgtttgcattgggaatcggcatctatattttatatagcgcgttacgcatgggatatgaggcggtacagtcattactggatcgcgcattgcctgatgaggaacggcaagaaattattgatatcgtgacttcctggccgggtgttagcggcgctcacgatcttcgcacgcggcagtcagggccgacccgctttattcagattcatttggaaatggaagactctctgcctttggttcaggcacatatggtggcggatcaggtagagcaggctattttacggcgttttccgggatcggatgtaattatccatcaggacccctgttccgtcgtacccagggagggtaaacggtctatgctttcataatcagtataaaagagagccagacccgcattttgtgtataaaataccgccatttggcctgacctgaatcaattcagcaggaagtgattgttatactatttgcacattcgttggatcacttcgatgtgcaagaagacttccggcaacagattttattttgcattccaaagttcagaggtagtcatgattaagaaaatcggtgtgttgacaagcggcggtgatgcgccaggcatgaacgccgcaattcgcggggttgttcgttctgcgctgacagaaggtctggaagtaatgggcatttatgacggctatctgggtctgtatgaagaccgtatggtacagctagaccgttacagcgtttctgacatgatcaaccgtggcggtacgttcctcggttctgcgcgcttcccggaattccgcgacgagaacatccgcgccgtggctatcgaaaacctgaaaaaacgtgggatcgacgcgctggtggttatcggcggtgacggttcctacatgggtgcaatgcgtctgaccgaaatgggcttcccgtgcatcggtctgccgggcactatcgacaacgacatcaaaggcactgactacactatcggtttcttcactgcgctgagcaccgttgtagaagcgatcgaccgtctgcgtgacacctcttcttctcaccagcgtatttccgtggtggaagtgatgggccgttattgtggcgatctgacgttggctgcggccattgccggtggctgtgaattcgttgtggttccggaagttgaattcagccgtgaagacctggtaaacgaaatcaaagcgggtatcgcgaaaggtaaaaaacacgcgatcgtggcgattaccgaacatatgtgtgatgttgacgaactggcgcatttcatcgagaaagaaaccggtcgtgaaacccgcgcaactgtgctgggccacatccagcgcggtggttctccggtgccttacgaccgtattctggcttcccgtatgggcgcttacgctatcgatctgctgctggcaggttacggcggtcgttgtgtaggtatccagaacgaacagctggttcaccacgacatcatcgacgctatcgaaaacatgaagcgtccgttcaaaggtgactggctggactgcgcgaaaaaactgtattaatgatttcggaaaaaggcagattcatttagcctgaaaccgatgacagaagcaaaaatgcctgatgcgcttcgcttatcaggcctacattaattctgcaatttattgaatttgcaaacttttgtaggccggataaggcgttcgcgccgcatccggcatggacaaagcgcactttgtcagcaatatgaggcggatttcttccgcctttttaatccttcaacatatacccgcaagttatagccaatctttttttattctttaatgtttggttaaccttctggcacgctttgctcatcacaacacaacataagagagtcgggcgatgaacaagtggggcgtagggttaacatttttgctggcggcaaccagcgttatggcaaaggatattcagcttcttaacgtttcatatgatccaacgcgcgaattgtacgaacagtacaacaaggcattcagcgcccactggaaacagcaaactggtgataacgtggtgattcgtcagtcacacggtggttcaggtaaacaagcgacgtcggtaatcaacggtattgaagctgatgttgtcacgctggctctggcctatgacgtggacgcaattgcggaacgcgggcggattgataaagagtggatcaaacgtctgccggataactccgcaccgtacacttccaccattgttttcctggtgcgtaagggcaatccgaagcagatccatgactggaacgatctgattaaaccgggtgtttcggtgatcacgcctaatccgaaaagctctggtggcgcacgctggaactacctggctgcctggggctacgcgctgcatcacaacaacaacgatcaggcaaaagcacaggattttgttcgggcactgtataaaaacgtcgaagttctggattctggcgcgcgcggctccactaacacctttgtcgagcgcgggattggcgatgtactgatcgcctgggaaaacgaagctctgctggcagcgaatgaactggggaaagataaattcgaaatcgtcacgccgagtgagtctatcctcgcagagccaaccgtgtcggtggtcgataaagtggtcgagaaaaaaggcaccaaagaggtggcggaagcctacctgaaatatctctactcgccagaaggtcaggaaattgccgcgaaaaactactaccgtccgcgcgacgctgaggtggcgaaaaagtacgaaaatgcgtttccaaagctgaagttattcaccattgatgaagagttcggcggctggacgaaagcgcaaaaagagcattttgctaacggcggtacgttcgatcagatcagcaaacgctgatttccccaggataattatcaaacccggtggtttctcgcgaccgggttttttatttgtcacgattttgcgttacccttgcatctctttgagatacagggaaaaaaagatgaaaaaagcgggtcttctttttttggtgatgatagttatcgccgttgtggctgccggtattggttactggaaattaaccggtgaagagtcggatacattacgtaagattgtccttgaggaatgtttgcccaatcagcagcaaaatcaaaatccttcgccatgtgcggaagtcaaacccaatgccggatacgtggttttaaaagatcttaatggtccactgcaatatctgttgatgccaacgtatcgtattaacggtactgaaagtcctttgttgaccgatccttcaacgccgaacttcttttggttggcctggcaggcgcgtgattttatgagcaaaaaatacggccagccggttcccgatcgcgcggtttctttggcgatcaactcccgcaccgggcgtacgcaaaaccattttcatattcatatctcttgtattcgtcctgatgtgcgcgaacaactggataacaatctggcgaacatcagcagccgctggttgccactgccaggtggtttgcgcgggcatgaatacctggcgcgtcgggtaacggaaagcgaactggtacaacgcagcccatttatgatgctggcagaagaagtacctgaggcgcgggaacatatgggaagctacgggctggcgatggtacggcagagtgataactcatttgtattgctggcgacacaacgaaatctactgacgcttaaccgtgcttcagccgaggaaattcaggatcatcagtgtgagattttgcgttaaggcgaagagttaaggaaagtaagtgccggatatgaaatccggcacctgtcagacttaagcctgtttagccgcttctgcagctttaacgatcactgcgaaagcgtcagctttcagagaagcaccgccaaccagcgcgccgtcgatatctggctgagcaaacagttctgcagcgttagacgcgtttacagagccgccgtactgaatgatcacttgttcagcgatgttagcgtcaactttagcgatgtggtcacggatgaatttgtgaacagcctgtgcctgagccggagttgcagatttgccagtaccgattgcccatacaggttcgtaagcgataaccgcaccttcgaatgccgcagcaccctgagttttcagtaccgcgtcgatctgacgtgcgcaaacttcttcagttttgcccgcttcgttttcagcttcggtttcaccgatgcacagaaccggagtcaggccctgctctttcagcaccgcgaattttttcgcgatcagttcgtcagactctttgtggtaagtacgacgttcagagtggccgatgatgatgtactgagcgccgatgtctttcagcatagcggcagaagtttcaccggtgaatgcgccggacaggttcaggtccacgttttgcgcacccagcatgatgtggctgccttcagcttcgcgcttcgccatatcgatgtacatttccggtggtgcgattgcaaccgcacagccagcaacacctgccagctctttacgcaggttagaaaccagctcgtgaaccatgtggcggctgccgttcagtttccagttacccatcactaaaggatgtcgcattttaattctccacgcttataagcgaataaaggaagatggccgccccgcagggcagcaggtctgtgaaacagtatagagattcatcggcacaaaggctttgctttttgtcatttattcaaaccttcaagcgattcagatagcgccagcttaatcggttcaacagcgaaggtcagccccttttcgccgttgtccgcgacaacataacgcagtgcaccttctgtctcggtgtaataacgtttgtttttccccgccgttagtagcgactgcagttttttctggctttgtgttttggtcattaatggggtgagtgtgcggatcactgctgccatgtattcctgagctttcgctttcgctgctttttgctctggcccctggatgggtagccaggtcatttgaatgcttttgatttttaaggtaccgcgctccagcgctgtagaagcatacaagttctcgttaattttacttgcagcacgagtgagattggctttgtcgggactgctgtcgatggcacgaaattcgttcagtggcaggctaggattctggctgttaaagtcttctcgaaactggctgatggagagatcgaaagtaggggctccagccagcagataaggcgcggtcgttgccgtatctggtgtttgtgcatgcgccgttgttgtaacggttaatgcagaacataagagaaaaaacagcgtacaccctggcttcattgacagtaccttttgttatgactggctccgattaaaacgatatctgtcgcccttgtcaaaagggtagaatcctggaaaagacaaccatcaaggaacttacatgaccatacagcaatggttattctcatttaaagggcgtattggacgccgtgatttctggatttggataggcctgtggttcgcaggcatgctggtgcttttctcactggcgggtaaaaatttactcgatattcagaccgcggcgttttgccttgtgtgcttgctttggccaacagcggcagtaactgttaagcgcttgcatgatcgcgggcgttccggcgcatgggcatttctgatgattgtggcgtggatgctgctggcgagtaactgggcgattttaccgggtgtctggcaatgggcggtggggcgttttgtcccgacgttgattctggtgatgatgcttatcgatcttggtgcgtttgttggcacacaaggcgaaaataaatatggtaaagatactcaggatgtgaagtataaagccgacaataaatcaagtaattaacctttaatatatctcttactgctattttttccgggattgttatttccacgatgcaaatgacaatacccggaaaatccttctgaactcttcaccttaagcaatatcaaaaaaaatggtaatccataagatcattacttgtttgttcttcccttaacggcgcattattcttaagtcgtaatcgacagagaggcgaatatacagaggtgccctatgaaagatgtcgtagataaatgcagtactaaaggatgtgcgattgatatcggtacggtgattgataacgacaactgtaccagtaagttttcgcgcttttttgccacccgcgaagaagcagagtcttttatgaccaaactgaaagagcttgccgccgctgcatcctctgcagatgaaggggccagcgtggcctacaagattaaggatctggaggggcaagttgagcttgatgcggccttcactttctcatgccaggccgagatgattatttttgagttatcactgcgttcgttagcttgatggagttgctttagaaggagttaaacatggcttataaacacattggcgtggcaatttccgggaatgaagaagatgccttactggtgaataaagctctggagctcgccagacataatgacgctcacctgacgttaattcatattgatgatggcttaagcgagttgtatccgggtatctacttccctgcaacagaagatattcttcaattgttgaagaataagtcggataacaagctgtataaactgacgaaaaatattcaatggccgaagacaaaactgcgtattgaacgcggagaaatgccggaaacactgctggaaattatgcaaaaagagcagtgcgacctccttgtctgtggtcatcatcactcatttatcaaccgtttgatgccggcatatcgcgggatgatcaataagatgagtgcggatttgctcatcgtgccgtttatcgataagtaaccgcttaccagtaatgctccgctgtcatatggcccggtcggcgacgtaaatgtttcgtcatctgccgggtctctttcagcaactgttgtgtatcgcgcaccatctgtggattgccgcacagcatcacatggctggtttctttattcatcggcaggccaatcgcgctttccagttccccactttcaattaacgccggtatccgcccggtgagcgaccccgctgccgtttcccgactgaccaccgtctgaatgcgcagtttcccttcgtagcgtttttccagttcttgcatcagtggcaaatagcttaagtcggcggcataacgtgcggcgtgaaccaggaccagatttttgaagcgatctaaatctttgcctagttgcagaatcgataaataagggccaatcgctgtaccggttgccagcatccatagcgtttcgcagtccggtacttcatccagaacaaagaagccagctgcttcgctaaccacctgcacttcatcgcctggtttcagtgccgccaatcgtgggcttaatttgccatcggggacggtgaccaggtaaaactccagatcgggattatcgggcgagttaacataggagtaggcgcgctggacgcgttcgccgtcgatttcaaggccaagcttggtgaattgcccggcggtaaacggaagcacgggggcgtgaacggtgagactaaacagggcgtcggtccagttctgcactttagtgactttgcctgttacccaatcagccatgtttttctcctgttttgattgacttgccttatcttcgttctccgaacaaaaaattccagtcccgaaggactggaaggctcaatcgatcaaatcaatcagaggatgtgcacctgcatttccgggtctttgcgatccagatagtggatggactgaatgcggcgaatggtgcgtgacttgccgcggatcagcagcgtttcggtagtcgcgatattgcctttgcggctaatgccttccagcagatcgcctttggtaataccggtggcagagaagatgacgttatcgctgcgcgccatatcgcccaggcgcaatactttaccggcttcgatgcccatcgctttgcagcgtgccagctcctgctcgccaatgcgacgattctcttcgttgtcgcctttgacgtcatgacgcgccagcagacgaccgttcatgtcgccatctaatgcgcggatcaccgccgcagaaactacgccttccggcgcgccaccaataccgtacagcacgtcaacttcgctgtctggcatacaggtgagaattgaggccgcaacgtcgccatccggaatagcaaatacgcgtacgccgagttgctgcatttcagcgataacggcatcgtggcgtggtttagccagtatcgttaccgtcagttcgctcaacggtttgccgagcgccgccgctacattgcgcaggttatccgccagcggcaggttcagatcaatggtgcctttggctcccggcccgacaatcagcttctccatatacatatccggcgcattgaggaagcagcctttatcgcctactgccagcaccgccagcgcgttagcctggcccatcgccgtcatgcgcgtgccttcaatcggatcaacagcaatatctaccgcgtcgccgcgaccagtaccgactttttcaccaatgtagagcatcggtgcttcgtcgatttcaccttcaccaatgacgatggtgccgtcaatgttgacctggttgagcataatacgcatggcgtttaccgccgcgccgtccgcggtgtttttatcgccgcgtcctaaccatttgtagccagccagcgccgcagattcggtgacgcgggaaaattcgatggcaagttctcgtctcatagcaaactctaagcagtaaggaatggcgcgaagtgtagcacaggggaagggtgggattattgatgtgtgcggggttgcccccgcacggtttcaggactaccggatgcggcataaacgcttcatccggcatttacattactcgtcgtgttcttcccacgccatcgcgcgtttgaccgcttttttccagcctgcgtaacggtaattacgctcagtggtttcgatgcctggacggaactcgcgttcaatcaccgctttctcttgcagctcgtcgaggttctgccagaaaccgaccgccagaccagcaagataggccgcacccaatgcagtcacttcgcgaacttccgggcgctcaacgcgggtgccgagaatatcggactggaactgcatcaggaaattgtttgctactgcgccaccatccacgcgcagggcgtgcagacggataccagagtcggcctgcatcgcttccagcacgtcacgcgtctgataagcaatagactccagcgtcgcgcgtataatgtggttagcgttcaccccacgagtcagaccgaaaatcgccccgcgcgcatacgggtcccagtacggcgcacccagcccggtaaatgccggaaccacatacacaccattggtgttttgcactttggtggcgaaatattcggaatcgtaggcgtcgttaatcaacttcatctcatcgcgcagccactgaatggatgcgcctgccataaacaccgcaccttccaacgcatagttcacttcgccagtcgggccgcaggcgatggtggtcagcaggccgttttctgatttcaccgctttctcgccagtgttcatcagcataaagcagccagtgccataggtgttcttcgccatcccttctttcacgcacaactgaccaaacagcgcggcctgctggtcaccggcgatcccggagattggaatacgcgtgccgcctttgccgccaatgttagtctgaccgtatacttcggaagaacgacgcacttctggcagcatctcgcgcggaatatccagcacttccagcattttgtcgtcccagtccagggtatggatgttgaacaacatggtacgagaggcgttggtgtaatcggtcacatggacacggccctgagtcattttccagataagccacgtatcaaccgtaccaaacagcaattcaccacgacgtgcacgctcgcgagagccttccacatggtcgaggatccacttcactttggtgccagaaaagtacgggtcaatcaccagaccggtattgctgcggatataatcttctaaaccgtcacgttttaaatgctcgcagatttctgcggtacgacggcactgccagacaatggcgttatagataggcttgccggtttctttttcccagacaatagtggtttcacgctggttcgtaataccgatagctgcaatttgatcggaactgatatcggctttcgccagcacttctaccagcgtggagctttgggtggcccagatttccattgggtcgtgttctacccaacctggttttgggtagatttgctcaaattcgcgctgcgacacgctaatgatattggcatcgtgatccattacgaccgcgcgggagctggtggtgccctggtcgagcgcaacgatatattttttttcagtcatgtttaattgtcccgtagtcatattacagcgaagctttttgttctgaaggagttgtggtttccttttcttccacaacacagatatcgcaaggcaaatggcgaccaatcagtttgcggtaggcaaatgcacctacaatcgcgccaacgatagggccgaaaagcggcaccaggaagtaaggaatgtctctgccgccggtaaaggcgacattgccccagcccgccagccaggcaaagactttcggaccgaagtcacgcgctgggttcatggcaaaacctgtcaatgggcccatagatgcgccaatgaccgcaatcagtagaccaatcagcaagggagccaaagggccgcgtggtacaccgttgccatcgtccgttaacgccaggatcagccccatcagaatagcggtaatcaccatctcaactgcgaaagcctgcacaaaattgatatgaggattagggtaagtagagaaagtgccagccagatcaacactttcaacgctgccgcgaacaatgtgatgagtctgctcgaagtcgaaaaataaattgtagtaaagcccgtaaactaaagccgcagcacagaaagcgccggcaacttgtgaaacgataaaaggaataactttgcgcttgtcgaaacaggcaaacagccacaatgcaatggtaacagcgggattaagatgcgcgccggaaacccctgcggtcaggtagatggccattgccacccccagtccccaaatgacactgatttcccactgaccaaaagacgcaccagcgacttttagtgctgcaacgcaacccacaccgaagaaaatcaacaacccggtaccgaggaattcagcaatgcactggcctttcaaggttgatgtttgactcataatcggatcctgaagagttaatgtttgttgtatgcgtgaaagtcacggacctccacgatgcttgtaggcatgctgtaaacttatcgttaacgagcaaaaacgagaaatatcgaacttaaaatgtgtgtgcttcgtcataaaatgagcgttatcgcgccatttattccatctgattgtacatgatgcatgtttgttagatcattcgcgcaacaaatttattaacattttcgattgatgtggattatgtcaccaggagaaggatgaaaagtgtggcaaaccgtaatctgcaaggcgtgccgctggacagcgatggcgcggcttcatacaatcggagctaactaaagtgcgctcgtatttattaaggcgtcaccggtaatcgggacgaggattttttatccatcaacgccttgcaattcaggagaggtatgacaatgtcattagaagtgtttgagaaactggaagcaaaagtacagcaggcgattgataccatcactctgttgcagatggaaatcgaagagctgaaagaaaaaaacaactcactgtcgcaggaagttcaaaatgcccagcatcagcgcgaagagctggagcgtgagaacaaccatctgaaagaacagcagaacggctggcaggaacgtctgcaggccctgctgggtcgcatggaagaggtctgattacgcttcatctttcgcgtaatttctttactgtgtaggccaacaggtaacgcagaaaaaaggcaccttgcggtgccttttctatcattcaatatccagcggatcttctgaaagaataatcccggtattgtcggcataaagatggtcgccggagaagaaggtgacaccgccaaaattgacgcggacatcgctttcgccaatgccttcgccagcggcaccaaccggaattgccgccatcgcctggatgccgatatccaactcttccaggtcatctacctgacgcaccgcgccgtaaatgaccagaccttcccattcattttgtactgccagacgcgccagttcagcatcgaccagtgcgcgacgaacagaaccaccgccatcgacgacaagaacacgaccacggccattctgttcgagcagatcgtacagcaacccgttgtcctcgaaacattttaccgtgattatttgtccgccaaacgacgcccgtccgccaaagttggagaacagcggttccacgacgttaacatcttcttgatagatgtcacaaagctcggaagtatcgtatttcataggcttaacattcagttgctgcgagaattttcagtatatcgcgctatgtgggctgttggcaaaatcatcaattgttaattgatatttgtcagttatgctgcccactggcttaggaatatccctaaaataaacagcaggttagtcagtaacgctcccttgacagtacgttccagcattggtcgcatcgccaccgggtccatttcccgcatcacataacgggcttgcttcaccagtaatggtgccgccagcaggaacagccagccccacaggctatgcagcgaaaagagattaaacagcgccagacacaccagtgagcccatcagcaggcaggcatgataacgacgcgcgttcacttcacctaagcgcaccaccagcgtgtttttgccattttcgcggtcgctattgatatcacgcaggttattaatattcagtactgccgttgccagcaggccgcatgcggtcgccggaaggatcagtgccggaatcaatgtatgagcctgtaaataccagctccccatgacactcaaccagccaaagaaaaccagtacggaaatatcacccagaccgatataaccataaggacgattgcccacggtgtaggtgatagcggcaatgatcgacaacccgccaagaatcaggaaaccgacaaaatcggccagcgtatggcatgccactgcaaccagtgccagcccggagagacagatgagcacgacggtaataatgagcgcccgtttcatctcttgctgggtaatgacccctttttgcatgccgcgtagcggcccaatgcggtcaggtttatcgctgccttttaccgcatcgccgtaatcattggcgaggttagaaaggatctgtaatagcccggcggtaatcagtgccagcagggcgaccagcggatcgaagtgaccttgccaccatgccagcgctgtcccgacgataattgcagcaaaggcgagggggagggttttaggtcgtaaactttccagccacgcctgagttcggctaatttgttgttcagtcataatacgcgccaataaaaatggggcctttcagccccatcaaacaatgatgaaaatgattgaacgcgattataggataaaacggctcagatcttcatctgccaccaacgcatccagatgtttgctcacataatctgcgtcaatgatgatagtttgaccgcttaaatcgctggcgtcgtaggaaatctcttccattaaacgctccagaacagtgtgtaaacgacgagcaccgatgttttcggtagattcgttcacctgccatgccgcttccgcgatgcgcttaataccggagtcggtaaactcgatatttacgccttcagtcgccatcagtgctttgtactgcacggtgatagaggcattcggctcggtcagaatacgctcgaagtcgctggtggtcagcgcctgcagttcaacgcggattggcagacgaccttgcagttccgggatcaggtcagacggtttcgcaatctggaacgcgccagaagcgataaacagaatgtggtcagttttgaccatcccgtgtttggtggaaacggtgcaaccttctaccagcggcagcaggtcacgctgaacgccttcacgagaaacatccggaccggaagactcgccgcgcttacagattttgtcgatttcgtcgataaacacgatcccgtgctgctcaacagcgtcgatagcgtcttgcttcagctcttccgggttcaccagtttcgccgcttcttcttcaatcagcagcttcatggcgtctttgattttcagcttacgcgctttttgcttctggccgcccaggttctggaacatggactgcagctggctggtcatctcttccatgcctggaggagccataatttcaacgcccatcggtgctgcggcaagatcgatctcgatttctttgtcatcaagctggccttcacgcagttttttgcggaatgcctgacgagcagcggacggttcctgctgctgttcggtctgtccccagttgtttttagcaggtgggatcagcacgtcgagaatacgttcttctgccagttcttcagcgcgataacggtttttctcgatagcctggacgcgtaccattttcacggcggcatcggtcagatcgcgaataatagaatccacttccttaccgacgtagcccacttcggtgaatttggtcgcttcaactttgatgaacggcgcattcgccagcttagccagacgacgggcgatttcagttttaccgacaccggtcgggccgatcatcaggatatttttcggggtcacttcatggcgcagctcttcgttgagctgcatgcgacgccagcggttacgcagagcaatcgccacagaacgcttggcgttgtcctggccgatgatgtgcttatccagttcgctgacgatttcgcgtggggtcatttcagacatgggagatccttacgctttgtagcttaattcttcgatggtgtggaaatggttggtatagatgcaaatgtcgcctgcaatatccaacgccttttcagcaatttcacgagcactcagttcagtattttctaacagtgcacgcgccgcagcctgggcgtaagggccgccggagccgatagcaataagatcgttttctggctgcaccacgtcaccgttaccggtgatgataagcgatgcagtttcatccgcgactgccagcagtgcttcaagtttgcgcagcatgcgatcggtacgccagtctttcgccagctcaacggcggctttgaccagatggccctgatgcatttccagtttacgttcaaacagttcgaacagcgtaaaagcatccgcagtaccgcccgcaaagcccgcgatgactttgtcgttgtacagacggcggacctttttcacgttgcctttcattacggtattgcccaacgtggcctgaccatcaccagcgatgaccacatggccgttacggcgtacgcttactatagttgtcacgagctgaccccttggttacgaatacagagtacaaaccccgtacaaaagtacggggcataatgcaattatagatgggggggattttgagggtttcaacccccggcggcgagccgaatgcagtttgtatgacccgccatcttcaaccgattgagggtgctgtctgcgttctctttgcctttcaccgggccaatgaccacacgattccagccattgttggtggtgattttcgagtcaaatccttcgaacgccagctgagcacgtaccgtctctgcctgttccgcgcctctgaacgaaccgcactgcaccatccagcggcgttcgtcttttttctccgccgtcggttttggcgcgtcagcggcacgagcaaccggcgcagcttgctgcggcttcgactgcgcggtcgtgtgcgcaggggtttgcagcagatcctggtacggctgctgagtagaagctggtttagactggcgcggttgcgcctgtaccggcgcggcttgcgacgtacgcgtctgctgctgccagctttgttcagtcgtacgcgactgctgagccaggcgttgctgctccgctaattgctgcgcctgacgctggcgttgtagcgtttgctgacgctgttccggcgtctgttcattccacggaacttcaaccagctgcgttggctgctggcgcatatcagcctgcatttgttcaagaagctgacgttgttctggtgtcagttgctccggcgttttcacttcaccaccggcagaaggttctgtgggcgcacgcacacccggctggcgactttccagctctttaatgtagcgccagcgttcttctggttttggtggtagtccgttaccggtcactttctggctttgcagcgtctcggactcttctttcttgtgatgcgtaatgaagtacagaccaccgataaaggtcacaagaacggcggcagcaatagcgaccatagcgggagaaaccgcaggcagatttcgttgctttttccgtgaggtgctcttttttcgccgcgaaggtgccggttggctgcggcgtacataatctcgttgtgccactatcgtttcgctgtatttattcgttcgtcagcccgccatgttacttaagcggcgggcctttgaccagtcacggcagtcttaaaggtttactttaaggtaacgcgcgtgttgatccccggatgataagttcgcagtccattaaacgagagccactgccaacgtgttgcccctgcatttgatcaagcaataacagcatagcttcccgaccgatttcgtaacgcggctgcgcgatggttgtcagcggcggatcacaaaattgcgtcaggtcgatgttatcaaaaccgattatggaaaggtcttccgggactttcagcccctggcgttttgcctgagaaagtgcgccgagcgccatcacatcgctatggcagaagacagcagtaggcggttgtggaagatcaagcagctgctgcatcgctttgcttccggcttcgaaggtgaagtcgccacgggcgatgtattgcggatcaaccataatgccgcagcgatgcagcgcctgaacatagccttgcaggcggtagtgacacagtggcatctcttcgggaccggctatacagccaatccgtttatgcccttgctcatataaataatttactgcatcaaatgcggcggtcagattgtcgatatgaactgtaggtagctccagttccggtgcgaattcgttcgccatcaccatcggcggcagattacgctgttcctcaatgctggcatcaaacggcagccttgaacccagcagcaacatgccatcaatttgcttggtgatgatcaaatcgataaaggttttttcctgctgattttgatgcgcacagtcgccaatcagcaccagatatccgtgatttgccgccgtaacttcgataccgcgaataatttcgctaaagaagggatcgcagatatccgggacaatcaccagaatggtgcgggattcattacgcttgacgttgcgccccataggctgcggtaaataacccacttcccgggccgctttttcaacccgattacgggtggcctgggagactttatcgggattcattaatgctcgggagacagtcgctgtagagacttttgccttgagggcaacgtctttcatggtcgcggcagtttcctgcttcttcgctttcacactcactcctcgcctggcacgtcaggcgtactacatccatgtttacttcacatcggcaacatttttagcagatagcgcgtgaaaacggttacagaattttcatgaaaagtgtgatgaatattgaatttttcgatccgcctcgcaacgtttgcgcattagccttcgatgggatcgacatccaacacccatttcaccttgcgggaatccggtattgtattaataagcgccagcgtaccactaatgatgtgttgcaagcgcacgcgggaagggtgctgcaacaagatctgccagcgccagcggccaccacgcttaggtgccagagccggaaccggaccgagaacccacagtttgtcgtctgccagcgggctggagaggagcagattacgcagttgttgcaggaacagcggcgcatgctgattgttatgatcttccgcacgcacaatcacatggctggtccacggcggcagttgcatcatccgtcgctcagccagcgcctgttcggcaaaggcgtcgtagcctttatagagcaacgtttgcaacagaggatgttctggatggtgcgtttgcagcaccacttcgccttgtttacccgcacgcccggcacgaccagcgacctgggtgtaaagctgagcgaaacgctctgccgagcgaaaatcggcagaaaacagcgcgccgtccacatccagtaacgccaccagcgtcacatccggaaagtggtgacctttcgccagcatttgtgtgccgatcaaaatcctcgcaccgccgcgatgtacttccgccagttgctgttccagcgcccctttgcggctggtggtatcgcggtcgatacgagaaatgggcacatcagggaacagcggcgcaagcgtctgttcaagctgttcggtgcccagccccacgggtaccaggtgcgtggaaccgcaggaagggcactggcgcggcaccggacgctgactgtcacagtggtgacagcgcaaatgctgttgcgcctgatgcagcgtgtagtagtgatcgcaacgtgggcattcggcaatccagccgcagtcgtggcacagtagcgcaggcgcaaaaccccgacgattaagaaagaggataacctgattgttggcctgtaaatgctggcgcatacgggtgattaacgccggagccagacctgcctgcaccttctgaccttttaaatccagcacgtgttgaattgccggacgcgcattccccgcccggcgcgtcaggcgcagcaggcggtattttttctgctggacgttgcacaacgtttccagcgcgggcgttgcggagccaagaataatcgggatttgctcgctatgcgcacgatacaccgccaggtcgcgggcatgatagcgccagccttcctgctgcttgtaggagctgtcgtgctcttcatcaatgacaatcacgccgagatttttaaacggcgtaaacagcgcggagcgggtgccgatcacaatcgccgcctcgccatttttcgctttcaaccacgccgaaagccgctcgctgtcgttcaggccggaatgcagaacttccacgggggcattaaaacgttcacgaaaacgggcgatagtttgcggtgtcaggccgatttccggcaccatcaccagcgcctgtttgccctgagcgagcacgttttccagtacactgagataaacctccgttttaccggaaccggtaacgcccgccagcagccaggcagaaaaagtatctgccgcgctatgaattgcgccaacggcggtggcctgttcggtattcaatcgcaaccgctcaccagaaacggcatagttcgttcgccagtcgctaaactctggtgtttcacttgctaaatcacacagaccttttttgcgtagcgcctgcaacgcggcatcattaaattcgagcgtggcgacctggtcgcgccagattttgccttgccgtaacgccgccagcgcctgttgttgcttgggggagcgtttcaggctgttcagatccaccgcctggccttgttcagtggcaaaccagtaccacatcggcgcgttcgccgcaggccgcccctggcgcagtaaaatcggcaaggcatgaaacagcacatcgccaatcggatgatgatagtaatctgccgcccagagcagtaaccgccagacggagtgagtaaataccggctcaacgtccagcacttccactaccgctttcagctcgttaagcggcagctcactgacatcgctaactgacaccacaaccccgatgcgctcctgctgtttgccaaacggcacgcgcacgcgacacccggctttaaccgtcatgccttctggcagcagatagtcaaaggtacgaggaagcggaacgggcaaggcaacgtgggcaacgggcatagcatcatcctgacttgaaattcggtgggttagtatacacattgccgtagaagagtgcggatcagtttgcatacgctggttaatttctgtatgatttcgcgccttcgtacgaaatgatcgtattgaagctatacttttaacatcgcgtggtgtctggcgttagggctggaagagcgacgcggccttaaaccgaggttttcccatgaaaaaagatattcacccgaaatacgaagaaattactgctagctgctcttgcggtaacgtaatgaaaatccgctccaccgttggtcatgacctgaacctcgacgtgtgcagcaagtgccacccgttcttcactggcaaacagcgtgatgttgctaccggtggccgtgttgaccgcttcaacaagcgtttcaacatcccgggcagcaaataagaccggatttccgaaaaaagcgccgcacggcgctttttttgtgcctgtaatttgccttttataaattctgaaaaattccggggtgttaactcattatcatttcctgttgttgactggcgctaggcttctggttcttatttatttcaaaaggattttacgatgagcggaaaaccggcggcgcgtcagggcgacatgacgcagtatggcggtagcattgtccagggttcagccggggtgcgcatcggtgcccccaccggcgtggcctgttcggtgtgccccggcggggtgacgtccggccatccggtcaatccgctgctcggtgcaaaggtccttcccggtgaaaccgacatcgccctgcccgccccgctgccgttcatcctctcccgcacctacagcagttaccggacaaaaacgcccgcgccggtggggagcctcggccccggctggaaaatgcctgcggatatccgcttacagctgcgcgataacacactgatactcagtgataacggcggcagaagcctgtattttgagcacctgtttcccggtgaggacggttacagccgcagcgagtcactgtggctggtgcgcggcggcgtggcgaaactggatgaaggtcaccggctggccgcactctggcaggcgctgccggaagaactccgcttaagtccgcatcgttatctggcgacaaacagtccgcaggggccgtggtggctgctcggctggtgtgagcgggtgccggaagcggatgaggtgctgcctgcgccgctgccgccgtaccgggtactgaccgggctggtggaccgcttcgggcgcacacagacgttccaccgcgaagccgccggtgaattcagcggcgaaatcaccggcgtgacggatggtgccgggcgtcacttccggctggtactgaccacgcaggcgcagcgggcagaagaagcccggcagcaggccatttccggcgggacggaaccgtccgcttttcctgataccctgccgggttacaccgaatatggccgggacaacggcatccgtctgtctgccgtgtggctgacgcacgacccggaatacccggagaatttacctgccgcgccgctggtgcgctatggctggacgccacgcggcgaactggcggtggtgtatgaccgtagtggcaaacaggtgcgcagctttacttacgatgataaataccggggccggatggtggcgcaccgtcacacgggccggccggaaatccgttaccgttacgacagcgacgggcgggtgacagaacagcttaacccggcaggcttaagctacacgtatcagtatgagaaagaccacatcaccatcaccgacagcctggaccgccgtgaagtgctgcacacgcagggcgaagccgggctgaagcgggtggtgaaaaaggaacacgcggacggcagcgtcacgcagagtcagtttgatgcggtgggcaggcttaaggcacagacggatgccgcaggccggacaacagagtacagcccggatgtggtgacgggcctcatcacgcgcatcaccacgccggatggcagggcatcggcgttttactataaccaccacagccagttaacgtcagccaccgggcctgacgggctggaaatacgccgggaatatgatgaatccggccgtctgattcaggaaaccgcccctgacggcgatatcacccgctaccgttatgataatccacacagtgacctcccctgcgcaacggacgatgccaccggcagccggaaaaccatgacgtggagccgttacggccagttgctgagcttcaccgactgttccggctaccagacccgttatgaccatgaccgcttcgggcagatgacggcggtgcaccgcgaggaagggctgagccagtaccgtgcatacgacagccgtggacagttaattgccgtgaaagacacgcagggccatgaaacgcggtatgaatataacgccgccggtgacctgaccaccgtcattgccccggacggcagcagaaacgggacacagtacgatgcgtggggaaaggccatctgtaccacgcagggcgggctgacgcgcagtatggaatacgatgctgccggacgggtcatccgcctgaccagtgaaaacggcagccacaccaccttccgttacgatgtactcgaccggctgatacaggaaaccggctttgacggccgcacacagcgttatcaccacgacctgaccggcaaacttatccgcagcgaggatgaggggctggtcacccactggcactatgacgaagcagaccgcctcacgcaccgcaccgtgaatggcgaaaccgcagagcagtggcagtatgacgaacgcggctggctgacagacatcagccatatcagcgaagggcaccgggtgacggtgcattacgggtatgatgagaaaggccggctgaccggtgagcgtcagacggtgcatcacccgcagacggaagcactgctctggcagcatgagaccagacatgcgtacaacgcgcagggactggcgaaccgctgtataccggacagcctgcccgccgtggaatggctggcctacggtagcggttacctggcaggcatgaagctcggcgacacaccgctggtggatttcacccgcgaccgcctgcaccgggaaacgctgcgcagcttcggccgttatgaactcaccaccgcttacacccctgccgggcagttacagagccagcacctgaacagcctgctgtctgaccgcgattacacctggaacgacaacggcgaactcatccgcatcagcagcccgcgccagacccggagttacagctacagcaccaccggcaggctgaccagcgttcacaccaccgcagcgaatctggatatccgcatcccgtatgccacagacccggcaggtaaccgcctgcccgacccggagctgcacccggacagcaccctcagcatgtggccggataaccgtatcgcccgtgacgcgcactatctttaccggtatgaccgttacggcaggctgacggagaaaaccgacctcatcccggaagggggtatccgtacggatgatgagcgcacccaccggtaccattacgacagtcagcaccggctggtgcactacacgcggacacaatatgcagagccgctggtcgaaagtcgctatctttacgacccgctgggccgcagggtggcaaaacgggtgtggcggcgtgaacgggacctgacgggctggatgtcgctgtcacggaaaccgcaagtgacctggtacggctgggacggcgaccggctgaccacgatacagaacgacaggagccgcatccagacgatttatcagccggggagcttcacgccactcatcagggttgaaaccgccaccggtgagcaggcgaaaacgcagcgccgcagcctggcggatacccttcagcagtccggcggcgaagacggtggcagtgtggtgttcccgccggtgctggtgcagatgctcgaccggctggaaagtgaaatcctggctgaccgggtgagtgaggaaagccgccgctggctggcatcgtgcggcctgaccgtggagcagatgcaaaaccagatggacccggtgtacacgccggcgcgaaaaatccacctgtaccactgcgaccatcgcggcctgccgctggcgctcatcagcacggaaggggcaacagcgtggtgcgcagaatatgatgaatggggcaacctgctgaatgaagagaacccgcatcagctgcagcagcttatccggctgccggggcagcagtatgatgaggagtccggcctgtattacaaccgccaccgctattatgacccgctgcaggggcggtatatcactcaggatccgattgggctgaaggggggatggaacctgtatacatatccgctgagcccggtgaatagcatggatccattaggattatatgaatttaaatcaaaaaatatagatgatattggaatatttgcattggcaatgtgtaatggagaatcaattaacgagaataaagaatatggtggactaatatgtaagaagcaaggtgaatatttacccatgaatccgataagttcaaatgataatgatagtgtagacttgcgaaatataaaatgccctgaaggttcagagagagtaggcgattatcacactcacggtttttactctgacgataaaggaaataaagtaacaaaagaaaatgatgtttatgatagtctaaatttttcaagcaaagatttaacgaattcttatatgaatggaatgggaaaaaaagaatacagtagttacttgggaacaccaaataacacctatctaaaatataatcccaaagctaaagggaatggagttacaattatcaggcaagggagtaattaaaatgaaggcaatacaatgttgttatttccttgctttagtctccagtcatttaatggctggagttatgggtgatgataatatatttttaagtaattcggattcagctgctttatattgtgtggctaaaatatttccagatggagaaaatattttaatatataaagtaaatataattaatgctagttcaaaaaaagatgttttttttatgaaagcccaacatcaacccacaatgacataatggggggcgggggaatgtcatatgcctatgaatatgatgtaaaatataatatatgtcatttgagaaaaagagcagaatgaggtaaaaatctttggctgtgtattcagtctggtaatcatccaaggaaagcttatcagaagggtgatgactccaattagtagaacatatattttcgataaaagcaccgatgactttttcatgaagttctacagaacgcgagaaacagatggttctgcgggccagacgtttgattcgggttctcagggtcagattgttacgctcaatgtgctgagtaaaaatcttaccagtcagatgcttctccttcggtaactctctagcgtaactaccccattcgtcagtggtcaacatgccgatggtaaaagggtaagcagcgcccgcaattcacgacaggtttcgtcagtccgggggccaaaagtgtaggccagaacaccaccagttttcgtgttgtacacgtaccagagccagtgctgtcgcgctttactgccgacaaagctccattgctgactaagtttgcagatgagtgccacatcagcatgagcgaccggggatgacgttattcttcgtggcgagagttttttaaagttcggatgactgtattaatgccgattttcagcgtacgggcagtatcgcgaaccccggcaccgttgaaagtcatttcagcgatttggtctttaactcccggtttacggggctcgtaacagtaactgagctgaaatacccggtgacagtcacggccgcggaatcgatcatgtctttttgggttctgcccgtgacggtaaacctgaacggactggcaacgggggcaatgaaggttaactgtgaccatgaaacaaccttaaaagcgagtattatatccttaattcaactaattggaggcatcaccgtttaccggagcgacagcttgcggaaaggtcgtgcaactacaaagcaacaaacagactacggcgggaattatttttttcatcatccattaccacgaaaacagcggccactctttggcaaccgtggtgagttgtggcgcgtcgaaaacggcttgtggtgaaactaccgtttcctcaagcggaatatttttaccgtagcgttctttgagcttcgcctggaccagcgggttgctgagatcaaactctttcaacttctgctgttcgcccacgcgcattcccagcgcgttctggtaaaccttccacccacttccgaacagtactggcgatcgtcgctccatgagaagctgaaatcatacggtttaccgagataacgttttgccgtttgcgccagtttttgctgttgttcaacactcagtccgccttcaacgcggcgaacgacgtatttgcccttttcaccatgggcgatccactgcttgagcggggtgtatttcaccgggccgaccgcttcaaaaacgtagggctttttgttgcgtatcaccagcataccggtgtggctgtaatcggaatgggttgccagttggatcgctttactttgcgatgagcgagagatttgaaagatgatgtcgccagtttgcggctgccaggcaaaggcaggtacagaaaccagcaggctgaggatcagtagcctgattttcatcgttaaacgtccttgtatgaaaaaagcggctggttaactccgcgccgctcttttccgctttagtattcccacgtctccgggttaatccccatctcacgcatgatctcttttgccgcttccgggatttcgtcgctgcgctctttacgcagatcggcatcatccggcaaaggttgcccggtaaaggcatgcagaaacgcttcgcacagcagctcgctgttggtagcgtgacgcaggttgttcacctgacgacgcgtgcgttcatcggtgaggatttttaacaccttaagaggaatggaaaccgtaatctttttgacttgttcactcttcttgccgtgctcagcgtatgggctgatatattcgccgctccattcagccatgagatacttaatcctcttcgtcaataaattgagatcagaccacacaatttatgtgggtactgaccgtaaacccgcatagtttaccgtacaggcgttaccgtgacatcgtgtaatgcacctgtcggcgtgataatgcatataattttaacggctatttgggatttgctcaatctatacgcaaagaagtttagatgtccagatgtattgacgtccattaacgcaatgtttactctggtgcctgacatttcaccgacaaagcccagggaacttcatcacatgacgcgtaaacaggccaccatcgcagtgcgtagcgggttaaatgacgacgaacagtatggttgcgttgtcccaccgatccatctttccagcacatataactttaccggatttaatgaaccgcgcgcgcatgattactcgcgtcgcggcaacccaacgcgcgatgtggttcagcgtgcgctggcagaactggaaggcggtgctggtgcagtacttactaataccggcatgtccgcgattcacctggtaacgaccgtctttttgaaacctggcgatctgctggttgcgccgcacgactgctacggcggtagctatcgcctgttcgacagcctggcgaaacgcggttgctatcgcgtgttgtttgttgatcaaggcgatgaacaggcattacgggcagcgctggcagaaaaacccaaactggtactggtagaaagcccaagtaatccattgttacgcgtcgtggatattgcgaaaatctgccatctggcaagggaagtcggggcggtgagcgtggtggataacaccttcttaagcccggcattacaaaatccgctggcattaggtgccgatctggtgttgcattcatgcacgaaatatctgaacggtcactcagacgtggtggctggcgtggtgattgctaaagatccggacgttgtcaccgaactggcctggtgggcaaacaatattggcgtgacgggcggcgcgtttgacagctatctgctgctacgcgggttgcgaactctggtgccgcgtatggagctggcgcagcgcaacgcgcaggcgattgtgaaatatctgcaaacccagccgttggtgaaaaaactgtatcacccgtcgctgccggaaaatcaggggcatgaaattgccgcgcgtcagcaaaaaggctttggcgcaatgttgagttttgaactggatggcgatgagcagacgctgcgtcgtttcctgagcgggctgtcgttgtttacgctggcggaatcattagggggagtggaaagtttaatctctcacgccgcaaccatgacacatgcaggcatggcaccagaagcgcgtgctgccgccgggatctccgagacgctgctgcgtatctccaccggtattgaagatggcgaagatttaattgccgacctggaaaatggcttccgggctgcaaacaaggggtaaaaatgagtgtgattgcgcaggcaggggcgaaaggtcgtcagctgcataaatttggtggcagtagtctggctgatgtgaagtgttatttgcgtgtcgcgggcattatggcggagtactctcagcctgacgatatgatggtggtttccgccgccggtagcaccactaaccagttgattaactggttgaaactaagccagaccgatcgtctctctgcgcatcaggttcaacaaacgctgcgtcgctatcagtgcgatctgattagcggtctgctacccgctgaagaagccgatagcctcattagcgcttttgtcagcgaccttgagcgcctggcggcgctgctcgacagcggtattaacgacgcagtgtatgcggaagtggtggggcacggtgaagtgtggtcggcacgcctgatgtctgcggtacttaatcaacaagggctgccagcggcctggcttgatgcccgcgagtttttacgcgctgaacgcgccgcacaaccgcaggttgatgaagggctttcttacccgttgctgcaacagctgctggtgcaacatccgggcaaacgtctggtggtgaccggatttatcagccgcaacaacgccggtgaaacggtgctgctggggcgtaacggttccgactattccgcgacacaaatcggtgcgctggcgggtgtttctcgcgtaaccatctggagcgacgtcgccggggtatacagtgccgacccgcgtaaagtgaaagatgcctgcctgctgccgttgctgcgtctggatgaggccagcgaactggcgcgcctggcggctcccgttcttcacgcccgtactttacagccggtttctggcagcgaaatcgacctgcaactgcgctgtagctacacgccggatcaaggttccacgcgcattgaacgcgtgctggcctccggtactggtgcgcgtattgtcaccagccacgatgatgtctgtttgattgagtttcaggtgcccgccagtcaggatttcaaactggcgcataaagagatcgaccaaatcctgaaacgcgcgcaggtacgcccgctggcggttggcgtacataacgatcgccagttgctgcaattttgctacacctcagaagtggccgacagtgcgctgaaaatcctcgacgaagcgggattacctggcgaactgcgcctgcgtcaggggctggcgctggtggcgatggtcggtgcaggcgtcacccgtaacccgctgcattgccaccgcttctggcagcaactgaaaggccagccggtcgaatttacctggcagtccgatgacggcatcagcctggtggcagtactgcgcaccggcccgaccgaaagcctgattcaggggctgcatcagtccgtcttccgcgcagaaaaacgcatcggcctggtattgttcggtaagggcaatatcggttcccgttggctggaactgttcgcccgtgagcagagcacgctttcggcacgtaccggctttgagtttgtgctggcaggtgtggtggacagccgccgcagcctgttgagctatgacgggctggacgccagccgcgcgttagccttcttcaacgatgaagcggttgagcaggatgaagagtcgttgttcctgtggatgcgcgcccatccgtatgatgatttagtggtgctggacgttaccgccagccagcagcttgctgatcagtatcttgatttcgccagccacggtttccacgttatcagcgccaacaaactggcgggagccagcgacagcaataaatatcgccagatccacgacgccttcgaaaaaaccgggcgtcactggctgtacaatgccaccgtcggtgcgggcttgccgatcaaccacaccgtgcgcgatctgatcgacagcggcgatactattttgtcgatcagcgggatcttctccggcacgctctcctggctgttcctgcaattcgacggtagcgtgccgtttaccgagctggtggatcaggcgtggcagcagggcttaaccgagcctgatccgcgtgacgacctctccggcaaagacgtaatgcgcaagctggtaattctggcgcgtgaagcgggttacaacattgaaccggaccaggtacgtgtggaatcgctggtgcctgctcattgcgaaggcggcagcatcgaccatttctttgaaaatggcgatgaacttaacgagcagatggtgcaacggctggaagcggcccgcgaaatggggctggtgctgcgctacgtggcgcgtttcgatgccaacggcaaagcgcgtgtgggcgtggaggcggtgcgtgaagaccatccgctggcatcactgctgccgtgcgataacgtctttgccatcgaaagccgctggtatcgcgataacccgctggtgatccgtgggcctggcgcggggcgcgacgtcaccgccggggcgattcagtcggatatcaaccggctggcacagttgttgtaatttcagaaatttaataatgcccggtactcatgttttcgggtttatggtttctaatgaaatatattgaattatcataggattaggccggattaagcgtttacgacgaatccggcaagaagcaataagtacatggttagtttatatttgcagtccggtttgctttgcataccggattttctttttcttaccatcctgaagttttttcatcttccctgatttttcctcaccatcattggtcatttttcggttgacgcccttcggcttttccttcatctttacatctggacgtctaaacggatagatgtgcacaacacaacatataactacaagcgattgatgaggtaaggtatgagcttttttcacgccagccagcgggatgccctgaatcagagcctggcagaagtccaggggcaaattaacgtttcgttcgagtttttcccgccgcgtaccagtgaaatggagcagaccctgtggaactccatcgatcgccttagcagcctgaaaccgaagtttgtatcggtgacctatggcgcgaactccggcgagcgcgaccgtacgcacagcattattaaaggcattaaagatcgcactggtctggaagcggcaccgcatcttacttgcattgatgcgacgcccgacgagctgcgcaccattgcacgcgactactggaataacggtattcgtcatatcgtggcgctgcgtggcgatctgccgccgggaagtggtaagccggaaatatatgcttctgacctggtgacgctgttaaaagaagtggcagatttcgatatctccgtggcggcgtatccggaggttcacccggaagcaaaaagcgctcaggcggatttgctcaacctgaaacgcaaagtcgatgccggagccaaccgcgcgattactcagttcttctttgatgtcgaaagctacctgcgttttcgtgaccgctgcgtatcggcgggtattgatgtggaaattattccgggaattttgccggtctcgaactttaaacaagcgaagaaatttgccgatatgaccaacgtgcgtattccggcgtggatggcacaaatgtttgacgggctggacgacgatgccgaaacccgcaaactggtgggagcgaatattgccatggatatggtgaagattttaagccgtgaaggagtgaaagatttccacttctatacgcttaaccgcgctgaaatgagttacgcgatttgccatacgctgggtgttcgacctggtttataaatagtgtggcttttgtgaaaatcacacagtgatcacaaattttaaacagagcacaaaatgctgcctcgaaatgagggcgggaaaataaggttgtcagccttgttttctccctcattacttgaaggatatgaagctaaaacccttttttataaagcatttgtccgaattcggacataatcaaaaaagcttaattacgatcaatttgacctacatctctttaaccaacaatatgtaagatctcaactatcgcatccgtggattaattcaattataacttctctctaacgctgtgtatcgtaacggtaacactgtagaggggagcacattgatgagcacgtcagacgatatccataacacgacagccactggcaaatgcccgttccatcagggcggtcacgaccagagcgcgggggcgggcacaaccactcgcgactggtggccaaatcaactccgtgttgacctgttaaaccaacattctaatcgttctaacccgctgggtgaggactttgactaccgcaaagaattcagcaaattagattactacggcctgaaaaaagatctgaaagccctgctgacagaatctcagccgtggtggcctgccgactggggcagctacgccggtctgtttattcgtatggcctggcacggcgcggggacttaccgttcaatcgatggacgcggcggcgcgggtcgtggtcagcaacgttttgcaccgctgaactcctggccggataacgtaagcctcgataaagcgcgtcgcctgttgtggccaatcaaacagaaatatggtcagaaaatctcctgggccgacctgtttatcctcgcgggtaacgtggcgctggaaaactccggcttccgtaccttcggttttggtgccggtcgtgaagacgtctgggaaccggatctggatgttaactggggtgatgaaaaagcctggctgacccaccgtcatccggaagcgctggcgaaagcaccgctgggtgcaaccgagatgggcctgatttacgttaacccggaaggcccggatcacagcggcgaaccgctttctgcggcagcagctatccgtgcgaccttcggcaacatgggcatgaacgacgaagaaaccgtggcgcttattgcgggtggtcatacgctgggtaaaacccacggtgccggtccgacatcaaatgtaggtcctgatccagaagctgcaccgattgaagaacaaggtttaggttgggcgagcacttacggcagcggcgttggcgcagatgccattacctctggtctggaagtagtctggacccagacgccgacccagtggagcaactatttcttcgagaacctgttcaagtatgagtgggtacagacccgcagcccggctggcgcaatccagttcgaagcggtagacgcaccggaaattatcccggatccgtttgatccgtcgaagaaacgtaaaccgacgatgctggtgaccgacctgacgctgcgttttgatcctgagttcgagaagatctctcgtcgtttcctcaacgatccgcaggcgttcaacgaagcctttgcccgtgcctggttcaaactgacgcacagggatatggggccgaaatctcgctacatcgggccggaagtgccgaaagaagatctgatctggcaagatccgctgccgcagccgatctacaacccgaccgagcaggacattatcgatctgaaattcgcgattgcggattctggtctgtctgttagtgagctggtatcggtggcctgggcttctgcttctaccttccgtggtggcgacaaacgcggtggtgccaacggtgcgcgtctggcattaatgccgcagcgcgactgggatgtgaacgccgcagccgttcgtgctctgcctgttctggagaaaatccagaaagagtctggtaaagcctcgctggcggatatcatcgtgctggctggtgtggttggtgttgagaaagccgcaagcgccgcaggtttgagcattcatgtaccgtttgcgccgggtcgcgttgatgcgcgtcaggatcagactgacattgagatgtttgagctgctggagccaattgctgacggtttccgtaactatcgcgctcgtctggacgtttccaccaccgagtcactgctgatcgacaaagcacagcaactgacgctgaccgcgccggaaatgactgcgctggtgggcgggatgcgtgtactgggtgccaacttcgatggcagcaaaaacggcgtcttcactgaccgcgttggcgtattgagcaatgacttcttcgtgaacttgctggatatgcgttacgagtggaaagcgactgacgaatcgaaagagctgttcgaaggtcgtgaccgtgaaaccggcgaagtgaaatacacagccagccgtgcggatctggtatttggttctaactctgtcctgcgtgcggtagcggaagtttacgccagcagcgatgcccacgagaagtttgttaaagacttcgtggcggcatgggtgaaagtgatgaacctcgaccgtttcgacctgctgtaatctgaccttcttcagcgactgtctttcaggcagtcgctgaagtttctttaccggcgtatagtgtccacaggaaaactacacactggatctctcatgtctgccgcaggaaagagcaacccactggcaatcagtggcctggttgtgctcacacttatctggagttatagctggattttcatgaagcaagtcaccagctacatcggtgccttcgactttaccgccttacgctgcattttcggcgctctcgttttattcatcgtccttttattacgtggtcgcggaatgcgcccgacaccgtttaaatacaccttagccattgccctgttacaaacctgcgggatggttggcctggcgcagtgggcgctggtcagcggcggagcggggaaggtggcgatcctaagctataccatgccgttctgggtggtgattttcgccgcgttgtttctcggtgaacgcctgcgacgtgggcaatatttcgcgatactgattgccgctttcggcttatttttggtgttgcagccgtggcaactcgatttctcttcaatgaaaagtgccatgctggcaatcctctccggcgtcagttggggggcgagcgcgattgttgctaaacgcctatacacccgtcatccgcgcgtggatttattatcgttaacatcctggcagatgctctatgcggcgctggtgatgagtgtggtcgctttactggtgccgcaacgtgaaattgactggcagcccaccgtgttctgggcgctggcctacagtgcgattctggcgacggcgctggcgtggagcttatggttgtttgtattgaaaaacttgcctgccagtattgccagcttaagcacgctggccgttcccgtttgcggcgtactcttttcctggtggctgctcggtgagaatccgggggccgttgaaggtagcggtattgtgctgattgtgctggcactggcgctggtgagccgtaagaaaaaagaagctgtcagtgtaaaaagcatctgaattttttcttcatgtggggcgatcgcttatttaacaaaataacgataatgccccaccatccgccagctaaacagcacatcttcttcctgcgcgcctgcgccaatgttatgtatcaccagcggcgtaccgtcgcgggcgaagccatctgacaccaccccaatatgtgccagtccgttatccagtcgccaggagacaatatcgcccgcttgatagtcactggggttcttgctgatggggcgtgttttatcgtggcgggtaaaccaggtttccagattaggcacccgacggtgatcgatgttgctgtccgggcgctttaactgccatttttgcgggtactcggcaaaattcttcgccatatcttcgtgcaccagtttctgcaaatcgaccttctggctgcgcaatgcacggatcaccacatcggaacataccccgcgttcttgcgggacatcaccgccaggataggtaagctgcatatacgccggatcgtaaaatagcgtgctgccgatttgctgtctggcaccgtctgcgatggcaaggttggtattggcctggatttgtaccacggttggtggaacggcgggagattttaaggagtggctggtaaatgccgttagcaggctgagcagcgccagtgaagctttcatctggttcgtccgtgaaaataagagtcacagattcgaccttccgggctaacgattgttctgtggagaaaatgtccagaagcggataaaaaactcctgaacaacgtgggagtttcagattactggcacagagtgccggatgcggagtgaacgccttatccggcctacaaaagcacgcatattcaatatattgcagagatttcgtaggcttgataaacgtagcgcatcaggcaattttgcgttcaaactcccggacaagccgggagtttggagtaggttattcccactcttgcaggaaacgctgaccgtactggtcggctaccagcagagcggcgtaaacctgatctggcgtcgcgccgccaggcatgttgtgaatggtttcaccttctgcacatgccgcttctgccacaattcgcattttcgccgggacatcttctttaatatccagttgagcgagagttattggcaaacctaccgcatggctaagtgcagctacggtttcgatttcctcaaccggtgcgttttccagaaccagctgcgtcagcgtaccaaatgccactttttcaccgtgataatagtgatgcgcgtccgggatagcggtcaggccgttatgcaccgcgtgagccgccgccagcccgccgctttcaaaaccaacgccgctcaaataggtgttcgcttcaatcacgcgctccagcgccggggttactacatgctgttcggcggcaagcatcgctttttcgccttcttccagcagggtgttgtagcacagttcagccagtgccagcgccgcctgggtgcacttgccgcccgccatggtggtcgcgccgctacgagagcaagcacgcgcttcaaaccaggttgccagcgcatcgccgatacccgctgctaacagacgtgcaggtgcgcccgcgacgattttggtgtcgacaatgaccatattcgggttatttggcaacagcagatagcggtcaaactcaccctcatcggtgtagataacagacaatgcgctgcacggtgcatcggtagaggcgatagtcggtgcgatcgctaccggaacacccatgaaatgtgccagtgctttggcagtatcgagggtttttccgccaccgataccgagaattgcgccacactgcgcagtctccgcgatgccacgcagacggtcgatctcattttgcgaacattcaccgccaaacggcgcaatttctactaccagtccagcatctttaaagcttttctcgacagtggattgagcaaaacctaaaacaaatttgtcacccaccactaaccagcgttctgccagcggcttcaggtattcgcccagacgattaatcacatcagcgccctggatgtatttacccggtgattgaataatgtggtccataattgctcctttagagatgagtagtgccaaatgcggcattccagtcgtgttcgaacttctctatagctgactctaccgcaggggtgttgagcatttgttgcgctacatctaagggcagggtgatggattcacatcctgccagtaaacagtccagcgcctgacgcggcgttttaaagctggccgccagcaccatgctttctggtgcgtgcatttctaacagcgcttgcagctcctgaaccgtacgaatgccgtccccgccctgggcatctacgcggttaacatacggagcaacgtattttgcccctgccagcgcggccagtaacccttgtgcagcactgtacactgcggtgccaagcgtagtaataccctcttttttcagcatcttaatggcggccagaccttcggaagtcaccgggattttcaccacaatgcccggaatggcgtcgcgcaggcgcttcgcttcttccaccataccctgcgcgtcacgactcatagtctgagcaaacagaatgccctcatcaccaatcgctttttgcagacgcggcagaacttcccatatggactccttgctggcagcgataatgctcgggttagttgtcaccccggcaatggggaatatgcgtgccagacgttcgacttctgcgacgttagcggtgtccagatacagttccatgatgtttccttttacagttccagttcatgttgcagcaggctggcgatagcgtcggcagaggcggcgttaaccagcgcgttacggaattcttcgtgcatgatgcggcgagcgaggcgcgagaaaatgcgcatgtgctgatcgcccgcagcgtgtttgttcagggttaacataatgatgaattgcgcttcatcatcgccccagcgcaccggcgcttgcagacgcgccacgctgatggtggattgctcaatgtgttctgatttgctgtgtggaatggcaaaactaaagcccagaccggtagagaaaacggcctcgcgcgcccataagtcggcttccagtttacgcggatagcggcagcggcccgccagcagcaggttatcggtcatgcctttgagcacttcttctttgctgcgccagtcactttccagcgtgatgcactcggcggtgaccagcggtgcgtcctgttgggtcatgcggaattgcgccagcaggtgttccacttccagcgaagtacggcaggccattgcttggttgagcaacttgcggcactcacggctatcaagttgcgccatccgcgctttcgccgccggaattgatggtgcgctcatgctgagttcatccagccctaagccgaccagcaacggcagcacggaacctttcgctcccagctcaccgcacagaccaatccatttgccctggcgatgcaccgcctgcacggcgtaatcgagcgcccgcaagaatgccggattcaggctgttgtagtgacgagtaaccttagcgttatcgcgatccactgccagcagatattgcgtcaggtcattactaccaatactaaagaaatcagtctcttcgcagcattgatcgatgatgaacatcaccgacggtacttccagcataatgccaagctggatcttctcatcaaacggaatgtgttcgttacgcagttgctgtttggcttccgccagtttttctttcacccataagatctcttccattgaggagatcatcgggatcatgattttcaggctgccgtgagcggaggcgcgcaggatcgaccgtagttgtgtggtgaacagcgaggcgtattcttcataaatacgcacagcgcgataaccgaggaacgggttagcttctgccggaatgttcagataatcaacgggtttgtcgccgccaatgtccatagtgcgcacaataatgctgcgtccgttggcagactccagcgcctgacaaaaatgttgtacagctcgctttcgcccggtgcactggtgcgatccatatagagcatttcagtgcggaacaaaccaacgccttccgcaccattgccgaatgcggcctgcgcttccacggagtgagcgatgttagcggcaatttcaatgcggataccgtcagcggtacgggcttgttgggtcagccagacacgctgttgctcacgcagggcgtcctgtacgcgggcttcttgctgataataacgagctacggcttctcctggctcaaccacaatcgccccagcgttgccgtcgatataaatcgtttgatgctgccacggagtaagggcatcaatatctacaccaaccagtgtcggaatgttgaacgaacgggcaagaattacggtatgtgaggtggtgccgccacttttcagtaacagacctttgaggtgatttttatccagttcgaggaactggctgggagtcagttcatcagccatacaaatggcgggctgcgtcagtttgcccggtgccgggaagcgttgctcaccgtagatttgctggagtaactggaagcagacgtcgcgtacgtccagggcacgttcttgcaggtagctgctgctggaacgggcgaactcttcgcaaaagtgattcgcactggtgacaatcgcttcggcgcagcttaatccggcgctgacgcctgccagtaaatgttcgcgcagggaagtatcgccagccagggatcggtgcgcttccagaatcgcgctggtggcaccgtcgctatccagcagacgaaactcaatgtttttcagtaccagcgtcaggccgttttccagtgcggattgctcggcgtcaacgcttttggctgcgggaagattacccagcgcattgagatctaaagaagagatcggcgtcagaatgccgcctgcactaccgctgcacacggtgcgggcgcggataatttgcggattcagattggtcagtgaaaccggcagtggttccagttcgtcagatttaacttccgccagcggcgcatcgcagtgggggaattcatcgcgcagccattggcttaaacgctggtgcgcttcctgttcgtcggccccggaaatcagtaactggcagttatcgcccgccagcgtatcggtgccaatcagcgcaagggcgcttttggcgttgcccttgcggtcagtgcgcaggttatgccactcaatttgtgatgaaaaagtattacacagcgtttcaacgtggcttgccggacgtgcatgtacgccgttaggtagctcacaaataaattccacaatcagggccattgcctctctcccggtacggttttctgtttacaggataagagcgcacggcaacggcctgccatgtgacaaatctgccaaaagctggacaaatgtaatgtaaccgtcaatttgcgacgcgtctcacaagacgctgttttgcggcatgcttccggtttatcgcaagttatgaggcggatcgcatttttgtactgatattacaaaagtccagtaaatggcctttttatccactgtttgctccgcctgcgattgcctattgtttcctccatcaaaaatatggacatgggctttcgcaagcccgggagcagcttatgaatgagttggtgcagatcctgaaaaatacccgtcagcatttaatgacgggcgtttcacacatgattcccttcgtggtatcgggcggtattttgctggcggtttccgtcatgttgtatggcaaaggcgcagtgccggatgccgtagccgatccaaatctgaaaaaactgtttgatatcggcgttgcgggcttgacgctgatggtgcctttcctcgcagcgtacatcggttattccattgcagagcgttctgcgctggctccgtgcgctatcggtgcctgggttggtaacagctttggtgcgggcttctttggtgcactgatcgccgggattatcggcggcatcgtggtgcattacctgaagaaaattccggtgcataaagttctgcgctcggtgatgcctatcttcattattcctatcgtcggcacactgattaccgcaggcatcatgatgtggggcttgggcgagcctgtaggggcgttgaccaacagcctgactcagtggcttcaggggatgcagcagggcagcattgttatgctggcggtgatcatggggctgatgctggcgttcgatatgggcggtccggttaacaaagtggcctatgccttcatgctgatttgcgttgctcagggtgtttataccgtggtggccattgctgccgtgggtatttgtatcccgccgctggggatggggctggcgacgctgattggtcgtaaaaatttctccgcagaagagcgcgaaaccggcaaagcggcgctggtgatggggtgcgttggggttactgaaggggcgattcctttcgccgctgccgatccgctgcgtgtcattccttccatcatggtcggttctgtttgtggtgcggtaactgcggcgctggtcggtgcgcagtgctatgcaggctggggtggtctgattgtgctgccggtggttgaaggcaagctgggttatatcgcagcagtggctgtcggagcagtggtgacggctgtttgtgtgaacgtgctgaaaagtctggcgcgtaaaaatgggtcttcgactgatgaaaaagaagacgacctggatttggattttgaaattaattaattgaggaacgagccatgacgaaaattattgcagtaaccgcatgtccttcaggtgttgcccatacctatatggcagcagaggcgctggaaagtgccgcgaaagcgaaaggctgggaagtgaaagtagaaacccaggggtcaattggtctggaaaatgaactgactgcggaagatgtggcgagcgctgatatggtgattctgaccaaagatatcggcatcaagtttgaagagcgttttgctggcaagaccatcgtgcgcgtcaacatcagcgatgcagtaaaacgtgctgacgccattatgagcaaaattgaagctcacctggcgcaaaccgcttaagttcttctcccgctcgcaagggcgggttcgctttcccacaggagttcctcatgacgaatcgtatctctcgcctcaaaactgcactgtttgccaatacccgtgaaatctcgctggagcgggcgctgctttataccgccagccatcggcaaaccgaaggcgaaccggtgatattgcgccgggcgaaagcaacagcgtatatccttgaacatgttgaaatttcgattcgtgatgaagaactgattgccggtaaccgcaccgtaaaaccgcgcgctgggattatgtcgccggaaatggacccttactggctgctgaaagagctggatcaattcccgacgcgtccgcaggaccgctttgctatcagtgaagaagataaacgtatctaccgtgaagagttgttcccgtactgggaaaaacgttcgatgaaagatttcatcaacgggcagatgacagatgaagtaaaagccgcgaccagcacgcagattttcagcatcaaccagacagataaaggccaggggcacattattattgattacccacgcctgttgaatcacgggctgggggagctggtggcacagatgcagcaacattgtcagcaacagccggagaatcacttttatcaggcagcgctgttactgctggaagcctcgcagaaacacattttgcgttacgccgaactggcggaaacgatggcggcaaactgcacagatgcccagcgtcgcgaagagctgctgactattgcggagatctcccgccataacgcgcaacataagccgcagacgttctggcaggcgtgccagttattctggtacatgaacatcattctgcaatacgaatccaacgccagttcgctatcgttggggcgcttcgaccagtatatgttgccgttctatcagacatcattaacccagggcgaagatgcggcgttcctgaaagaactgctcgaatctttatgggtgaaatgcaacgacatcgtgctgttgcgctccaccagtagcgcgcgttatttcgccggtttcccgaccggctataccgcactgctcggcgggttaaccgagaacggacgtagcgcggtgaacgtgctttcgttcctttgccttgacgcctatcaaagcgtgcaattaccgcaaccgaacctcggcgtgcgcactaacgccttgatcgacacgccgttcctgatgaaaaccgccgaaaccattcgcctcggcaccggtattccgcaaatctttaacgatgaagtggtggtgccagcgttcctcaaccgtggcgtttcgctggaagatgcgcgcgactattccgtagtgggctgtgtggaattatctattcccggcagaacctacggcttgcatgacatcgcgatgtttaatctgctgaaagtgatggaaatctgcctgtatgaaaatgaaggcaatgctgcgctgacttatgaaggtttactggagcagatccgcgccaagatcagccactacatcaccctgatggttgagggcagcaatatttgtgatatcggccatcgcgactgggcacctgtaccgctgctctcgtcttttatcagcgattgtctggaaaaaggccgcgatattaccgatggcggcgcgcgttataacttctccggcgtacaggggatcggtatcgccaacctgagcgattctctccatgcgttgaaagggatggtttttgagcaacagcgtttaagttttgacgaattgctgtcggtattaaaagccaactttgcaacgccagaaggcgaaaaagtccgtgctcgcttaattaaccgcttcgagaaatacggtaacgatatcgacgaggtggataacatcagcgccgaactgttacgccactactgcaaagaagtggaaaaataccagaacccgcgcggcggttacttcacgccgggatcgtataccgtttctgctcacgtcccgttgggatcggtggttggcgcgacgccagacggtcgttttgccggggaacaactggcagacggcggcttgtcacctatgctgggccaggacgcacaagggccaacagcggtactgaagtcagtcagtaagctcgataacacgctgctgtctaacggtacgttgctgaacgtgaaattcactccggcgaccctggaaggtgaagcgggattacgcaaactggccgacttcttacgggcgtttacccagcttaagttgcagcatattcagtttaacgtggtgaacgccgacacgttgcgggaagcgcaacagcgcccacaagattatgccgggctggtggtgcgcgttgccggatacagcgccttctttgtcgaactgtcgaaggagatccaggatgacatcatccgccggacagcgcatcagctgtaacgttgtggaaacgcgccgcgatgatgtggcgcgcattttcaacattcagcgttattcactgaatgacggcgagggcattcgtacggtggtcttttttaaaggctgtccgcatctttgcccgtggtgtgctaatccggagtcgatctccggcaaaatccagacggtacgcagagaggcgaaatgtctgcactgtgcgaaatgtttgcgtgatgcggatgaatgcccctccggggcgtttgaacggattggccgcgatatcagccttgacgcgctggaacgggaagtgatgaaagatgacattttctttcgcacgtccggcggcggcgtcacgctttctggcggcgaagtgttaatgcaggcggagtttgctacccgtttttacagcggctgcggttgtggggcgtgtcatgcgccattgaaactgccggagacgcgccagccagcaagctattaccactggcgaaattgtgcgatgaagtgctgttcgatttaaaaattatggacgcgactcaggcgcgggatgtggtgaagatgaacctgccacgcgtgctggagaatctgcgtttgctggtgagtgagggtgtcaacgtgatcccgcgtttaccgctgatccctggtttcacgctcagccgggagaatatgcagcaggcgctggatgtactgatcccgctgaaaatcaggcagatccatctgttaccgtttcatcagtacggcgaaccgaaataccgcctgctggggaaaacatggtcgatgaaagaggtgcctgcgccgtcgtcagccgatgtgacaacgatgcgcgaaatggcagaacgggccggatttcaggttaccgtgggaggttaaaatggcatacctggtggcagtaaccgcctgcgtaagcggcgtggcgcatacttatatggcggcggaacggctggaaaagttgtgccagttagagaagtggggcgtcagcattgaaactcagggcgcgctgggaacggagaatcgtttagcggacgaggatatccgtcgggcggatgttgctctgttgattacggatatcgagcttgccggtgccgagcgatttgaacattgccgctatgtgcaatgcagcatctacgcattcctgcgtgagccgcagcgggtaatgagcgcggtgcgcaaagtgctttctgcgccgcagcaaacccatcttattctggagtagtcggtttttctgtcagttggctgtggtactgccggcgatattccgacggcgagcgttcggtgtttttacgaaacagacggcagaagtagttgctgtcgacaaagccgcaggcgtgcgccacttcttttaccttcaggtcatagcctttcaataacgtcttagcgtgctccagtcgcgtgtgattcaggtattcgttaaaaccaatggcccccgttttttgaaacaggtgcgagagatagtttggtgaaatatagaatgcctgtgcgacagattcgcgggtaagcgcggaggcatagcgttcgtcgatataatcgcgaatagcttcaaatagtgcctggctgcgtgaggcggtctggatttggctgccgagcaaatcgcggcagtggctaagcaggctggcgacgataagccttgccgtttgctgctcctgcggctgcatttgcatttcattgagcgtttgtagcagaaaagaacctatgcgtgggccgcgccgggcgacgtgttgcttcgccagattttgatattgtttgccatcccattgcacgacgctgaagccgagttgctgtttgccaaacagcacgctaaaggtagtagcgggggcttgccattgtggaaaattccagccaccagcgggaacgtacagcacatcgccgggaactaacgttgctccagcgccggtatcaacaaactcaccttccagcactatttccagccgtggaaaatcgacctgatacgcaagatcgggcgccggaccgttactgctggcaaagtaaatctggcgcagggacagcgggccgttgatcaggcgggagagcagatagctgacgtcgtgatacatgttattcccttaggtatgtagacgggaaaacagtaactggcattattaaaaaaggccacctgaaaagtgtggcctgaggggagttcgatgtaaacattgcggcagttgtattgccggatgtggcgtaaacgccttatccagcctaccgccgcgatctgtaggccggataagacgcgtcaagcgtcgcatccggcaaatagcgcctggctgataattactgattacccacctgatcgccatacggcagtgtgtcgtaatcgatcagcgcgtttttcttgtacgggttaccaatccagcgggtagtttctttgaactgcggattcaccactgaacgggttggatcgtaaccgtcgtaagataagcccgccaaatctgaccaggtgtggatcagttccgccaggctgtatttacgatcgacatcctgtgagaaatcacggggatgagtcgcttgccatttttccgacgtccacagcaggaacggaatggtgtacatatgacgcgtcgggttgtcctcattacgcccctgggttttatgaggcggcgtgtcgtaaacctcttcaccgtggtcagagaagtaaaccaggaatccgttcgggtctgccgctttaaagtctttaatcaggctggcaaccacatgatcgttatacaggttagcgttgtcataatcgttatatgattccagctcttccgcgtttaatcccggcggaacatgatcggtattgccatcaaacttgccctgattttccgggtagcggtatttgtatttgatatgcgtacccagcagatgaacaatgatcagtttcttcggcgcagggtccttcagcacttcctggaacggcttcagcacgttagtgtcgtattcacgcgcactctgcgtacgttgctggttcatgtagtactgcttgtcggtctggcgcgaaaataccgtcagcatggtattgcgggcggtcatcgtctgctggttggtgatccagaaggttttataacccgcctgtttcatcatgttcatcagcgacggctgcgtcagatacagatccgggttcttttcattggcaaaggtcagcgcctgttgcagtatttcaatggtgtaaggacgagacgtcaccacgttattaaacacggtcagattcggatcggttttatgcagcgcatccagctccggcgtggtttcacgcggataaccgtacagactcatgcgtccacgctgggtcgattcgccaatcaccagcactaaggtgcgcggttcgttacctgattcatctttgaaattagccagcggcggcaatgcattattttcattcagtagctttgttagcgagtttagttgctgacgatactgataatagccggtcaggaattgccacggtgcggcaggctccatacgcgaggccaggttatccaatgttttctcaaacggcttgtttttgataaacgtattcatggcgatcggatgcagaatcaagccataaagcagggcaaaagagacaacataacgccacggctttggaatatagaccgggcgcaggcgtgtccacagcagaactgccaccgccgtataggccagcgcgataagcacaattttcaggctgaaatactggcttaaatactcgctggcttcgttggtgttggtttcgaacatcacaaacaggacgctctgcgagaactcctgaccgtagatgacgtagtagcacagcgccgccagagaggccgcccatagcaccacgccgatcactgcggcaataattttgatccgcttcgggaagaggaataccgggattaaccacagcgagctgaataacagcgagtcgcgaatgccgttggtgccactataaccactgatgtaaataatggcctgtagcagagtagagaaaaaccaaaagtagagcagtgcccaacccagggctttccagctaaaaagaggtttagcctggacttctgtggaatgcatagtaagaacctgtcttgaaaaaaatatcgccgaatgtaccgacaattccttaaggatatctgaagggatatccagaatttgaataaaatgcagacagaaatatattgaaaacgagggtgttagaacagaagtatttcagaaaaccctcgcgcaaaagcacgagggtttgcaggaggggaagattagccggtattacgcatacctgccgcaatcccggcaatagtgaccattaacgcttgctcgacgcgaggatccggttcctggccctctttttctgcctggcgggagcggtgcagcaactcggcttgcaatacgttcagcgggtcggtgtaaatattccgtagctgaatagactctgcaatccacggcagatcggccatcagatgggaatcgttggcaatcgccagcaccactttgatgtcttcttcttgcaggttgcgtaactctttacctaacggccacagtgctttgtctaccagacgttgatcatagtattccgccagccacaggtctgctttggcgaagaccatctccagcatgccgagacgcgtcgagaagaatggccaatcgcggcacatggcttccagctcgctctgtttgccatcttcgaccactttttgcagcgccgtacctgcacccagccaggcggggagcatcaggcggttttgcgtccaggcaaaaatccacggtatggcgcgcagcgactcgacgccgccggttgggcgacgtttcgccggacgtgaacccaacggcagtttgcccaattcttgttccggcgtagcggagcggaagtaaggcacaaaatctttgttttcacgtacgtagccacggtagagatcgcaggagatgactgacagttcatccataatgcgacgccagctctctttcggctcaggtggtggcagcaggttggcttccagaatcgccccggtgtatagcgacaggctgctgacggtgatttctggcagaccatatttaaagcggatcatctcgccctgttcagtcacgcgcaggccacctttcaggcttcctggcggttgtgacagcagcgccgcatgagcaggtgcgccgccgcgaccaatggaaccgccgcgaccgtggaacaacgtcagctcaatacccgctttttcgcaggttttgattaatgcatcctgtgcctgatattgcgcccaggaagctgccatcactcccgcatcttttgctgagtcggaatagccaatcatcaccatctgtttgccctgaatcaggccacgataccagtcaatattgagcagctgggtcatgacatcgttggcgttgttcagatcatcgagggtttcaaacagcggagcaaccggcatcgcaaacccgatacccgcttctttcagcagcaggtggacagccagtacgtcggacggcgttttcgccatcgagatcacgtaggcggcaatggagccttgcggcgcttcggcaatcacctggcaggtatcgagcacttcgcgcgtttcggcgcttggttgccagttgcgcggcagaagcggacgtttggagttcagttcgcggatcaggaacgcctgtttgtcggcctctgaccagctttcgtagtcgccgataccgaggtagcgggtcagctcgcccagcgcttcggtatggcgggtgctctcctgacggatatcaatacggaccagcggtacgccgaaacatttcacgcggcgcagggtgtcgagcagatcgccgttggcgataatacccatgccacacgcctgaagtgactggtagcaagcgtagagcggttcccacagttcttcgttttgtgtcagcagcccttctggttttggcagttcttcgcctttcaggcgcgcttccagccatgcctgtgtcgccatcaggcgagaacgcaggtttttcatcagatagcgatacggttctgcggcaccttcttcgccaaccagcgccagcagttcaggggtcgcttcaaccatcgacagttcagaaaccagcacctgaatatctttcaggaacaaatcggtggctttccagcggctgagtagcaggacgtggcgggtgatatcggcagtgacgttcgggttgccgtcgcggtcgccgcccatccacgaagtaaaacggaccggaacaaattcgacgggcagtttgtagccgaggttctcttccagttgttcgttcagttcgcgcaggtaatttggtacgccttgccacaggctgttttccactacggcaaagccccatttggcttcatctaccgggcttggacgcagcttacggatttcatcggtatgccatgactgggcgattaactggcgcaggcgacgcatcagctggttgtgttcgtagtcagcgatatctttgttatcgagctgttttaagcaggcgttcacttccaccattttgtggatcagtgtacgacgggtaatttcggtagggtgagccgtgaggaccagttccagcgacagcgattccactgcttttttgatggtgtcttcgctcagttccggctggtttttcagtttacgcagggtgcgggcgatcacttccgggttgctggcagcttcgcctttcggcgaaatgctgtggtattgctcggcggtgttggccaggttcaggaactgactaaacgcacgcgcaacgggcagcagctcgtcgttcgacaaattttgtaaggtggtgagtaactcctggcggttagcatcattgccagcgcgtgaagatttggacaacttacggatagtttctacgcgttcaagaatgtgttctcccaacgcatccttgatggtttctcccagcactttgccgagcatactgacattactacgcaatgcggaatattgttcgttcatattaccccagacaccccatcttatcgtttgatagccctgtatccttcacgtcgcattggcgcgaatatgctcgggctttgcttttcgtcgtcttttataaagccacgtaaaagcggtgacgtcaaatgctgcgaaatcgcttcagcaaacgaataaatagcaggaatttacgtcattaaattcacgacgctttaaataagcgtaacttatggaaatgttaaaaaatcgccccaagtaacaccaaaggtgtaggtcggataagatgcgcaagtatcgcatccgacattattgcggcactggagtttgacaacagtgccggatgcggcgcgagcgccttatccggcctacgttttaatgccagcaaaaatggtgaattacctgggttatcagttcgcgggtgggcttgataaaccgtgtttccagatattcatcaggttgatgagcctgattaattgagccaggccccaacaccagcgtcgggcataacgtttgaataaacggcgcttcggtacagtagttcaccacttcggtctttgctccgagcaatttctcaactacttcaaccagttgatgattcggtgggcattcatagccagggatcggcggatgcagctcgtcgaccgtcagacgacccggccagcgttcgctcaccggagccaatgcatcgttgagcaaaccattaagttcattgagtgtcatgccaggcagcggacgaatatccatatgcaactcacagcaagcgcaaatacggttagaagcgtcgccaccgtgaatatgcccgaggttgagcgtagggtatggcacggtaaacgcttcgtagtgataacgttctttcaggttatcgcgcaattgcaaaatatgcccgatggcgtcgtgcattagttcgatagcgttaactccgcgtgctggatcgctggagtgccccgactggccctgaatacggatggcgttagagatatgacctttatgtgcgcgtaccggttgtagtgacgtcggttcgccaatgatggcgcaatccgggcgcagggcggtagtttcggcaaaataacgcgctccggccatactggtttcttcatcagcagtcgccagaatgtagagcggttttttcagtttcgtgacgtcgacatcgcgtagcgcatcaaggataaacgcaaaaaagcctttcatgtcggcggtgcctaagccgtaaagcttgccgtcatgctccgtcagtgtaaacggatcacgcgtccagcgaccgtcatcaaatggtaccgtatcggtatgccccgccagcaacaagccgccagccccctgtccgatacttgccagcatattaaatttgttgcgagttcctggcacaggctgcacttccacattgaagcctaaatctttaaaccagtccgccagcagagtgattaaatctgcattgctttgatcgagtgcctcttccgtggcgcttattgaaggtgtggcaatcagagcacggtaaatctcgataaatggcggtaatttgtttttcattgttgacacacctctggtcatgatagtatcaatattcatgcagtatttatgaataaaaatacactaacgttgagcgtaataaaacccaccagccgtaaggtgaatgttttacgtttaacctggcaaccagacataagaaggtgaatagccccgatgttgaatacgctgattgtgggtgccagcggctacgctggcgcagagctagtgacctatgtaaatcgccatccgcatatgaacataaccgctttgactgtttcagcgcaaagcaatgatgcgggaaagttaatctccgatttgcatccgcagctaaaaggcatcgttgatctgccgttgcagccgatgtcggatatcagcgagtttagcccaggggtggacgtagtgtttctcgccaccgcccatgaagttagccacgatttagcgccgcagtttcttgaagcgggctgcgtggtgttcgacctttccggcgcgtttcgtgttaacgacgccaccttctatgaaaaatattacggctttacccatcaatacccggaactgttggaacaggcagcctacggtctggcggagtggtgcggtaataaattaaaagaagcgaatttgattgcggtgccgggctgttatccgacggcggcacagctggcgctgaaaccgttgattgatgccgatcttcttgacctcaatcagtggccggtgatcaacgccaccagcggcgtgagcggtgcagggcgtaaagcggccatttcaaacagcttttgtgaagttagcctgcaaccgtatggcgtctttactcatcgccatcaaccagagatcgccacacacctcggtgctgacgttatcttcaccccacatctgggcaatttcccgcgcggcattctcgaaaccattacctgccgcctgaaatcgggtgtgacccaggcgcaagtcgcgcaagtgttacagcaggcgtatgcccataaaccgctggtgcggctgtatgacaaaggcgttccggcgctgaaaaatgtcgttgggctgccattttgcgatatcgggtttgccgttcagggcgagcatctgattattgtggcgaccgaagacaacttactgaaaggcgcggcggcacaagcggtacagtgcgccaatattcgtttcggctatgcggaaacgcagtctcttatttaagggtgcaatgatgaatccattaattatcaaactgggcggcgtactgctggatagtgaagaggcgctggaacgtctgtttagcgcactggtgaattatcgtgagtcacatcagcgtccgctggtgattgtgcacggcggcggttgcgtggtggatgagctgatgaaagggctgaatctgccggtgaaaaagaaaaacggcctgcgggtgacgcctgctgatcagatagacattatcaccggagcactggcgggaacggcaaataaaaccctgttggcatgggcgaagaaacatcagattgcggccgtaggtttgtttctcggtgacggcgacagcgtcaaagtgacccagcttgatgaagagttaggtcatgttggactggcgcagccaggttcgcctaagcttatcaactccttgctggagaacggttatctgccggtggtcagctccattggcgtaacagacgaagggcaactgatgaacgtcaatgccgaccaggcggcaacggcgctggcggcaacgctgggcgcggatctgattttgctctccgacgtcagcggcattctcgacggcaaagggcaacgcattgccgaaatgaccgccgcgaaagcagaacaactgattgagcagggcattattactgacggcatgatagtgaaagtgaacgcggcgctggatgcggcccgcacgctgggccgtccggtagatatcgcctcctggcgtcatgcggagcagcttccggcactgtttaacggtatgccgatgggtacgcggattttagcttaagttttgttggccggaggcgcagctttccggcattgaatttcaaaataaggaaacagagttatggcactttggggcgggcgttttacccaggcagcagatcaacggttcaaacaattcaacgactcactgcgctttgattaccgtctggcggagcaggatattgttggctctgtggcctggtccaaagccctggtcacggtaggcgtgttaaccgcagaagagcaggcgcaactggaagaggcgctgaacgtgttgctggaagatgttcgcgccaggccacaacaaatccttgaaagcgacgccgaagatatccatagctgggtggaaggcaaactgatcgacaaagtgggccagttaggcaaaaagctgcataccgggcgtagccgtaatgatcaggtagcgactgacctgaaactgtggtgcaaagataccgttagcgagttactgacggctaaccggcagctgcaatcggcgctggtggaaaccgcacaaaacaatcaggacgcggtaatgccaggttacactcacctgcaacgcgcccagccggtgacgttcgcgcactggtgcctggcctatgttgagatgctggcgcgtgatgaaagccgtttgcaggatgcgcttaagcgtctggatgtcagcccgctaggctgtggcgcgctggcgggaacggcctatgaaatcgaccgtgaacagttagcaggctggctgggctttgcttcggcgacccgtaacagtctcgacagcgtttctgaccgtgaccatgtgttggaactgctttctgctgccgctatcggcatggtgcatctgtcgcgttttgctgaagatctgattttctttaacaccggcgaagcggggtttgtggagctttctgaccgcgtgacttccggttcatcattaatgccgcagaagaaaaacccggatgcgctggagctgattcgcggtaaatgcggtcgggtgcagggggcgttaaccggcatgatgatgacgctgaaaggtttgccgctggcttacaacaaagatatgcaggaagacaaagaaggtctgttcgacgcgctcgatacctggctggactgcctgcatatggcggcgctggtgctggacggcattcaggtgaaacgtccacgttgccaggaagcggctcagcagggttacgccaacgccaccgaactggcggattatctggtggcgaaaggcgtaccgttccgcgaggcgcaccatattgttggtgaagcggtggtggaagccattcgtcagggcaaaccgctggaagatctgccgctcgacgagttgcagaaattcagcccggtgattgacgaagatgtctatccgattctgtcgctgcaatcgtgcctcgacaagcgtgcggcaaaaggcggcgtctcaccgcagcaggtggcgcaggcaattgcttttgcgcaggcgcggttagagtaatttgtttatattgctcccctgaaaatggggagcttaccacgcctacaaagtgcgacacttcgtaggcggataaggcgtttacgccacatcaggcagaaatttgtcagcattctggtgagcttaaatttaacgcccaaccagaaccattatttgtcacattcctttttatcattgtgtcttctttaccttcacactccccataaaaatcatattttcaatacatcaatcaatacatattttaattaattgaatataattcatttctattgttgtgcttatttttaatgattaatggagtttgttatgtgattatttaacgtgttgttttaacgatggtggttaattattcaggtggtttttgagggtattttttctcctcggcggaaatttttatttttaatgtgatcacggttgaataatcgctctttctctattgtatggtagtaggcgtaaaattaagtttgaagcgtctatttacaacacaggagattgcaataatgaaaattattgctgcagatgtttttgttacttgcccagggcgtaatttcgttacgcttaaaataaccactgaaagcggactttgtggattaggagatgccacgttaaatggtcgcgaattgtcggtcgcttcttatctgaaagatcatctttgtccacaactaattggccgcgatgccagccgtatcgaagatatctggcaattcttttataaaggtgcttactggcgacgtggccccgtcacgatgtcagccatttctgccattgatatggcgttgtgggatatcaaagctaaagcggcaaatatgccattgtatcaactgcttggtggtgcttctcgtgaaggcgtgatggtttattgccacaccaccgggcggacgattgatgaagtccttgaagactatgcaaagcaccagcagatgggctttaaggcgattcgtgtgcagtgcggtgtaccgggtatgcaaactacttatggcctggcgaagggcaaaggcctggcgtatgaaccggcaaccaaaggcctgtggccagaagagcagttgtggtcttcagaaaagtatctcgattttacgccgaagttatttgaagcggtgcgtaataagttcggttttaacgaacatctgttgcatgacatgcaccatcgcctgacccccatcgaagcggcgcgctttgggaagagcattgaggattaccgcctgttctggatggaagatccgacgcctgcagagaaccaggaatgttttcgtctgattcgccagcataccgtgacgccgattgcggtcggtgaagtgtttaacagtatctgggactgcaagcagttaatcgaagagcagctgattgactatattcgcacgacgatcacccatgcaggcggcattaccgggatgcggcggattgccgattttgcatcgctttatcaggtacgtaccggttcgcatggcccttcagatttatcgcctgtttgtcatgcggcggcgctgcattttgacctatgggtaccaaattttggcgttcaggagtacatgggctattccgaacaaatgcttgaagttttcccgcacagctggcgcttcgaggaaggttatatgcacccaggcgatgaaccggggctgggtatttctttcgatgagaaactggcggcgaaatatccgtatgacccggcgtatctccccgtcgcacgactggaagatggcacattgtggaactggtaataacggttcgcttaattattttctgaatagtcatcaaatcgattaattccgctcaaggagctaaaaatggacgttgatgtgtcaaccagtgttgcgggtaataaaccgcaacggattcgtcgtattcagacagtgaccctggttttattatttatggcggggatcgttaattttctcgaccgttcgtcattgagcgtggcaggtgaagcgattcgtggcgagttaggattatcggcgacagagtttggtgttttgctttctgcattttctctgtcttatggtttttcacaactaccttccggtattttgctagaccgctttggcccacgaattgttttaggcgcaggcttaatattctggtcattaatgcaggcattaacaggaatggttaattcttttagccactttattttaatgcgtatcggtctgggtattggcgaagcgccatttatgcctgcgggagtaaagtcgatcaccgactggtatgcacaaaaagaacgcggcacggcgctggggatttttaactcatctaccgttatcggtcaggctatcgcgcctcctgctcttgtattgatgcagctggcatggggctggcggacgatgttcgttatcatcggcgtggcagggattctggttgggatctgttggtacgcgtggtatcgcaaccgggcgcagtttgtcctgactgacgaagaacggacgtatctctccgcgccggttaaaccgcgtccacagctgcaatttagcgagtggctggcgctgtttaagcatcggacaacctgggggatgattttaggtttctctggcgtcaattataccggttggctctacatcgcgtggttacccggttatttgcaagccgagcaaggtttcagtctggcgaaaaccggttgggtggcggcgattcctttcctcgcggcggcagtcgggatgtgggttaacggtattgttgtcgatcgactggcgaaaaaaggctacgacctggcgaagacgcgtaaaacggctattgtctgcggtttgatgatgtcggcattaggcacgttgctggtcgtgcaatcttcctcgccagcccaggcggtagcgtttatctcaatggcgctattctgcgtgcatttcgctggaacgtctgcatgggggctggtgcaggtgatggtgtcagaaacaaaagtggcttccatcgccgggattcaaaactttggcagttttgtttttgcttcctttgctccgatcgtaaccggttgggtagtggataccacacactcgtttaatctggcgttggttatcgcggcctgtgtgacgttcaccggggcgctgtgttacttctttattgtcaaagatcgcattgagtaatcgttactatcaggctctcttgctgtgggcctgtagaataaaaaaagcggatcctggagatccgcaaaagttcacgttggctttagttattcgagttgagaaactctcgaaacgggcagtgacttcaagggttaaaagaggtgccgctccgtttctgtgagcaattatcagtcagaatgcttgatagggataatcgttcattgctattctacctatcgccatgaactatcgtggcgatggaggatggataatgaatattcgtgatcttgagtacctggtggcattggccgagcaccgccattttcggcgtgcggcagattcctgccacgttagccagccgacgcttagcgggcaaattcgtaagctggaagatgagttgggcgtgatgttgctggagcggaccagccgtaaagtgttgttcacccaggcgggaatgctgctggtagatcaggcgcgtaccgtactgcgtgaggtgaaagtccttaaagagatggcaagccagcagggcgagacgatgtccgggccgctgcacattggtttgattcccacagttggaccgtacctgctaccgcatattatccctatgctgcaccagacctttccaaagctggaaatgtatctgcatgaagcacagacccaccagttactggcgcaactggacagcggcaaactcgattgcgtgatcctcgcgctggtgaaagagagcgaagcattcattgaagtgccgttgtttgatgagccaatgttgctggctatctatgaagatcacccgtgggcgaaccgcgaatgcgtaccgatggccgatctggcaggggaaaaactgctgatgctggaagatggtcactgtttgcgcgatcaggcaatgggtttctgttttgaagccggggcggatgaagatacacacttccgcgcgaccagcctggagacgctgcgcaacatggtggcggcaggtagcgggatcactttactgccagcgctggctgtgccgccggagcgcaaacgcgatggggttgtttatctgccgtgcattaagccggaaccacgccgcactattggcctggtttatcgtcctggctcaccgctgcgcagccgctatgagcagctggcagaggccatccgagcaagaatggatggccatttcgataaagtgttaaaacaggcggtttaaaccgtttaacgcagctacccgataggcttccgccatggtcgggtagttaaaggtggtgttgacgaagtactcaatagtgttgccgccacctttctgttccataatcgcctgaccgatatgaataatttcggcagcgcgctcgccaaagcagtgaatacccagaatctcttttgtttcccgatggaacaaaattttcagcgtgcccacgttcatgccgacgatttgtgcgcgtgccagatgtttaaactgggcgcggcccacttcatatggcactttcatcgcggtcagctgctgttcggttttgcccacagagctgatttccgggatggtgtaaatgccggtagggatatcttcaatcagatgcgcggtggcttcgccttttaccagcgcctgcgcggcaatgcgcccctggtcataggccgctgatgccaggctcggataaccaatcacgtcgcccaccgcgtaaacgtgcggctgtgcggtctgatacatgctgttgaccttcagctgtccgcgactgtcagtttccagcccaatgttctgtaacgccagcgaatcggtattaccggtacgaccgttggcatagagcaggcagtcagctttcagttttttacccgacttcagatgcatgatcacaccgtcgtcacagccttcgatcttctcgtactcttcgttgtgacgaatcactacgccactgttccagaagtgataggagagagaatctgacatctcttgatcgagaaatgccagcaggcgatcgcgggtgttgatcagatccacttttacatccataccgcggaagatcgacgcatattcacagccgatcactccagcaccatagataagtacatggcgcggttcgtggtgcatgctaagaattgagtcgctgtcgtaaatgcgtggatgggtgaaatcaacatctgttggatgatatggacgagagccgcaggcaataacaaatttttcagcggttagtgtttcaacgctgccgtccgggcaatccagcgccaacgtatgctcgtcaacaaagcgagcgtttccctgcaatatttcacagtgattacgttcgtaaaatccctgacgcatgcgcgtttgttgattaatcacgttatcggcatggttaaggatatcggcaaaagaagagcggagcagtcgggagtggtcgctgtaaagtgggttttgattgaattctataatgcggctgacggcgtgacggagagctttcgacgggatggtgccccagtgggtgcaaccgccgccaacattttgataacgctcgataactgcgacgcgcgcaccttgcttaaccaggcccattgcagcgccttcgccgccggggccggaacctattactatggcatcgtaatcgtaggaatgtggcatggtagggcttacctgttcttatacataaaagcaacagaatggtaacattttatcgcgggtaagccaattgatccccgtcatttatctggctatatcctgagcggcctttgctttgtctgtttcttacttttgccctgacgttttatgggatttttatcgacgatactctccgtttaagcggcaggtttccgctgtacgtaaaagaaccggccaaagaattgcagtaaatatgttttattgcgttaccgttcattcacaatactggagcaatccagtatgttcattctctggtatagtgccagcagtacttttggcaaggattcagacatcgtgatgggcgtaagagcgcaacaaaaagaaaaaacccgccgttcgctggtggaaagccgcatttagccaattaagtgctgaacgcagcttcgccagcctgagtttgcgtgaagtggcgcgtgaagcgggcattgctcccacctctttttatcggcatttccgcgacgtagacgaactgggtctgaccatggttgatgagagcggtttaatgctacgccaactcatgcgccaggcgcgtcagcgtatcgccaaaggcgggagtgtgatccgcacctctgtctccacatttatggagttcatcggtaataatcctaacgccttccggttattattgcgggaacgctccggcacctccgctgcgtttcgtgccgccgttgcgcgtgaaattcagcacttcattgcggaacttgcggactatctggaactcgaaaaccatatgccgcgtgcgtttactgaagcgcaagccgaagcaatggtgacaattgtcttcagtgcgggtgccgaggcgttggacgtcggcgtcgaacaacgtcggcaattagaagagcggctggtactgcaactgcgaatgatttcgaaaggggcttattactggtatcgccgtgaacaagagaaaaccgcaattattccgggaaatgtgaaggacgagtaatgaaacaagcaaatcaagatagaggtacgctgctgctggcgttggttgctggcttatcgattaatggtactttcgcagcgctgtttagctccattgtgccattttctgtattcccgattatttccctggtgctgacggtttactgcctgcatcaacgttatcttaatcgcaccatgccggtaggcttgccgggtctggcagctgcctgttttattctcggcgtactgctgtacagcacggtagttcgtgcggaatatccggatatcggctctaacttcttcccggcagtactctccgtcattatggtgttctggattggcgcgaagatgcgtaaccgtaagcaggaagttgctgagtaatcggtattatgccgatgctggcgcatccggcatgggttttacttcgcggtcagtaatacgccgcactccatatggtgcgtgtaggggaactgatcaaacagagccagacgttcgaccttgtgcgtctggcttaatgtttccagattcttgcataacgtttccggattgcaggagatatacagaatacgtggatacgcctgcaccattttctcggtttcactgtccagaccgctgcgcggtgggtcgacaaaaatggtttcgcactgataactcttcaagtctatcccttgcaggcgattaaactcgcgtacaccattcatcgcctgagtaaattcttctgccgccatacgaataatttgtacgttatcaatatggttagctgcgatgttgtattgcgcagcagcaaccgacggcttagcgatttcggtggctaatacccgatcaaaattgcgcgccagtgctaatgaaaagttaccgttgccgcagtacagctccagtaaatcgccttttgagcctttggttacgtccagcgcccattccagcatctgaatattcatcgccgcgttcggctgggtaaaactgttttctacctgacggtagatcatctctttccctgcgaccggcagacgttcatcgatgtaatcttgatccagctcgattttggttttcgttgcccgaccaatcagatgcacattcagattctgcgcgcgcagtgcatcgcgcagggcttccgcttcctgacgccactcatcatccagctttttatggtacaacagggaaaccaccgcctgattactcagcgtggtgaggtaatcaatctggaacaacttgtggcgcagaacgggattattacgcacacccgcaatcatcgccgtcatcaactggttgatgagttcactggcagcggggaagctatccacgcggatgcggcttttggtttgttgatcgaaaatgatgtgatacaggtcatcgccatcgtgccagatgcggaactccgcacgcatccggtaatgactgaccggcgagcgaaacacttccggaaccaggtcagaaaacggtgccatcatactttgcaaacgtaccactttttcggctaactgcgcttcatactgttctgttggaaggtgttcgggggtcatgatgtatcctgaaaaattaaagtacgcggcgattgtagggattgctcatcagatgtccagatcttgatgaattcctatttgtgagctacgtctggacagtaacttgttacaacctgtagcatccacttgccggtcctgtgagttaatagggaatccagtgcgaatctggagctgacgcgcagcggtaaggaaaggtgcgatgattgcgttatgcggacactgccatccggtgggaagtcatcatctcttagtatcttagatacccctccaagcccgaagacctgccggccaacgtcgcatctggttctcatcatcgcgtaatattgatgaaacctgcggcatccttcttctattgtggatgctttacaatgattaaaaaagcttcgctgctgacggcgtgttctgtcacagccttttccgcttgggcacaggataccagcccggatactctcgtcgttactgctaaccgttttgaacagccgcgcagcactgtgcttgcaccaaccaccgttgtgacccgtcaggatatcgaccgctggcagtcgacctcggtcaatgatgtgctgcgccgtcttccgggcgtcgatatcacccaaaacggcggttcaggtcagctctcatctatttttattcgcggtacaaatgccagtcatgtgttggtgttaattgatggcgtacgcctgaatctggcgggggtgagtggttctgccgaccttagccagttccctattgcgcttgtccagcgtgttgaatatatccgtgggccacgctccgccgtttatggttccgatgcaataggcggggtggtgaatatcatcacgacgcgcgatgaacccggaacggaaatttcagcagggtggggaagcaatagttatcagaactatgatgtctctacgcagcaacaactgggggataagacacgggtaacgctgttgggcgattatgcccatactcatggttatgatgttgttgcctatggtaataccggaacgcaagcgcagacagataacgatggttttttaagtaaaacgctttatggcgcgctggagcataactttactgatgcctggagcggctttgtgcgcggctatggctatgataaccgtaccaattatgacgcgtattattctcccggttcaccgttgctcgatacccgtaaactctatagccaaagttgggacgccgggctgcgctataacggcgaactgattaaatcacaactcattaccagctatagccatagcaaagattacaactacgatccccattatggtcgttatgattcgtcggcgacgctcgatgagatgaagcaatacaccgtccagtgggcaaacaatgtcatcgttggtcacggtagtattggtgcgggtgtcgactggcagaaacagactacgacgccgggtacaggttatgttgagaatggatatgatcaacgtaataccggcatctatctgaccgggctgcaacaagtcggcgattttacctttgaaggcgcagcacgcagtgacgataactcacagtttggtcgtcatggaacctggcaaaccagcgccggttgggaattcatcgaaggttatcgcttcattgcttcctacgggacatcttataaggcaccaaatctggggcaactgtatggcttctacggaaatccgaatctggacccggagaaaagcaaacagtgggaaggcgcgtttgaaggcttaaccgctggggtgaactggcgtatttccggatatcgtaacgatgtcagtgacttgatcgattatgatgatcacaccctgaaatattacaacgaagggaaagcgcggattaagggcgtcgaggcgaccgccaattttgataccggaccactgacgcatactgtgagttatgattatgtcgatgcgcgcaatgcgattaccgacacgccgttgttacgccgtgctaaacagcaggtgaaataccagctcgactggcagttgtatgacttcgactggggtattacttatcagtatttaggcactcgctatgataaggattactcatcttatccttatcaaaccgttaaaatgggcggtgtgagcttgtgggatcttgcggttgcgtatccggtcacctctcacctgacagttcgtggtaaaatagccaacctgttcgacaaagattatgagacagtctatggctaccaaactgcaggacgggaatacaccttgtctggcagctacaccttctgaaccacgtcccaccgtgctggtgtttgactccggcgtcggtgggttgtcggtctatgacgagatccggcatctcttaccggatctccattacatttatgctttcgataacgtcgcttttccgtatggcgaaaaaagcgaagagtttattgttgagcgagtggtggcaattgtcaccgcagtgcaagaacgttatccccttgcgctggctgtggtcgcttgcaacaccgccagtaccgtttcacttcctgcattacgcgaaaagttcgacttcccggttgttggtgtcgtgccggcgattaaacctgctgcacgtctgacggcaaatggcattgtcggattactggcaacccgcggaactgttaaacgttcttatactcatgagctgatcgcgcgtttcgctaatgaatgccagatagaaatgctgggctcggcagagatggttgagttggctgaagcgaagctgcatggcgaagatgtttctctggatgcactaaaacgtatcctacgcccgtggttaagaatgaaagagccgccagataccgttgtattgggttgcacccatttccctctactacaagaagaactcttacaggtgctgccagagggaacccggctggtggattctggcgcagcgattgctcgcagaacggcctggctgttagaacatgaagctccggatgcaaaatctgccgatgcgaatattgccttttgtatggcaatgacgccagaagctgaacaattattgcccgttttacagcgttacggcttcgaaacgctcgaaaaactggcagttttaggctgatttggttgaatgttgcgcggtcagaaaattattttaaatttcctcttgtcaggccggaataactccctataatgcgccaccactgacacggaacaacggcaaacacgccgccgggtcagcggggttctcctgagaactccgacagagaaagcaaaaataaatgcttgactctgtagcgggaaagcgtattatgcacacccctcgccgctgagaaaaagcgaagcggcactgctctttaacaatttatcagacaatctgtgtgggcactcgaagatacggattcttaacgtcgcaagacgaaaatgaataccaagtctcaagagtgaacacgtaattcattacgaagtttaattctttgagcatcaaacttttaaattgaagagtttgatcatggctcagattgaacgctggcggcaggcctaacacatgcaagtcgaacggtaacaggaaacagcttgctgtttcgctgacgagtggcggacgggtgagtaatgtctgggaaactgcctgatggagggggataactactggaaacggtagctaataccgcataacgtcgcaagaccaaagagggggaccttcgggcctcttgccatcggatgtgcccagatgggattagcttgttggtggggtaacggctcaccaaggcgacgatccctagctggtctgagaggatgaccagccacactggaactgagacacggtccagactcctacgggaggcagcagtggggaatattgcacaatgggcgcaagcctgatgcagccatgccgcgtgtatgaagaaggccttcgggttgtaaagtactttcagcggggaggaagggagtaaagttaatacctttgctcattgacgttacccgcagaagaagcaccggctaactccgtgccagcagccgcggtaatacggagggtgcaagcgttaatcggaattactgggcgtaaagcgcacgcaggcggtttgttaagtcagatgtgaaatccccgggctcaacctgggaactgcatctgatactggcaagcttgagtctcgtagagggggktagaattccaggtgtagcggtgaaatgcgtagagatctggaggaataccggtggcgaaggcggccccctggacgaagactgacgctcaggtgcgaaagcgtggggagcaaacaggattagataccctggtagtccacgccgtaaacgatgtcgacttggaggttgtgcccttgaggcgtggcttccggagctaacgcgttaagtcgaccgcctggggagtacggccgcaaggttaaaactcaaatgaattgacgggggcccgcacaagcggtggagcatgtggtttaattcgatgcaacgcgaagaaccttacctggtcttgacatccacggaagttttcagagatgagaatgtgccttcgggaaccgtgagacaggtgctgcatggctgtcgtcagctcgtgttgtgaaatgttgggttaagtcccgcaacgagcgcaacccttatcctttgttgccagcggtccggccgggaactcaaaggagactgccagtgataaactggaggaaggtggggatgacgtcaagtcatcatggcccttacgaccagggctacacacgtgctacaatggcgcatacaaagagaagcgacctcgcgagagcaagcggacctcataaagtgcgtcgtagtccggattggagtctgcaactcgactccatgaagtcggaatcgctagtaatcgtggatcagaatgccacggtgaatacgttcccgggccttgtacacaccgcccgtcacaccatgggagtgggttgcaaaagaagtaggtagcttaaccttcgggagggcgcttaccactttgtgattcatgactggggtgaagtcgtaacaaggtaaccgtaggggaacctgcggttggatcacctccttaccttaaagaagcgttctttgaagtgctcacacagattgtctgatagaaagtgaaaagcaaggcgtcttgcgaagcagactgatacgtccccttcgtctagaggcccaggacaccgccctttcacggcggtaacaggggttcgaatcccctaggggacgccacttgctggtttgtgagtgaaagtcacctgccttaatatctcaaaactcatcttcgggtgatgtttgagatatttgctctttaaaaatctggatcaagctgaaaattgaaacactgaacaacgagagttgttcgtgagtctctcaaattttcgcaacacgatgatgaatcgaaagaaacatcttcgggttgtgaggttaagcgactaagcgtacacggtggatgccctggcagtcagaggcgatgaaggacgtgctaatctgcgataagcgtcggtaaggtgatatgaaccgttataaccggcgatttccgaatggggaaacccagtgtgtttcgacacactatcattaactgaatccataggttaatgaggcgaaccgggggaactgaaacatctaagtaccccgaggaaaagaaatcaaccgagattcccccagtagcggcgagcgaacggggagcagcccagagcctgaatcagtatgtgtgttagtggaagcgtctggaaaggcgcgcgatacagggtgacagccccgtacacaaaaatgcacatgctgtgagctcgatgagtagggcgggacacgtggtatcctgtctgaatatggggggaccatcctccaaggctaaatactcctgactgaccgatagtgaaccagtaccgtgagggaaaggcgaaaagaaccccggcgaggggagtgaaaaagaacctgaaaccgtgtacgtacaagcagtgggagcacgcttaggcgtgtgactgcgtaccttttgtataatgggtcagcgacttatattctgtagcaaggttaaccgaataggggagccgaagggaaaccgagtcttaactgggcgttaagttgcagggtatagacccgaaacccggtgatctagccatgggcaggttgaaggttgggtaacactaactggaggaccgaaccgactaatgttgaaaaattagcggatgacttgtggctgggggtgaaaggccaatcaaaccgggagatagctggttctccccgaaagctatttaggtagcgcctcgtgaattcatctccgggggtagagcactgtttcggcaagggggtcatcccgacttaccaacccgatgcaaactgcgaataccggagaatgttatcacgggagacacacggcgggtgctaacgtccgtcgtgaagagggaaacaacccagaccgccagctaaggtcccaaagtcatggttaagtgggaaacgatgtgggaaggcccagacagccaggatgttggcttagaagcagccatcatttaaagaaagcgtaatagctcactggtcgagtcggcctgcgcggaagatgtaacggggctaaaccatgcaccgaagctgcggcagcgacgcttatgcgttgttgggtaggggagcgttctgtaagcctgtgaaggtgtactgtgaggtatgctggaggtatcagaagtgcgaatgctgacataagtaacgataaagcgggtgaaaagcccgctcgccggaagaccaagggttcctgtccaacgttaatcggggcagggtgagtcgacccctaaggcgaggccgaaaggcgtagtcgatgggaaacaggttaatattcctgtacttggtgttactgcgaaggggggacggagaaggctatgttggccgggcgacggttgtcccggtttaagcgtgtaggctggttttccaggcaaatccggaaaatcaaggctgaggcgtgatgacgaggcactacggtgctgaagcaacaaatgccctgcttccaggaaaagcctctaagcatcaggtaacatcaaatcgtaccccaaaccgacacaggtggtcaggtagagaataccaaggcgcttgagagaactcgggtgaaggaactaggcaaaatggtgccgtaacttcgggagaaggcacgctgatatgtaggtgaagcgacttgctcgtggagctgaaatcagtcgaagataccagctggctgcaactgtttattaaaaacacagcactgtgcaaacacgaaagtggacgtatacggtgtgacgcctgcccggtgccggaaggttaattgatggggtcagcgcaagcgaagctcttgatcgaagccccggtaaacggcggccgtaactataacggtcctaaggtagcgaaattccttgtcgggtaagttccgacctgcacgaatggcgtaatgatggccaggctgtctccacccgagactcagtgaaattgaactcgctgtgaagatgcagtgtacccgcggcaagacggaaagaccccgtgaacctttactatagcttgacactgaacattgagccttgatgtgtaggataggtgggaggctttgaagtgtggacgccagtctgcatggagccgaccttgaaataccaccctttaatgtttgatgttctaacgtggacccgtaatccgggttgcggacagtgtctggtgggtagtttgactggggcggtctcctcctaaagagtaacggaggagcacgaaggttggctaatcctggtcggacatcaggaggttagtgcaatggcataagccagcttgactgcgagcgtgacggcgcgagcaggtgcgaaagcaggtcatagtgatccggtggttctgaatggaagggccatcgctcaacggataaaaggtactccggggataacaggctgataccgcccaagagttcatatcgacggcggtgtttggcacctcgatgtcggctcatcacatcctggggctgaagtaggtcccaagggtatggctgttcgccatttaaagtggtacgcgagctgggtttagaacgtcgtgagacagttcggtccctatctgccgtgggcgctggagaactgaggggggctgctcctagtacgagaggaccggagtggacgcatcactggtgttcgggttgtcatgccaatggcactgcccggtagctaaatgcggaagagataagtgctgaaagcatctaagcacgaaacttgccccgagatgagttctccctgactccttgagagtcctgaaggaacgttgaagacgacgacgttgataggccgggtgtgtaagcgcagcgatgcgttgagctaaccggtactaatgaaccgtgaggcttaaccttacaacgccgaagctgttttggcggatgagagaagattttcagcctgatacagattaaatcagaacgcagaagcggtctgataaaacagaatttgcctggcggccgtagcgcggtggtcccacctgaccccatgccgaactcagaagtgaaacgccgtagcgccgatggtagtgtggggtctccccatgcgagagtagggaactgccaggcatcaaataaaacgaaaggctcagtcgaaagactgggcctttcgttttatctgttgtttgtcggtgaacgctctcctgagtaggacaaatccgccgggagcggatttgaacgttgcgaagcaacggcccggagggtggcgggcaggacgcccgccataaactgccaggcatcaaattaagcagaaggccatcctgacggatggcctttttgcgtttctacaaactcttcctgtcgtcatatctacaagccatccccccacagatacggtaaactagcctcgtttttgcatcaggaaagcagctatgaaccactccttaaaaccctggaacacatttggcattgatcataatgctcagcacattgtatgtgccgaagacgaacaacaattactcaatgcctggcagtatgcaaccgcagaaggacaacccgttcttattctgggtgaaggaagtaatgtactttttctggaagactatcgcggcacggtgatcatcaaccggatcaaaggtatcgaaattcatgatgaacctgatgcgtggtatttacatgtaggagccggagaaaactggcatcgcctggtaaaatacactttgcaggaaggtatgcctggtctggaaaatctggcattaattcctggttgtgtcggctcatcacctatccagaatattggtgcttatggcgtagaattacagcgagtttgcgcttatgttgattgtgttgaactggcgacaggcaagcaagtgcgcttaactgccaaagagtgccgttttggctatcgcgacagtatttttaaacatgaataccaggatcgcttcgccattgtagccgtaggtctgcgtctgccaaaagagtggcaacctgtactaacgtatggtgacttaactcgtctggatcctacaacagtaacgccacagcaagtatttaatgcggtgtgtcatatgcgcaccaccaaactccctgatccaaaagtgaatggcaatgccggtagtttcttcaaaaaccctgttgtatctgccgaaacggctaaagcattactggcgcaatttccaacagcaccaaattacccccaggcgggtggttcagtaaaactggcagcaggttggcttattgatcagtgccagctaaaagggatgcaaatgggtggggctgcggtgcaccgtcaacaggcgttagttctcattaatgaagacaatgcaaaaagcgaagatgtggtgcaactggcacaccatgtaagacaaaaagtgggtgaaaaatttaatgtctggcttgagcctgaagtccgctttattggtgcatcaggtgaagtgagcgcagtggagacaattttatgaaggataacaccgtgccactgaaattgattgccctgttagcgaacggtgaatttcactctggcgagcagttgggtgaaacgctgggaatgagccgggcggctattaataaacacattcagacactgcgtgactggggcgttgatgtctttaccgttccgggtaaaggatacagcctgcctgagcccatccagttacttaatgctgaacagatattgggtcagctggatggcggtagtgtagccgtgctgccagttattgactccacgaatcagtaccttcttgatcgtatcggagagcttaaatcgggcgatgcctgtgttgcagaataccagcaggctggccgtggtcgccgggggcggaaatggttttcgccttttggcgcaaacttatatttgtcgatgttctggcgtctggaacaaggcccggcggcggcgattggtttaagtctggttatcggtatcgtgatggcggaagtattacgcaagctgggagcagataaagttcgtgtcaaatggcctaatgacctctatctgcaggatcgcaagctggcaggcattcttgtggagctgactggcaaaactggcgatgcggcgcaaatagtcattggagccgggatcaacatggcaatgcgccgtgttgaagagagtgtcgttaatcaggggtggatcacgctgcaggaagcggggatcaatctcgatcgtaatacgttggcggccatgctaatacgtgaattacgtgctgcgttggaactcttcgaacaagaaggattggcaccttatctgtcgcgctgggaaaagctggataattttattaatcgcccagtgaaacttatcattggtgataaagaaatatttggcatttcacgcggaatagacaaacagggggctttattacttgagcaggatggaataataaaaccctggatgggcggtgaaatatccctgcgtagtgcagaaaaataagaaaggggagcattagctcccctgaaaattatttgcgtagtctgacctcttctaccgcatgattagcacttttcgtcaggattaaactggcgcgctcacgagtaggtagaatattttgctttaagttcagccagttgatctctttccacaatgtcatggcagtcttaatcgcttcttctttagttaatttcgcgtagttatgaaaataggaatccgggtcggtaaaagccccttcgcggaatttcagaaaacggttgatataccacgtctgaagtaagtcttccggtgcatcaacatatatcgaaaaatcgacaaaatcagaaacaaatacatgatgtggatcgtgtggataatccatcccgctctgtaagacatttaacccttcaagaattaaaatatcaggctgaacaaccgttttatctccatccgggatcacatcataaataagatgcgagtaaacaggggctgtaacgtttggcacgccggatttgagatcggaaacaaacttcaccaggcgatgcatatcatacgattccgggaagcctttcttcttcatcagaccacgttctttcagaacctgattagggtgaaggaagccatctgtagtgatcagttcaacacgacgatgttccggccaacggcttaatagcgcctgcaatacacgggcggttgtacttttccccaccgcgacactgccagcaatactgataatgtaaggaatgcgttgcccgttagtaccaagaaactgttccagaactgcctgacggcgcagattcgagcttatatagaagttcagcaaacgtgacaaaggtaaatagatctcggcaacttcttctaacgagagatcttcattaatacctttgagacgggcgatctcatcttccgataacgtcataggtacggaatcacgcagagctgcccactggttgcggtcaaactgtaggtaaggcgtcattaacgtttgctcttttatactcataagcatgtttctggcggtcatagctctatcggcaaagcgatatttgccatggcgcgtcacagttctgttgaatgggttaatgggcaggagggtaacaccagatggggaggaataataagaaaaaatctctgccaggaagctatcgttgaaaagcaatgtgacagatattccatctgataaaaagaattatggtttagcaggagcgcattgttgagcacaatgatgttgaaaaagtgtgctaatctgccctccgttcggctgtttcttcatcgtgtcgcataaaatgtgaccaataaaacaaattatgcaattttttagttgcatgaactcgcatgtctccatagaatgcgcgctacttgatgccgacttagctcagtaggtagagcaactgacttgtaatcagtaggtcaccagttcgattccggtagtcggcaccatcaagtccggtggggttcccgagcggccaaagggagcagactgtaaatctgccgtcacagacttcgaaggttcgaatccttcccccaccaccaatttcggccacgcgatggcgtagcccgagacgataagttcgcttaccggctcgaataaagagagcttctctcgatattcagtgcagaatgaaaatcaggtagccgagttccaggatgcgggcatcgtataatggctattacctcagccttccaagctgatgatgcgggttcgattcccgctgcccgctccaagatgtgctgatatagctcagttggtagagcgcacccttggtaagggtgaggtcggcagttcgaatctgcctatcagcaccacttcttttctcctccctgttttttccttctgtttattgcattcaacaagtcgggcatgttgcctggttgatgtggtgatatcaccgatttatccgtgtcttagagggacaatcgatgtctaaagaaaagtttgaacgtacaaaaccgcacgttaacgtcggtactatcggccacgttgaccatggtaaaacaacgctgaccgctgcaatcactaccgtactggctaaaacctacggcggtgctgctcgcgcattcgaccagatcgataacgcgccggaagaaaaagctcgtggtatcaccatcaacacttctcacgttgaatacgacaccccgacccgtcactacgcacacgtagactgcccggggcacgccgactatgttaaaaacatgatcaccggtgctgctcagatggacggcgcgatcctggtagttgctgcgactgacggcccgatgccgcagactcgtgagcacatcctgctgggtcgtcaggtaggcgttccgtacatcatcgtgttcctgaacaaatgcgacatggttgatgacgaagagctgctggaactggttgaaatggaagttcgtgaacttctgtctcagtacgacttcccgggcgacgacactccgatcgttcgtggttctgctctgaaagcgctggaaggcgacgcagagtgggaagcgaaaatcctggaactggctggcttcctggattcttacattccggaaccagagcgtgcgattgacaagccgttcctgctgccgatcgaagacgtattctccatctccggtcgtggtaccgttgttaccggtcgtgtagaacgcggtatcatcaaagttggtgaagaagttgaaatcgttggtatcaaagagactcagaagtctacctgtactggcgttgaaatgttccgcaaactgctggacgaaggccgtgctggtgagaacgtaggtgttctgctgcgtggtatcaaacgtgaagaaatcgaacgtggtcaggtactggctaagccgggcaccatcaagccgcacaccaagttcgaatctgaagtgtacattctgtccaaagatgaaggcggtcgtcatactccgttcttcaaaggctaccgtccgcagttctacttccgtactactgacgtgactggtaccatcgaactgccggaaggcgtagagatggtaatgccgggcgacaacatcaaaatggttgttaccctgatccacccgatcgcgatggacgacggtctgcgtttcgcaatccgtgaaggcggccgtaccgttggcgcgggcgttgtagcaaaagttctgagctaattgccgataacatttgacgcaatgcgcactaaaagggcatcatttgatgccctttttgcacgctttcgtaccagaacctggctcatcagtgattttctttgtcataatcattgctgagacaggctctgttgagggcgtataatccgaaaagctaatacgcgtttcgatttggtttgcctcgcgatcgcggggtgaaaatgtttgtagaaaacttctgacaggttggtttatgagtgcgaataccgaagctcaaggaagcgggcgcggcctggaagcgatgaagtgggtcgttgtggtggcattgctcctggtggcgattgtcggcaactacctttatcgcgacattatgctgccgctgcgtgcgctggccgtagtaattctgattgctgcagcgggtggtgtcgcgctgttaacgacaaaaggtaaagctaccgttgcttttgcccgtgaagcgcgtaccgaagtccgtaaggtcatttggccgactcgccaggaaacattgcacaccacgctgattgtggctgcggttaccgcagtaatgtcactgatcctgtggggactggatggtattctggttcgcctggtatcctttatcactggcctgaggttctgagatgtctgaagctcctaaaaagcgctggtacgtcgttcaggcgttttccggttttgaaggccgcgtagcaacgtcgctgcgtgagcatatcaaattacacaacatggaagatttgtttggtgaagtcatggtaccaaccgaagaagtggttgaaatccgtggcggtcagcgtcgcaaaagcgaacgtaaattcttccctggctacgtcctcgttcagatggtgatgaacgacgcgagctggcacctggtgcgcagcgtaccgcgtgtgatgggcttcatcggcggtacttccgatcgtcctgcgccaatcagcgataaagaagtcgatgcgattatgaaccgcctgcagcaggttggtgataagccgcgtccgaaaacgctgtttgaaccgggtgaaatggtccgtgttaatgatggtccgttcgctgacttcaacggtgttgttgaagaagtggattacgagaaatctcgtctgaaagtgtctgtttctatcttcggtcgtgcgaccccggtagagctggacttcagccaggttgaaaaagcctaacccagcgatcaaaaaagcggcgatttaatcgttgcacaaggcgtgagattggaatacaatttcgcgccttttgtttttatgggccttgcccgtaaaacgattttttatatcacggggagcctctcagaggcgttattacccaacttgaggaatttataatggctaagaaagtacaagcctatgtcaagctgcaggttgcagctggtatggctaacccgagtccgccagtaggtccggctctgggtcagcagggcgtaaacatcatggaattctgcaaagcgttcaacgcaaaaactgattccatcgaaaaaggtctgccgattccggtagtaatcaccgtttacgctgaccgttctttcactttcgttaccaagaccccgccggcagcagttctgctgaaaaaagcggctggtatcaagtctggttccggtaagccgaacaaagacaaagtgggtaaaatttcccgcgctcagctgcaggaaatcgcgcagaccaaagctgccgacatgactggtgccgacattgaagcgatgactcgctccatcgaaggtactgcacgttccatgggcctggtagtggaggactaagaaatggctaaactgaccaagcgcatgcgtgttatccgcgagaaagttgatgcaaccaaacagtacgacatcaacgaagctatcgcactgctgaaagagctggcgactgctaaattcgtagaaagcgtggacgtagctgttaacctcggcatcgacgctcgtaaatctgaccagaacgtacgtggtgcaactgtactgccgcacggtactggccgttccgttcgcgtagccgtatttacccaaggtgcaaacgctgaagctgctaaagctgcaggcgcagaactggtaggtatggaagatctggctgaccagatcaagaaaggcgaaatgaactttgacgttgttattgcttctccggatgcaatgcgcgttgttggccagctgggccaggttctgggtccgcgcggcctgatgccaaacccgaaagtgggtactgtaacaccgaacgttgctgaagcggttaaaaacgctaaagctggccaggttcgttaccgtaacgacaaaaacggcatcatccacaccaccatcggtaaagtggactttgacgctgacaaactgaaagaaaacctggaagctctgctggttgcgctgaaaaaagcaaaaccgactcaggcgaaaggcgtgtacatcaagaaagttagcatctccaccaccatgggtgcaggtgttgcagttgaccaggctggcctgagcgcttctgtaaactaatgcctttacgtgggcggtgattttgtctacaatcttacccccacgtataatgcttaatgcagacgtatatccgagatattcgggttgtggcaaggcggcaactgagtgagtcgccaggagcatagctaactatgtgactggtgcgaatgaaggaagccaacgccgccacaagttgaatagcgacggatagaaaagatttgttcgttggagcctggcctatccaggcctccgtcgaagaccgcaggagtttcgcaagaaacttaatcccctgcgtagacggtgacagaacgctaagattattcttttatattctggcttgtttctgctcaccgtaattaagacgctctctccgtttggaggagtgaagtgagttccagagattttctctggcaaacatccaggagcaaagctaatggctttaaatcttcaagacaaacaagcgattgttgctgaagtcagcgaagtagccaaaggcgcgctgtctgcagtagttgcggattcccgtggcgtaactgtagataaaatgactgaactgcgtaaagcaggtcgcgaagctggcgtatacatgcgtgttgttcgtaacaccctgctgcgccgtgctgttgaaggtactccgttcgagtgcctgaaagacgcgtttgttggtccgaccctgattgcatactctatggaacacccgggtgctgctgctcgtctgttcaaagagttcgcgaaagcaaatgcaaaatttgaggtcaaagccgctgcctttgaaggtgagctgatcccggcgtctcagatcgaccgcctggcaactctgccgacctacgaagaagcaattgcacgcctgatggcaaccatgaaagaagcttcggctggcaaactggttcgtactctggctgctgtacgcgatgcgaaagaagctgcttaatcgcagttatctttttaacgcattcgcttacgtataaacttattctgatattcaggaacaatttaaatgtctatcactaaagatcaaatcattgaagcagttgcagctatgtctgtaatggacgttgtagaactgatctctgcaatggaagaaaaattcggtgtttccgctgccgctgctgtagctgtagctgctggcccggttgaagctgctgaagaaaaaactgaattcgacgtaattctgaaagctgctggcgctaacaaagttgctgttatcaaagcagtacgtggcgcaactggcctgggtctgaaagaagctaaagacctggtagaatctgcaccggctgctctgaaagaaggcgtgagcaaagacgacgcagaagcactgaaaaaagctctggaagaagctggcgctgaagttgaagttaaataagccaacccttccggttgcagcctgagaaatcaggctgatggctggtgactttttagtcaccagcctttttgcgctgtaaggcgccagtagcgtttcacactgtttgactactgctgtgcctttcaatgcttgtttctatcgacgacttaatatactgcgacaggacgtccgttctgtgtaaatcgcaatgaaatggtttaagcgtgatagcaacaggcattgcggaaagtgttccattttccggtcaacaaaatagtgttgcacaaactgtccgctcaatggacagatgggtcgacttgtcagcgagctgaggaaccctatggtttactcctataccgagaaaaaacgtattcgtaaggattttggtaaacgtccacaagttctggatgtaccttatctcctttctatccagcttgactcgtttcagaaatttatcgagcaagatcctgaagggcagtatggtctggaagctgctttccgttccgtattcccgattcagagctacagcggtaattccgagctgcaatacgtcagctaccgccttggcgaaccggtgtttgacgtccaggaatgtcaaatccgtggcgtgacctattccgcaccgctgcgcgttaaactgcgtctggtgatctatgagcgcgaagcgccggaaggcaccgtaaaagacattaaagaacaagaagtctacatgggcgaaattccgctcatgacagacaacggtacctttgttatcaacggtactgagcgtgttatcgtttcccagctgcaccgtagtccgggcgtcttctttgactccgacaaaggtaaaacccactcttcgggtaaagtgctgtataacgcgcgtatcatccttaccgtggttcctggctggacttcgaattcgatccgaaggacaacctgttcgtacgtatcgaccgtcgccgtaaactgcctgcgaccatcattctgcgcgccctgaactacaccacagagcagatcctcgacctgttctttgaaaaagttatctttgaaatccgtgataacaagctgcagatggaactggtgccggaacgcctgcgtggtgaaaccgcatcttttgacatcgaagctaacggtaaagtgtacgtagaaaaaggccgccgtatcactgcgcgccacattcgccagctggaaaaagacgacgtcaaactgatcgaagtcccggttgagtacatcgcaggtaaagtggttgctaaagactatattgatgagtctaccggcgagctgatctgcgcagcgaacatggagctgagcctggatctgctggctaagctgagccagtctggtcacaagcgtatcgaaacgctgttcaccaacgatctggatcacggcccatatatctctgaaaccttacgtgtcgacccaactaacgaccgtctgagcgcactggtagaaatctaccgcatgatgcgccctggcgagccgccgactcgtgaagcagctgaaagcctgttcgagaacctgttcttctccgaagaccgttatgacttgtctgcggttggtcgtatgaagttcaaccgttctctgctgcgcgaagaaatcgaaggttccggtatcctgagcaaagacgacatcattgatgttatgaaaaagctcatcgatatccgtaacggtaaaggcgaagtcgatgatatcgaccacctcggcaaccgtcgtatccgttccgttggcgaaatggcggaaaaccagttccgcgttggcctggtacgtgtagagcgtgcggtgaaagagcgtctgtctctgggcgatctggataccctgatgcctcaggatatgatcaacgccaagccgatttccgcagcagtgaaagagttcttcggttccagccagctgtcgtcagtttatggaccagaacaacccgctgtctgagattacgcacaaacgtcgtatctccgcactcggcccaggcggtctgacccgtgaacgtgcaggcttcgaagttcgagacgtacacccgactcactacggtcgcgtatgtccaatcgaaacccctgaaggtccgaacatcggtctgatcaactctctgtccgtgtacgcacagactaacgaatacggcttccttgagactccgtatcgtaaagtgaccgacggtgttgtaactgacgaaattcactacctgtctgctatcgaagaaggcaactacgttatcgcccaggcgaactccaacctggatgaagaaggccacttcgtagaagacctggtaacttgccgtagcaaaggcgaatccagcttgttcagccgcgaccaggttgactacatggacgtatccacccagcaggtggtatccgtcggtgcgtccctgatcccgttcctggaacacgatgacgccaaccgtgcattgatgggtgcgaacatgcaacgtcaggccgttccgactctgcgcgctgataagccgctggttggtactggtatggaacgtgctgttgccgttgactccggtgtaactgcggtagctaaacgtggtggtgtcgttcagtacgtggatgcttcccgtatcgttatcaaagttaacgaagacgagatgtatccgggtgaagcaggtatcgacatctacaacctgaccaaatacacccgttctaaccagaacacctgtatcaaccagatgccgtgtgtgtctctgggtgaaccggttgaacgtggcgacgtgctggcagacggtccgtccaccgacctcggtgaactggcgcttggtcagaacatgcgcgtagcgttcatgccgtggaatggttacaacttcgaagactccatcctcgtatccgagcgtgttgttcaggaagaccgtttcaccaccatccacattcaggaactggcgtgtgtgtcccgtgacaccaagctggggccggaagagatcaccgctgacatcccgaacgtgggtgaagctgcgctctccaaactggatgaatccggtatcgtttacattggtgcggaagtgaccggtggcgacattctggttggtaaggtaacgccgaaaggtgaaactcagctgaccccagaagaaaaactgctgcgtgcgatcttcggtgagaaagcctctgacgttaaagactcttctctgcgcgtaccaaacggtgtatccggtacggttatcgacgttcaggtctttactcgcgatggcgtagaaaaagacaaacgtgcgctggaaatcgaagaaatgcagctcaaacaggcgaagaaagacctgtctgaagaactgcagatcctcgaagctggtctgttcagccgtatccgtgctgtgctggtagccggtggcgttgaagctgagaagctcgacaaactgccgcgcgatcgctggctggagctaggcctgacagacgaagagaaacaaaatcagctggaacagctggctgagcagtatgacgaactgaaacacgagttcgagaagaaactcgaagcgaaacgccgcaaaatcacccagggcgacgatctggcaccgggcgtgctgaagattgttaaggtatatctggcggttaaacgccgtatccagcctggtgacaagatggcaggtcgtcacggtaacaagggtgtaatttctaagatcaacccgatcgaagatatgccttacgatgaaaacggtacgccggtagacatcgtactgaacccgctgggcgtaccgtctcgtatgaacatcggtcagatcctcgaaacccacctgggtatggctgcgaaaggtatcggcgacaagatcaacgccatgctgaaacagcagcaagaagtcgcgaaactgcgcgaattcatccagcgtgcgtacgatctgggcgctgacgttcgtcagaaagttgacctgagtaccttcagcgatgaagaagttatgcgtctggctgaaaacctgcgcaaaggtatgccaatcgcaacgccggtgttcgacggtgcgaaagaagcagaaattaaagagctgctgaaacttggcgacctgccgacttccggtcagatccgcctgtacgatggtcgcactggtgaacagttcgagcgtccggtaaccgttggttacatgtacatgctgaaactgaaccacctggtcgacgacaagatgcacgcgcgttccaccggttcttacagcctggttactcagcagccgctgggtggtaaggcacagttcggtggtcagcgtttcggggagatggaagtgtgggcgctggaagcatacggcgcagcatacaccctgcaggaaatgctcaccgttaagtctgatgacgtgaacggtcgtaccaagatgtataaaaacatcgtggacggcaaccatcagatggagccgggcatgccagaatccttcaacgtattgttgaaagagattcgttcgctgggtatcaacatcgaactggaagacgagtaattctcgctcaaacaggtcactgctgtcggggtaaaacccggcagcggattgtgctaactccgacgggagcaaatccgtgaaagatttattaaagtttctgaaagcgcagactaaaaccgaagagtttgatgcgatcaaaattgctctggcttcgccagacatgatccgttcatggtctttcggtgaagttaaaaagccggaaaccatcaactaccgtacgttcaaaccagaacgtgacggccttttctgcgcccgtatctttgggccggtaaaagattacgagtgcctgtgcggtaagtacaagcgcctgaaacaccgtggcgtcatctgtgagaagtgcggcgttgaagtgacccagactaaagtacgccgtgagcgtatgggccacatcgaactggcttccccgactgcgcacatctggttcctgaaatcgctgccgtcccgtatcggtctgctgctcgatatgccgctgcgcgatatcgaacgcgtactgtactttgaatcctatgtggttatcgaaggcggtatgaccaacctggaacgtcagcagatcctgactgaagagcagtatctggacgcgctggaagagttcggtgacgaattcgacgcgaagatgggtgcggaagcaatccaggctctgctgaagagcatggatctggagcaagagtgcgaacagctgcgtgaagagctgaacgaaaccaactccgaaaccaagcgtaaaaagctgaccaagcgtatcaaactgctggaagcgttcgttcagtctggtaacaaaccagagtggatgatcctgaccgttctgccggtactgccgccagatctgcgtccgctggttccgctggatggtggtcgtttcgcgacttctgacctgaacgatctgtatcgtcgcgtcattaaccgtaacaaccgtctgaaacgtctgctggatctggctgcgccggacatcatcgtacgtaacgaaaaacgtatgctgcaggaagcggtagacgccctgctggataacggtcgtcgcggtcgtgcgatcaccggttctaacaagcgtcctctgaaatctttggccgacatgatcaaaggtaaacagggtcgtttccgtcagaacctgctcggtaagcgtgttgactactccggtcgttctgtaatcaccgtaggtccatacctgcgtctgcatcagtgcggtctgccgaagaaaatggcgctggagctgttcaaaccgttcatctacggcaagctggaactgcgtggtcttgctaccaccattaaagctgcgaagaaaatggttgagcgcgaagaagctgtcgtttgggatatcctggacgaagttatccgcgaacacccggtactgctgaaccgtgcaccgactctgcaccgtctgggtatccaggcatttgaaccggtactgatcgaaggtaaagctatccagctgcacccgctggtttgtgcggcatataacgccgacttcgatggtgaccagatggctgttcacgtaccgctgacgctggaagcccagctggaagcgcgtgcgctgatgatgtctaccaacaacatcctgtccccggcgaacggcgaaccaatcatcgttccgtctcaggacgttgttctgggtctgtactatatgacccgtgactgtgttaacgccaaaggcgaaggcatggtgctgactggcccgaaagaagcagaacgtctgtatcgctctggtctggcttctctgcatgcgcgcgttaaagtgcgtatcaccgagtatgaaaaagatgcaaacggtgaattagtagcgaaaaccagcctgaaagacacgactgttggccgtgccattctgtggatgattgtaccgaaaggtctgccttactccatcgtcaaccaggcgctgggtaaaaaagcaatctccaaaatgctgaacacctgctaccgcattctcggtctgaaaccgaccgttatttttgcggaccagatcatgtacaccggcttcgcctatgcagcgcgttctggtgcatctgttggtatcgatgacatggtcatcccggagaagaaacacgaaatcatctccgaggcagaagcagaagttgctgaaattcaggagcagttccagtctggtctggtaactgcgggcgaacgctacaacaaagttatcgatatctgggctgcggcgaacgatcgtgtatccaaagcgatgatggataacctgcaaactgaaaccgtgattaaccgtgacggtcaggaagagaagcaggtttccttcaacagcatctacatgatggccgactccggtgcgcgtggttctgcggcacagattcgtcagcttgctggtatgcgtggtctgatggcgaagccggatggctccatcatcgaaacgccaatcaccgcgaacttccgtgaaggtctgaacgtactccagtacttcatctccacccacggtgctcgtaaaggtctggcggataccgcactgaaaactgcgaactccggttacctgactcgtcgtctggttgacgtggcgcaggacctggtggttaccgaagacgattgtggtacccatgaaggtatcatgatgactccggttatcgagggtggtgacgttaaagagccgctgcgcgatcgcgtactgggtcgtgtaactgctgaagacgttctgaagccgggtactgctgatatcctcgttccgcgcaacacgctgctgcacgaacagtggtgtgacctgctggaagagaactctgtcgacgcggtaaaagtacgttctgttgtatcttgtgacaccgactttggtgtatgtgcgcactgctacggtcgtgacctggcgcgtggtcacatcatcaacaaaggtgaagcaatcggtgttatcgcggcacagtccatcggtgaaccgggtacacagctgaccatgcgtacgttccacatcggtggtgcggcatctcgtgcggctgctgaatccagcatccaggtgaaaaacaaaggtagcatcaagctcagcaacgtgaagtcggttgtgaactccagcggtaaactggttatcacttcccgtaatactgaactgaaactgatcgacgaattcggtcgtaccaaagaaagctacaaagtaccttacggtgcggtactggcgaaaggcgatggcgaacaggttgctggcggcgaaaccgttgcaaactgggacccgcacaccatgccggttatcaccgaagtaagcggttttgtacgctttactgacatgatcgacggtcagaccattactcgtcagacagacgaattgaccggtctgtcttcgctggtggttctggattccgcagaacgtacagcaggtggtaaagatctgcgtccggcactgaaaatcgttgatgctcagggtaacgacgttctgatcccaggtaccgatatgcctgcgcagtacttcctgccgggtaaagcgattgttcagctggaagatggcgtacagatcagctctggtgacaccctggcgcgtattccgcaggaatccggcggtaccaaggacatcaccggtggtctgccgcgcgttgcggacctgttcgaagcacgtcgtccgaaagagccggcaatcctggctgaaatcagcggtatcgtttccttcggtaaagaaaccaaaggtaaacgtcgtctggttatcaccccggtagacggtagcgatccgtacgaagagatgattccgaaatggcgtcagctcaacgtgttcgaaggtgaacgtgtagaacgtggtgacgtaatttccgacggtccggaagcgccgcacgacattctgcgtctgcgtggtgttcatgctgtgactcgttacatcgttaacgaagtacaggacgtataccgtctgcagggcgttaagattaacgataaacacatcgaagttatcgttcgtcagatgctgcgtaaagctaccatcgttaacgcgggcagctccgacttcctggaaggcgaacaggttgaatactctcgcgtcaagatcgcaaaccgcgaactggaagcgaacggcaaagtgggtgcaacttactcccgcgatctgctgggtatcaccaaagcgtctctggcaaccgagtccttcatctccgcggcatcgttccaggagaccactcgcgtgctgaccgaagcagccgttgcgggcaaacgcgacgaactgcgcggcctgaaagagaacgttatcgtgggtcgtctgatcccggcaggtaccggttacgcgtaccaccaggatcgtatgcgtcgccgtgctgcgggtgaagctccggctgcaccgcaggtgactgcagaagacgcatctgccagcctggcagaactgctgaacgcaggtctgggcggttctgataacgagtaatcgttaatccgcaaataacgtaaaaacccgcttcggcgggtttttttatggggggagtttagggaaagagcatttgtcagaatatttaaggaatttctgaatactcataatcaatgtagagatgactaatatcctgaaactgactgaactaattgagtcaaactcggcaaggattcgatactattcctgtgtaactttcttaaggaacgagaatgaaacaggaagtggaaaagtggcgaccttttggacatccggatggtgatattcgtgatttatcatttcttgatgctcatcaggctgtctacgttcagcatcatgagggcaaagagcctttagagtatcgcttttgggttacctactctcttcactgcttcacaaaagattatgaacatcagacgaacgaagaaaaacaatcgttaatgtaccacgcgcctaaagaatctcgtcccttctgccagcaccgttataacttagcgcgcacacacttaaaaagaactattttggcgctgccagaaagcaacgttattcatgccgggtatggtagctatgccgtgattgaggtggacttagacggaggagataaggcattttactttgttgcgttcagggctttcagggaaaagaaaaaactccgtttgcatgtaactagcgcttatcccatttctgaaaaacagaaaggtaaatcagtgaaatttttcaccattgcctacaacttattgagaaataagcagcttcctcagccctcaaaataacaaaacccaccttaaggtgggtttcgccagagaattatctctggtattcagaacgccattaccggactttgccttgaccttgcgataatcgcaggttgcgggatgtctgaatttcttcagtctgctgcatcctggaagatgagaacatgtgttcttattttcgtctctatcatagttgagtatttactctcttacaatcagatctctttcattgctcaacaggcgatggcttcagactttgcattacggaatttttaagaaaggcagggcgaaacgaggaagaagcttttcgccctggacaacattcctgctgacggcactaccataaaaaaacacaacgctttcaacaaccttgcgtttttcatcttccgtagcggctcggaataaatttacgttcttacattccgtctcatagtctttgcgaggcccgtcccagatagctgtcccagtctttccataccggctgcaaaccctgagcggttaacgcggcagcaaccgcttccggtctgcgatcgtcgtgcggtgagaactgttccaactcggggtgattatcggcatagccacctggctgcgttttcgagaaggcgctgacgttattgatcgccagcggaataacgcgatcgcgaaaccacggtgattcccgcgtggagagtgacagttcaatctccggtgcaagcagtcggaaggcgcagatggtttgcactaactggcgttcatccataatcgacgcaggctcaatgccgccagtacacgggcgcaggcgcggaaaggagacagagtaacggctttgccagtaatgctgttgcagccatagcaaatgttcggcaaccatatagcagtcaacgcgccagttgtcggaaaggccaattagcgcgccgaggcctatcttatcaatccccgcacgccccagccgatccggcgtttccagccgccagaagaagtcctgtttttttcctttcagatgatggcgggcataagtcgcctcgtgatatgtctcctgataaaccatcacgccatccagaccaagctgttttaactcggcgtattccgtctccgccagcggttgcacttccatttgtagtgaagagaactgttcacgcagggcggggagatgacgacgaaagtaatccatccccactttcgcctgatgttcaccagtgactaatagcagatgttcaaagcccatctcccgtatagcggcgctttccctggcaatatccgcttcatccagcgttttgcgcttgatgcgattactcatggaaatccgcagtacgtgcagtcgttagcgcaaagattggaaagataaagcgggacgtagaaactaactgtgttgccaaatcgctgacgggtcagacgctgcgcccgttgggccagttgttccagatagccactggcggctggcgataacagcgccatcatatcgtcgcgggtgagttgcgaggcatttagcgcccgttctacgtcagcagccgttttgccgttgatacgcaggcggatgtcgtcccagtccagttgtcgccagcgatcgctgaaggttttcatgccgatgcctccagaaatccagtcagcgggctggtggcatgagcaaaatgactgcggctgcccggtccggactgacgtgccagcaggcctgcttctaccgccagacgaaatgccttcgccatgttgacgggatcgtccgcgacggcaattgccgtattcactaacaccgcgtcggcccccatttccagcgcctgcgcggcatggctgggaacgccgatgccagcatcgacaaccaccggcactgtggcctgctggataataatctccagcatggcgcgggtttccagtccctgattcgagccaatcggcgcgccgagcggcatcaccgctgcacagccgacttcttccagacgtttacacaataccggatcggccccgcagtaaggcagcacgacaaatccctgttgtaccagcgtttcggcggctttcagggtttcgatgggatcgggcaacagccagcgggcgtcagggtgaatctctaattttaaccagtttgtgcctaacgcttcacgagccagatgggcggcgaaaatggcttcttccgctgttttcgccccggatgtatttggcagcagggtcacacccgccgcgataagcggttcgaggatagcgtcgttgtgctggcgcaagtcgacacgtttcatcgccagtgtcaccagctggctgccggaagcgcggatcgcctccaccatcagttgtgaagaagcgaatttccctgtgccggtaaacagatgtgaatcaaacgttttgtccgcaatacgtaacatttcaaccccctgcaataacctgaaaaagcaggatctggtcgccatcctgcacgatatgttgcgcccactgctcacgcgggacgatttgctgattaatcgccagagccgcgcccgcttgtcgttggtcgagttgctccagtagttcgtgaacagtttgcccggcggcgcactgcatcggttgatcgttaaacaggatctgcattgcttcctccgcataccgggcaaccactggcgcggcgcaacgccaggctgcgccactggctcgatttaccgtcgaacagtcggagttctcccgcaggtgtctctataccgcttaataacttaatggcttccagtgcctgcaaagtgcccataaccccgaccaccgggccaaccacgcccgccgtgcggcagttgcgttctggctcctggttatctggccacaggcagcggtaacacccctgctcccagggcggcgtcagtaccatcaactgaccgccaaatccgaccgcgctggcggtgataagcggcgtgttgagtgccacgcaggcggcattaatctcctggcgagtcgccatattgtcggtacagtcgagcaccacatcggcccgtgcaaccgcatcttttaacgcctcacccgttaaccgttgttgtaatgctgtcagttgaatgtcgggattcaactgtgtcagtcgctgttggctgacctgcgatttcgggcgatcgatatcttcagtggtaaagaggatttgtcgttgcagattgcttaaatgcacatcgtcgtcatctgccagtaccagcgtcccgacgccagcgcccgccaggtacagcgcagcaggtgtacccagcccgcccagaccgataatcagcacctggctgtcgagcagtttttgctgcccgtccagagcgatatcgtcgagcaggatttggcggctataacgcataaagtcacggtcattcatcgccaactcctgcaatttccagcaactgtgccgttgccaaacgccagtctgcagcttgagtaatggcgctgacgacggcgatactgccgacacccgttgctatcaccgcaggcgcgcgtgccagactgataccgccaatcgccacggtgggataatccgccagtcgctcaacatgccgtgccagctgttccagcccctgcggtgcagaaggcatctgtttggtttgcgtcgggaacacatgtcccagcgcgatataagaggggcgtgctgccagcgcgacgtcgatttccatatcgtcatgtgtcgaaacgcccagccgcaggcctgccgcgcggatggcattgagatcggtggcttgcaaatcttcctgccccaaatggacgccatacgcctgatgcttgatcgccagccgccagtaatcgttgataaacaatcgcgcgttatagcggcggcccagcgcaattgccgccacgacatcggcttccacctcttcatcgcgccgatctttgatgcgtagctggagagtacgtacgcctgcatccaacagacgttcgatccactgtacgctgtccaccaccgggtacagtcctgaacgaaaaggtacaggaggaaaatcaggctgatacatcacgcttcctccttacgcaggtagatttctccgcctctggcacggaagttctccgacatatccgccattcccatttcaatagtttgcgtggcggcgtaatcacgcacttcctggctgattttcatcgagcagaatttcggcccacacatggagcaaaaatgggcgactttacctgactcttgcggcagggtttcatcgtgataagcgcgggcggtaaacgggtcgagggccagattaaactggtcttcccagcgaaattcgaagcgggctttcgacatggcgttatcgcgaatttgcgcgcccggatgccctttcgccaggtcagcggcgtgggcggcaatcttataggtgataagcccctgcttaacatcttctttattgggcagacccagatgctcttttggcgttacgtaacagagcatcgcgcagccaaaccagccaatcatcgccgcaccaatccccgacgtgaagtggtcatagcccggcgcaatatcggtagttagcggccccagagtgtaaaacggcgcttcgtggcagtgctctaactcctcggtcatattgcggcggatcatctgcatcggcacgtggcctgggccttcaatcatcacctgcacgtcatattcccaggcaattttggtcagttcgcccagcgtatgcagctcggcaaactgcgcttcatcgttggcgtcctgaatagaaccggggcgcagaccgtcgcccagcgacagcgaaacgtcataagcggcacagatttcacaaatttcgcggaagtgttgatagaggaaattttcctgatgatgggagaggcaccatttcgccataatcgaaccgccgcgagagacgataccggtcaggcgtttcgcggtcatcggcacatagcgcagcagtacgcccgcatggatagtgaagtaatccacaccttgctcggcctgttccagcagcgtgtcgcggaacgcttcccaggtaagatcttcggcgatcccgttaaccttctccagcgcctggtagatcggcactgtaccgatcggcaccgggctgttacgcaaaatccactcgcgggtttcgtgaatatagcgaccggtggagagatccatcaccgtatccgctccccagcgcgtggaccataccagcttttccacttcttcttcgatggaagaggtgaccgccgagttgccgatattggcgttaacttttaccaggaaattgcgaccaataatcatcggctccgattccggatgattaatgttggccgggataatcgcacgtccggcagcaacttcatcacggacaaattccgcagtgatattttccggcagacgtgcgccaaagctcattcccggatgctggtggcgtaaaacttcgctacggatgcgctcgcggcccatattctcgcggatggcgatgaattccatttccggcgtgatgatgccctggcgggcgtagtgcagttgggtgacacggcgtcctgctttggcgcgttttggtgttagtacgccgctaaaacgcagttcgtcgaggccatcatctgccagccgcgctttagtgtaatcggaactgcgcacggtaagttcttcggtatcgccgcgcgcatcgatccacggctggcgtagttttgccagcccttgctgcacgttaatggcaatctgcggatcaccatacgggccggaggtgtcgtagaccggaatcgcttcgttttcttcgtactgcggctgttctttgctaccgccaattagcgtcgggctaagctggatctcacgcatcggcacgcgcacgccggggtgtgtgccagtgatataaatgcgttttgagttgggaaaggcggtgccttccagggtgtcgataaaatgttgggcccgggcgcgttgttcgcggcgggtcagttttgttgcagacatagctcattccaaaaagttaaggacgtggcttgtcagacgacggatgaagcaagagacgatcgccgcaggggcgatgcgatagcagattaactcttgttcccttcgcaggtattagcctgatcaggttccgcggatcccgaataaacggtctcagccagttaaggcactccgacaagaaattagccccgcaaatggggcattgaatgtaaattacgcgttaacagcgcagaactcaagcaggatgtttgacgcgggcggcgtcaagcaccagcagaatcagcttatcttccagcacaaagcgcgcttccagcgcctcgccgatgtcagataaaacctgttgaaactcaaggtaattatcatgatcgatggcggtttccagactggaatcgtagtaatccataatctgttgagtattggcttcgagttgcggccaaatcttcgcggcgcgcgcgagttgcccgttgccttccagcttatgaagaatgcgctcataaatactgaaatgtccggcagacaagtaatcgaccaggctctgacaaaaatcatcaagggctttttcgtttagcctcatgtacgattctttgccaggcttaatgccaaccagattgtagtaagccacgagcagatgcttacgtacatgtagccagcgatcaaccagtttgttacttcctctgacgcgctccgtcaggttatcgagctggttaagcatgattgactccgcaagtttgtattcaaaaactgctcagtgagaaatgtaaaaaccatgttaaacatgccagtgatgcaaaggtagtgcaagagctatggatcgtataattgaaaaattagatcacggctggtgggtcgtcagccatgaacaaaaattatggttgccgaagggagaattgccatatggcgaagcggcaaatttcgatcttgtgggtcagcgcgcactacaaatcggcgaatggcagggggaacctgtttggttagtacaacagcagcggcgtcacgatatggggtcggtacgtcaggtcattgatctcgatgttgggctgtttcaactggccggacgaggcgtacaactggcggagttttaccgatcgcataaatactgtggttactgcgggcatgaaatgtatccgagcaaaaccgaatgggcgatgctgtgcagccattgccgtgagcgttactacccgcaaatcgccccctgcattattgttgccatccgtcgcgatgattcgatcctcctcgcccagcatacccgccatcgtaacggtgtccatacagtacttgccggattcgtcgaagtgggcgaaaccctcgagcaggcagtcgcgcgggaagtgatggaagagagcggaattaaagttaaaaacttgcgttacgtgacttctcagccgtggccgtttcctcagtctttaatgaccgcgtttatggcggaatatgacagcggcgacatcgtgatcgacccgaaagaattgctcgaggcgaactggtatcgctatgacgatttgccgttactcccgccgcccggcaccgtagcgcgccgtctgatagaagatacggtggcgatgtgtcgggcagagtatgagtgatgatacactgaccgcctgacgcactaaggaacagccaaaatgaccgaacttaaaaacgatcgttatctgcgggcgctgctgcgccagcccgttgatgtcactccagtatggatgatgcgccaggcgggtcgctatctaccggaatataaagccacgcgcgcccaggcgggcgattttatgtcgctgtgcaaaaacgccgagctggcgtgcgaagtgactttgcaaccgctgcgtcgctacccgctggatgcggcgatcctcttttccgatatcctcaccgtgccggacgcgatggggttagggctctattttgaagccggagaaggtccgcgttttacctcgccagtcacctgcaaagccgacgtcgataaactgccaattccggacccggaagatgagctgggttacgtgatgaacgcggtgcgtaccattcgtcgcgaactgaaaggcgaagtgccgctgattggtttttccggcagcccgtggacgctggcgacctacatggtggaaggcggcagcagcaaagccttcaccgtgatcaaaaaaatgatgtatgccgatccgcaggcgctgcacgctctgctcgataaactggcgaaaagcgtcactttgtatctgaatgcgcagattaaagccggtgctcaggcagtgatgattttcgacacctggggcggcgtgcttaccgggcgcgattatcaacagttctcgctctattacatgcataaaattgttgatggtttagtgcgtgaaaacgacggtcgccgcgtaccggtcacgctgtttaccaaaggcggcggacagtggctggaagccatggcagaaaccggttgcgatgcgctgggcctcgactggacaacggacatcgccgatgcgcgccgccgtgtgggcaataaagtcgcgttgcagggtaatatggatccgtcgatgctgtacgcgccgcctgcccgcattgaagaagaagtagcgactatacttgcaggtttcggtcacggcgaaggtcatgtctttaaccttggtcacggcattcatcaggatgtgccgccagaacatgctggcgtgttcgtggaggcagtgcatcgactgtctgaacagtatcaccgctaaggagtgattatggatctcgcgtcattacgcgctcaacaaatcgaactggcttcttctgtgatccgcgaggatcgactcgataaagatccaccggatctgatcgccggagccgatgtcgggtttgagcagggcggagaagtgacgcgagcggcgatggtgctgctgaaatatccctcgcttgagctggtggagtataaagttgcccgcatcgccaccaccatgccttacattccaggttttctttccttccgcgaatatcctgcgctgctggcagcgtgggagatgctgtcgcaaaagccggatttagtgtttgtcgatggtcatgggatctcgcatcctcgccgtcttggcgtcgccagccattttggcttattggtggatgtgccgaccattggcgtggcgaaaaaacgtctctgcggtaaattcgaaccgctctccagcgaaccgggcgcgctggccccgctgatggataaaggcgagcagctggcctgggtctggcgcagcaaagcgcgctgtaacccgttgtttatcgctaccggccatcgggtcagcgtggacagcgcgctggcgtgggtacaacgctgcatgaaaggctatcgtctgccggagccaacgcgctgggcggacgcggtggcctcggaacgtccggcgttcgtgcgctatacagcaaatcagccctaattcaggtaaactgcggataatttccgtatttgagaactcaacatgttacaaaacccaattcatctgcgtctggagcgcctggaaagctggcagcatgtcactttcatggcttgcttatgcgaacgcatgtaccccaattacgccatgttctgccagcaaaccggttttggtgatgggcaaatttaccgtcgtattctcgatctcatctgggaaacgctgaccgttaaagacgcaaaagtaaatttcgacagccaactggagaaatttgaagaagcgattccttcagccgacgatttcgatctgtacggcgtttatccggcaatcgatgcctgcgtggcgttaagtgaactggtccattcgcgtttgagtggtgaaacgctcgaacacgcggtggaagtgagtaagacctccatcacgaccgttgcgatgctggaaatgactcaggctggtcgcgaaatgagcgatgaagagcttaaagaaaacccagctgtagagcaagaatgggacattcagtgggaaatattccgacttttagctgagtgcgaagaacgcgatatcgagctgataaaaggccttagggcagacctgcgtgaggcgggtgagagcaatattggtataatttttcagcaataagaccagaaaacgtgatttaacgcctgatttgtcgtacctggagtcttccctttcgccccccgtctggtctacatttggggggcgaaaaaaagtggctatcggtgcgtgtatgcaggagagtgctattctggcatttccgtcgcactcgatgcttagcaagcgataaacacattgtaaggataacttatgaacaagactcaactgattgatgtaattgcagagaaagcagaactgtccaaaacccaggctaaagctgctctggagtccactctggctgcaattactgagtctctgaaagaaggcgatgctgtacaactggttggtttcggtaccttcaaagtgaaccaccgcgctgagcgtactggccgcaacccgcagaccggtaaagaaatcaaaattgccgcagctaacgtaccggcatttgtttctggcaaggcactgaaagacgcagttaagtaagattgcgtggcagtgaacagttttaacgaaggggtggtttcaccccttttgtctttctggcgtcgatcattgatgctggcaggcgctctgtttctcactgcctgtagtcacaactcttcacttcctccctttaccgccagtggatttgctgaagaccagggcgcggtacgcatctggcgaaaagacagcggcgataatgtgcatctgcttgccgtgtttagcccgtggcgcagtggcgataccacgacgcgagagtatcgctggcagggcgataacctcacgctcatcaatatcaatgtttacagcaaaccgccggtgaacattcgcgcgcgttttgacgatcgcggtgatctgagctttatgcaacgtgaatccgatggggaaaagcagcagctttctaacgaccaaatcgatttataccgttatcgtgctgatcagatccgccagattagcgatgccttacgtcaggggagagtcgtgctgcgccaggggcgctggcatgcgatggaacagaccgtgaccacctgcgaagggcaaaccattaaacctgatttagattcgcaggcgatagcgcatatcgagcgccgccagagccgctcttctgttgatgtcagcgtggcatggctggaagcgcccgaaggttcgcaattactgttagtggcaaactctgatttctgtcgctggcaacccaacgagaaaacgttctgatttaccagtggcccatacccatatgaccgccaccaccgcagccgccgtagcccatgcccattccggctccgcgcggaatacccgcttcagccatcgcgatatcccgtttcacccgtaactcatctaacgactgacgcaaattctccatctctttggcgaccgcgttaattttgctgctatccggtgggttcgcggctaacagggcattgtattcataacgcttcgtcaccagttgctgttgcagtgcgctgctttgagcgtaaaagtcattatggattttctgccacgctgtctgttgttcgctggtcaaaggcgcggcattttgctgccacataccgtgtccgccgtgagcaaatgcagatgtcgatcccatcgccattgctgaaagcgccatcattaccagggcaattttcgtgttccgtttcatggttaatcctccagtggttgtcttacttcgggtattgcatcttccgtgccaacgatgaaacgctgatatgacgggtaatctggcatgataaacgagtaaaaatgactcgcctgctgcgggtagcgagtcatttttactcattgaaacttaagcctttgtgttacagcgcagggtaagcgctgataaaagatggcatgatttctgctgtcagaaagggatgagcaggcaaagaagaagatgcgttttatgcaacgttctaaagactccttagctaaatggttaagcgcgatcctccccgtggtcattgttgggctggtagggttgtttgcggtgacggtgattcgcgattatgggcgcgagactgccgccgccagacaaacgctgctggaaaaaggcagtgtacttattcgcgctcttgaatccggctcgcgcgtcggcatggggatgcgcatgcatcatgcgcagcagcaggccttactggaagaaatggccgggcagcctggagtacgttggtttgcggtcacggatgaacaaggaacaatcgtgatgcatagcaactccggcatggtgggaaaacagctttattccccgcaggaaatgcagcagttacatccgggagatgaagaagcgtggcggcggatcgatagcgcagacggcgagcctgttctggaaatttatcgccagtttcaaccgatgtttgctgctggaatgcaccggatgcgccatatgcagcagtatgccgcgacaccacaaacaattttcatcgctttcgacgccagtaatattgtgagtgccgaagatcgtgagcagagaaacaccctgattatcctcttcgccctggcgacggtcttgctggcaagcgtattgtcattcttctggtatcgccgctatctgcgctcgcgccagcttctacaagatgaaatgaagcgcaaagagaagctagtggcgctggggcatcttgcggcaggcgttgcccacgaaatccgtaacccactttcctcgattaaaggactggcgaaatactttgccgagcgcgcgcctgcagggggagaagcgcatcaactggcgcaggtgatggcgaaagaggccgaccgtttaaaccgcgtggtaagcgagctgctggaactggttaagccaacgcatctggctttgcaggcggtggatctcaacacgctgattaaccactcattacagctggtaggccaggatgcaaacagccgggagatccagttacgctttaccgccaacgacacattaccggaaattcaggccgatccggacaggctgactcaggtcctgttgaatctctatctcaatgctattcaggcgattggtcagcatggcgtgattagcgtgacggtcagcgaaagcggcgcgggcgtgaaaatcagcgttaccgacagcggtaagggaattgcggcagatcagcttgaagccatcttcactccgtacttcaccaccaaagccgaaggcaccggattggggctggcggtcgtgcataatattgttgaacaacacggtggtacaattcaggtcgcaagccaggagggaaaaggctcaacgttcaccctctggcttccggtcaatattacgcgtaaggacccacaaggatgacgcacgataatatcgatattctggtggtggatgatgacattagccactgcactattttgcaggctttactgcgcggctggggctataacgtcgcgctggcgaacagcgggcgacaggcgctggagcaggtgcgggagcgggtttttgatcttgtgctttgcgatgtgcgaatggcagagatggacggcattgccacgctaaaagagatcaaagcgttaaatccggcgattccggtactgattatgaccgcatactccagcgtcgagacggcggtagaggcactgaaaaccggggcgctggattatctcatcaagccgctggatttcgacaccctgcaggcgacgctggaaaaggcgctcgcgcatacgcacagtattgatgctgaaacgcctgcggtgactgccagccagttcggtatggtcggtaaaagcccggcgatgcaacacctgctcagtgaaatcgccctcgtcgcgccatcggaagccacggtgctgatccacggcgattccggcaccggtaaagagctggtcgccagggcgattcacgccagtagcgcacgtagcgaaaaaccgctggtaacgctcaactgtgcggcactcaacgaatccttgctggaatctgaattgttcggtcacgaaaaaggggcgtttactggagccgataaacgccgggaagggcgctttgttgaggcggacggcggcacgctgtttctcgatgaaattggcgatatctcgccgatgatgcaggtgcgtctgctgcgtgcgattcaggagcgcgaagttcagcgtgtcggtagcaaccagactatctcggttgatgtccggctgattgcggcgacccatcgcgatcttgccgcagaggtgaatgccgggcgttttcgccaggatctctactatcgcctgaatgtggtggcgattgaagtaccatcgctgcggcaacggcgggaggatatccctctgctggctagccattttcttcagcgttttgccgagcgtaatcgcaaggcggtaaaaggctttacgccacaggcgatggatttgctgatccactacgactggccgggaaacattcgtgaactggaaaacgcggtggaaaggtcggtggtgctgctgaccggggaatatatttccgaacgcgagctgccgctggcgattgccagtacgccgatcccgctggggcaaagtcaggatattcagccgctggtggaagtcgaaaaagaagtgattctggcggcactggagaaaacgggcggcaacaaaaccgaagccgcccgtcagttagggatcacgcgcaaaacgctattggcaaaactgtcgcgttagttctgctcgcgttcgatagcgcgccagccgatatctttccggcagaagcagtcgtcccagtgaatatcggtcattaaggcataagcgcgtttctgcgcttctgccacggtatgacccagcgcggtgacgcacagtacgcgcccgccgctggtcactacctgctcgttatccgccagtttcgtgcccgcgtggaacactttgccgcctgccacttcttccagcggcaggccgtggatcacgtcaccggtgcggtaatcacccggatatccacccgcagccatcaccacgccgagagaagcgcgttcatcccactctgacgttttctcgtccagtttgccttcacaggccgccaggcagagctcaaccagatcggacttcatgcgcagcataatcggctgggtttctggatcgccaaagcggcagttaaattcgataaccttcggattgccctgtttgtcgatcatcaggcccgcgtagagaaaaccggtgtaggtgttgccttccgccgccatgcctttcacggttggccagatgatacgttccatggtgcgctgatgaacttcatcggttactaccggcgcgggggagtaagcgcccatcccgcccgtgtttggtccggtatctttatcgcctacgcgtttgtgatcctggctggtggccatcggcagcacatgctcgccgtctaccatcacgataaagctcgcttcttcgccatcgaggaactcttcgataacgatgcgatgacccgcgtcgccaaaagcgttgcccgccagcatatcgtgaacagccgcttccgcttcttccagcgtcatcgccacgataacgcctttcccggcagccagaccgtccgctttaatgacgattggcgcgcctttctcacgcagatacgccagcgcaggttctacctcggtgaagttctggtattccgccgtagggatcttatggcgggccaggaaatctttggtaaacgcttttgagccttccagttgggccgcacctgcggttgggccgaagattttcagcccggcggcgcggaaggtatcgaccacgcctttcaccagcggcgcttccgggccgacgatggtcagatcaatcttttcgttttgtgcgaaatccaacagcgccgggatatcggttacgccgatagcgacgttctgtagcgcgggttccagcgcagtgcctgcattacccggagcaacaaaaacagtttcaaccagcggcgactgcgccgctttccaggccagcgcgtgctcgcgcccgccgttaccaatcactaatactttcatctattgctccattaatggcggaagtggcgcatgtcggtgaagagcatcgcaataccgtgctcgtcggcggcggcaatcacttcgtcatcacggatagaaccgccaggctggattacgcaggtcacgcccgcagcggcggcggcatcaataccgtcgcggaacgggaagaacgcgtcagaagccatcgaggaacctttcacttccaggccttcatcggccgctttaataccggcgatttttgcggagtacacgcggctcatctggcccgcgccaatgccgatagtcatattgtttttggcatagacgatagcgttggatttcacgaacttcgccaccttccagcagaacagcgcatcacgcagttcctgttcgctcggctgacgtttggtcaccacgcgcagttcttccgcaccgaccatccccaggtcacgatcctgaaccagcagaccgccgttcacgcgtttgaaatcgaggcccggaacacgctcgccccactgaccgcaggtcagaacgcgtacgttctgtttggcggcggtgattttcagggcttcttcgctggcggacggcgcaataatcacttcgacaaactgacgagaaatgatggcctgtgcggtttccgcatccagctcgcggttaaaggcaatgatgccgccgaatgcggaggttgggtcggttttgtacgcgcgatcgtaagcatcaagaatggaattgccgatagccacgccgcaagggttggcgtgcttcacaatcacacatgccggctcggcgaactctttcacgcactccagcgccgcatcggtatcggcgatgttgttataagagagggctttaccctgaacctgggttgcggtagcaacggaggcttctttcacattctcttctatatagaaggcagcctgctggtggctgttctcgccgtaacgcatatccagcttcttaatgaagttcaggttcagcgtgcgtgggaagcgaccggcggcttctttgctttcaccgtggtaagccggaaccatgctgccgaagtagttggcaatcatgctgtcgtaggcggcagtgtgttcgaaggctttgatggcgaggtcgaaacgggttgcaagcgtcagcgatccttcgttgtcatccatctctttaataatggcgtcgtagtcgctgctcttcaccacgattgcgacatctttatggttcttggcggcggagcgcaccatcgttgggccgccgatatcgatgttctcaaccgcatcttccagcgagcaaccttcacgggccacggtctgggcgaacggatacaggttaacaaccaccatatcgataggctggatctgatgttcttccataatggcatcgtcctggccgcgacggcccagaatgccaccatgtactttcggatgcagggtcttcacgcgtccatccatcatctccgggaaaccggtgtaatcggaaacttcggttaccggcagacctttttctgctaacagacgggcagtgccccctgtagacagcagctccacaccgcgtgcggaaagtgcctgggcgaattcgacgataccggctttgtcagaaacactgagcagagcgcggcggactggacgacgttgttgcatggtaaatcccctggatttgactattacagagagcgttagctgaatttttcgcgaaaaactcagctaacgcccctaacggggcatccttatttttcgcccgcattgtaacgaaaacgtttgcgcaacgctcgcgaatttttctctttcaatggtgatcacaattttgacagtggttaccgtgggaaaaatacagaaattacattgatgattgtggataactctgtgcgtaaaaaggtataaagcggggttttgctggggaatgcagcagtcagtcatttttctgcaatttttctattgcggcctgcggagaactccctataatgcgcctccatcgacacggcggatgtgaatcacttcacacaaacagccggttcggttgaagagaaaaatcttgaaattcagggttgactctgaaagaggaaagcgtaatatacgccacctcgcgacagtgcgctaaagcgcgtcgcaactgctctttaacaatttatcagacaatctgtgtgggcactcgaagatacggattcttaacgtcgcaagacgaaaaatgaataccaagtctcaagagtgaacacgtaattcattacgaagtttaattctttgagcatcaaacttttaaattgaagagtttgatcatggctcagattgaacgctggcggcaggcctaacacatgcaagtcgaacggtaacaggaaacagcttgctgtttcgctgacgagtggcggacgggtgagtaatgtctgggaaactgcctgatggagggggataactactggaaacggtagctaataccgcataacgtcgcaagaccaaagagggggaccttcgggcctcttgccatcggatgtgcccagatgggattagcttgttggtggggtaacggctcaccaaggcgacgatccctagctggtctgagaggatgaccagccacactggaactgagacacggtccagactcctacgggaggcagcagtggggaatattgcacaatgggcgcaagcctgatgcagccatgccgcgtgtatgaagaaggccttcgggttgtaaagtactttcagcggggaggaagggagtaaagttaatacctttgctcattgacgttacccgcagaagaagcaccggctaactccgtgccagcagccgcggtaatacggagggtgcaagcgttaatcggaattactgggcgtaaagcgcacgcaggcggtttgttaagtcagatgtgaaatccccgggctcaacctgggaactgcatctgatactggcaagcttgagtctcgtagagggggtagaattccaggtgtagcggtgaaatgcgtagagatctggaggaataccggtggcgaaggcggccccctggacgaagactgacgctcaggtgcgaaagcgtggggagcaaacaggattagataccctggtagtccacgccgtaaacgatgtcgacttggaggttgtgcccttgaggcgtggcttccggagctaacgcgttaagtcgaccgcctggggagtacggccgcaaggttaaaactcaaatgaattgacgggggcccgcacaagcggtggagcatgtggtttaattcgatgcaacgcgaagaaccttacctggtcttgacatccacggaagttttcagagatgagaatgtgccttcgggaaccgtgagacaggtgctgcatggctgtcgtcagctcgtgttgtgaaatgttgggttaagtcccgcaacgagcgcaacccttatcctttgttgccagcggtccggccgggaactcaaaggagactgccagtgataaactggaggaaggtggggatgacgtcaagtcatcatggcccttacgaccagggctacacacgtgctacaatggcgcatacaaagagaagcgacctcgcgagagcaagcggacctcataaagtgcgtcgtagtccggattggagtctgcaactcgactccatgaagtcggaatcgctagtaatcgtggatcagaatgccacggtgaatacgttcccgggccttgtacacaccgcccgtcacaccatgggagtgggttgcaaaagaagtaggtagcttaacctcgggagggcgcttaccactttgtgattcatgactggggtgaagtcgtaacaaggtaaccgtaggggaacctgcggttggatcacctccttaccttaaagaagcgttctttgaagtgctcacacagattgtctgatagaaagtgaaaagcaaggcgtcttgcgaagcagactgatacgtccccttcgtctagaggcccaggacaccgccctttcacggcggtaacaggggttcgaatcccctaggggacgccacttgctggtttgtgagtgaaagtcacctgccttaatatctcaaaactcatcttcgggtgatgtttgagatatttgctctttaaaaatctggatcaagctgaaaattgaaacactgaacaacgagagttgttcgtgagtctctcaaattttcgcaacacgatgatgaatcgaaagaaacatcttcgggttgtgaggttaagcgactaagcgtacacggtggatgccctggcagtcagaggcgatgaaggacgtgctaatctgcgataagcgtcggtaaggtgatatgaaccgttataaccggcgatttccgaatggggaaacccagtgtgtttcgacacactatcattaactgaatccataggttaatgaggcgaaccgggggaactgaaacatctaagtaccccgaggaaaagaaatcaaccgagattcccccagtagcggcgagcgaacggggagcagcccagagcctgaatcagtgtgtgtgttagtggaagcgtctggaaaggcgcgcgatacagggtgacagccccgtacacaaaaatgcacatgctgtgagctcgatgagtagggcgggacacgtggtatcctgtctgaatatgggggaccatcctccaaggctaaatactcctgactgaccgatagtgaaccagtaccgtgagggaaaggcgaaaagaaccccggcgaggggagtgaaaaagaacctgaaaccgtgtacgtacaagcagtgggagcacgcttaggcgtgtgactgcgtaccttttgtataatgggtcagcgacttatattctgtagcaaggttaaccgaataggggagccgaagggaaaccgagtcttaactgggcgttaagttgcagggtatagacccgaaacccggtgatctagccatgggcaggttgaaggttgggtaacactaactggaggaccgaaccgactaatgttgaaaaattagcggatgacttgtggctgggggtgaaaggccaatcaaaccgggagatagctggttctccccgaaagctatttaggtagcgcctcgtgaattcatctccgggggtagagcactgtttcggcaagggggtcatcccgacttaccaacccgatgcaaactgcgaataccggagaatgttatcacgggagacacacggcgggtgctaacgtccgtcgtgaagagggaaacaacccagaccgccagctaaggtcccaaagtcatggttaagtgggaaacgatgtgggaaggcccagacagccaggatgttggcttagaagcagccatcatttaaagaaagcgtaatagctcactggtcgagtcggcctgcgcggaagatgtaacggggctaaaccatgcaccgaagctgcggcagcgacgcttatgcgttgttgggtaggggagcgttctgtaagcctgtgaaggtgtactgtgaggtatgctggaggtatcagaagtgcgaatgctgacataagtaacgataaagcgggtgaaaagcccgctcgccggaagaccaagggttcctgtccaacgttaatcggggcagggtgagtcgacccctaaggcgaggccgaaaggcgtagtcgatgggaaacaggttaatattcctgtacttggtgttactgcgaaggggggacggagaaggctatgttggccgggcgacggttgtcccggtttaagcgtgtaggctggttttccaggcaaatccggaaaatcaaggctgaggcgtgatgacgaggcactacggtgctgaagcaacaaatgccctgcttccaggaaaagcctctaagcatcaggtaacatcaaatcgtaccccaaaccgacacaggtggtcaggtagagaataccaaggcgcttgagagaactcgggtgaaggaactaggcaaaatggtgccgtaacttcgggagaagggcacgctgatatgtaggtgaagcgacttgctcgtggagctgaaatcagtcgaagataccagctggctgcaactgtttattaaaaacacagcactgtgcaaacacgaaagtggacgtatacggtgtgacgcctgcccggtgccggaaggttaattgatggggtcagcgcaagcgaagctcttgatcgaagccccggtaaacggcggccgtaactataacggtcctaaggtagcgaaattccttgtcgggtaagttccgacctgcacgaatggcgtaatgatggccaggctgtctccacccgagactcagtgaaattgaactcgctgtgaagatgcagtgtacccgcggcaagacggaaagaccccgtgaacctttactatagcttgacactgaacattgagccttgatgtgtaggataggtgggaggctttgaagtgtggacgccagtctgcatggagccgaccttgaaataccaccctttaatgtttgatgttctaacgtggacccgtaatccgggttgcggacagtgtctggtgggtagtttgactggggcggtctcctcctaaagagtaacggaggagcacgaaggttggctaatcctggtcggacatcaggaggttagtgcaatggcataagccagcttgactgcgagcgtgacggcgcgagcaggtgcgaaagcaggtcatagtgatccggtggttctgaatggaagggccatcgctcaacggataaaaggtactccggggataacaggctgataccgcccaagagttcatatcgacggcggtgtttggcacctcgatgtcggctcatcacatcctggggctgaagtaggtcccaagggtatggctgttcgccatttaaagtggtacgcgagctgggtttagaacgtcgtgagacagttcggtccctatctgccgtgggcgctggagaactgaggggggctgctcctagtacgagaggaccggagtggacgcatcactggtgttcgggttgtcatgccaatggcactgcccggtagctaaatgcggaagagataagtgctgaaagcatctaagcacgaaacttgccccgagatgagttctccctgactccttgagagtcctgaaggaacgttgaagacgacgacgttgataggccgggtgtgtaagcgcagcgatgcgttgagctaaccggtactaatgaaccgtgaggcttaaccttacaacgccgaagctgttttggcggatgagagaagattttcagcctgatacagattaaatcagaacgcagaagcggtctgataaaacagaatttgcctggcggccgtagcgcggtggtcccacctgaccccatgccgaactcagaagtgaaacgccgtagcgccgatggtagtgtggggtctccccatgcgagagtagggaactgccaggcatcaaattaagcagaaggcccagtcggaagactgggcctttttgcgctggtgcagaaaaaggtcggatgcgacgctggcgcgtcttctccagcctgggcaggcacggcaggggcggcttattcccccacatacgccagattcagcaacggatacggtttccccaaatcgtccacctcagagcgtcccgtaaccttaaaacccaccttcttatagaacccaaccgcctgctcattttgctcattaacgttggttgtcagttccggtgccatcgagagcgcatgctccaccagcatccgacccacgccgcagccgcgcacatcaggatcgataaacagcgcatccatatgctgcccacttaacaacataaacccaaccggctgatcccgttcattaaccgcgacccacaacggtgcttccggcagaaaggaacgaaccagctcttccagctcggcccgatactctgctgataaaaaatcgtgggtggcatcgacagatcgacaccaaatcgcaacgagttcctccccttcctcatgctgtgagcggcgaatactaataaccattttctctccttttcgtcattcttatattctaacgtagccttttccttgaaactttctcaccttcaacatgcaggctcgacattggcaaattttctggttatcttcagctatctggatgtctaaacgtataagcgtatgtagtgaggtaatcaggttatgcctattcgtgtgccggacgagctacccgccgtcaatttcttgcgtgaagaaaacgtctttgtgatgacaacttctcgtgcgtctggtcaggaaattcgtccacttaaggttctgatccttaacctgatgccgaagaagattgaaactgaaaatcagtttctgcgcctgctttcaaactcacctttgcaggtcgatattcagctgttgcgcatcgattcccgtgaatcgcgcaacacgcccgcagagcatctgaacaacttctactgtaactttgaagatattcaggaacagaactttgacggtctgattgtaaccggtgcgccgctgggcctggtggagtttaatgatgtcgcttactggccgcagatcaaacaggtgctggagtggtcgaaagatcacgtcacctcgacgctgtttgtctgctgggcggtacaggccgcgctcaatatcctctacggcattcctaagcaaactcgcaccgacaaactctctggcgtttacgagcatcatattctccatcctcatgcgcttctgacgcgtggctttgatgattcattcctggcaccacattcgcgctatgctgactttccggcagcgttgattcgtgattacaccgatctggaaattctggcagagacggaagaaggggatgcatatctgtttgccagcaaagataagcgcattgcctttgtgacgggccatcccgaatatgatgcgcaaacgctggcgcaggaatatttccgcgatgtggaagccggactaggcccggaagtaccgtataactatttcccgcacaatgatccgcaaaatacaccgcgagcgagctggcgtagtcacggtaatttgctgtttaccaactggctcaactattacgtctatcagatcacgccatacgatctacggcacatgaatccaacgctggattaatcttctgtgatagtcgatcgttaagcgattcagcaccttacctcaggcaccttcgggtgccttttttatttccgaaacgcacctcaggaggtgaataaattttattcatattgttatcaataagttatcaagtatttttaattaaaatggaaattgtttttgattttgcattttaaatgagtagtcttagttgtgctgaacgaaaagcgcacaacgatccttcgttcacagtggggaagttttcggatccatgacgaggagctgcacgatgactgaacaggcaacaacaaccgatgaactggctttcataaggccgtatggcgagcaggagaagcaaattcttactgccgaagcggtagaatttctgactgagctggtgacgcattttacgccacaacgcaataaacttctggcagcgcgcattcagcagcagcaagatattgataacggaactttgcctgattttatttcggaaacagcttccattcgcgatacggactggaaaattcgtggtattcccgcggacttacaagatcgtcgagtcgagataactggcccggttgagcgcaagatggtgatcaacgcactgaacgccaatgtgaaagtctttatggccgatttcgaagattcactggcaccagactggaacaaagtgatcgacgggcaaattaacctgcgcgatgcggttaacggcaccatcagctataccaatgaagcaggcaaaatttatcagctcaagcccaatccagcggttttgatttgtcgggtacgcggtctgcacttgccggaaaaacatgtcacctggcgtggtgaggcaatccccggtagcctgtttgattttgcgctctatttcttccacaactatcaggcactgttggcaaagggcagcggtccctatttctatctgccgaaaacccagtcctggcaggaagcggcctggtggagcgaagtcttcagctatgcagaagatcgctttaatctgccgcgcggcaccatcaaggcgacgttgctgattgaaacgctgcccgccgtgttccagatggatgaaatccttcacgcgctgcgtgaccatattgttggtctgaactgcggtcgttgggattacatcttcagctatatcaaaacgttgaaaaactatcccgatcgcgtcctgccagacagacaggcagtgacgatggataaaccattcctgaatgcttactcacgcctgttgattaaaacctgccataaacgcggtgcttttgcgatgggcggcatggcagcgtttattccgagcaaagatgaagagcgcaataaccaggtgctcaacaaagtaaaagcggataaagcgctggaagccaataacggtcacgatggcacatggattgctcacccaggccttgcggatacggcaatggcggtattcaacgacattctcggctcccgtaaaaatcagcttgaagtgatgcgcgaacaagacgtgccgattactgccgatcagctgctggcaccttgtgatggtgaatgcaccgaagaaggtatgcgcgccaacattcgcgtggcagtgcagtacatcgaagcatggatctccggcaacggctgcgtgccgatttatggcctgatggaagatgcggcgacggctgaaatttcccgtacctcaatctggcagtggatccatcatcaaaaacgttgagcaatggcaaaccggtgaccaaagccttgttccgccagatgctgggtgaagagatgaaagtcattgccagcgaactgggcgaagaacgtttctcccaggggcgttttgacgatgccgcacgcttgatggaacagatcaccacttccgatgagttaattgatttcctgaccctgccaggctaccgcctgttagcgtaaaccaccacataactatggagcatctgcacatgaaaacccgtacacaacaaattgaagaattacagaaagagtggactcaaccgcgttgggaaggcattactcgcccatacagcgcggaagatgtggtgaaattacgcggttcagtcaatcctgaatgcaccctggcgcaactgggcgcggcgaaaatgtggcgtctgctgcatggcgagtcgaaaaaaggctacatcaacagcctcggtgcactgactggcggtcaggcgctgcaacaggcgaaagcgggtattgaagcagtctatctgtcgggatggcaggtagcggcggacgctaacctggcggccagcatgtatccggatcagtcgctctatccggcaaactcggtgccagctgtggtggagcggatcaacaacaccttccgtcgtgccgatcagatccaatggtccgcaggcattgagccgggcgatccgcgctatgtcgattacttcctgccgatcgttgccgatgcggaagccggttttggcggtgtcctgaatgcctttgaactgatgaaagcgatgattgaagccggtgcagcggcagttcacttcgaagatcagctggcgtcagtgaagaaatgcggtcacatgggcggcaaagttttggtgccaactcaggaagctattcagaaactggtcgcggcgcgtcttgcagctgacgtgacgggcgttccaaccctgctggttgctcgtaccgatgccgatgcggcggatctgattacctccgattgcgacccgtatgacagtgaatttattactggcgagcgtaccagtgaaggcttcttccgtactcatgcgggcattgagcaagcgatcagccgtggcctggcgtatgcgccatatgctgacctggtctggtgtgaaacctccacgccggatctggaactggcgcgtcgctttgcacaagctatccacgcgaaatatccgggcaaactgctggcttataactgctcgccgtcgttcaactggcagaaaaacctcgacgacaaaactattgccagcttccagcagcagctgtcggatatgggctacaagttccagttcatcaccctggcaggtatccacagcatgtggttcaacatgtttgacctggcaaacgcctatgcccagggcgagggtatgaagcactacgttgagaaagtgcagcagccggaatttgccgccgcgaaagatggctataccttcgtatctcaccagcaggaagtgggtacaggttacttcgataaagtgacgactattattcagggcggcacgtcttcagtcaccgcgctgaccggctccactgaagaatcgcagttctaagcaacaacaaccgttgctgactgtaggccggataaggcgttcacgccgcatccggcaatcggtgcacgatgcctgatgcgacgcttgcgcgtcttatcatgcctacagccgttgccgaacgtaggccggataaggcatttacgccgcatccggcaatcggtgcacgatgcctgatgcgacgcttgcgcgtcttatcatgcctacaaccgttgccgaacgtaggctggataaggcgtttacgccgcatccggcaattctctgctcctgatgagggcgctaaatgccgcgtggcctggaattactgattgctcaaaccattttgcaaggcttcgacgctcagtatggtcgattcctcgaagtgacttccggggcgcagcagcgtttcgaacaggccgactggcatgctgtccagcaggcgatgaaaaaccgtatccatctttacgatcatcacgttggtctggtcgtggagcaactgcgctgcattactaacggccaaagtacggacgcggcatttttactgcgcgttaaagagcattacacgcggctgttgccggattacccgcgcttcgagattgcggagagcttttttaactccgtgtactgtcggttatttgaccaccgctcgcttactcccgagcggctttttatctttagctctcagccagagcgccgctttcgtaccattccccgcccgctggcgaaagactttcaccccgatcacggctgggaatctctactgatgcgcgttatcagcgacctgccgctgcgcctgcgctggcagaataaaagccgtgacattcattacatcattcgccatctgacggaaacgctggggacagacaacctcgcggaaagtcatttacaggtggcgaacgaactgttttaccgcaataaagccgcctggctggtgggcaaactgatcacgccttccggcacgttgcccttcttactgccgatccaccagacggacgacggcgagttatttattgatacctgcctgacgacgaccgccgaagcgagcattgtttttggctttgcgcgttcttattttatggtttatgcaccgctgcccgcagcgctggtcgagtggctacgggaaattctgccaggtaaaaccactgctgaattgtatatggctatcggctgccagaagcacgccaaaaccgaaagctaccgcgaatatctcgtttatctacagggctgtaatgagcagttcattgaagcgccgggtattcgtggaatggtgatgttggtatttacgctgccgggctttgatcgggtattcaaagtcatcaaagacaagttcgcgccgcagaaagagatgtctgccgctcacgttcgtgcctgctatcaactggtgaaagagcacgaccgtgtgggccgaatggcggacacccaggagtttgaaaactttgtgctggagaagcggcatatttccccggcattaatggaattactgctccaggaagcagcggaaaaaatcaccgatcttggtgagcagattgtaattcgccatctctatatcgagcggcggatggtgccgctcaatatctggctggaacaagtggaaggtcagcagttgcgcgacgccattgaagaatacggtaacgctattcgccagcttgccgctgctaacatttttcctggcgacatgctgtttaaaaacttcggtgtcacccgtcacgggcgtgtggttttttatgattacgatgaaatttgctacatgacggaagtgaatttccgcgacatcccgccgccgcgctatccggaagacgaacttgccagcgaaccgtggtacagcgtctcgccgggcgatgttttcccggaagagtttcgccactggctatgcgccgacccgcgtattggtccgctgtttgaagagatgcacgccgacctgttccgcgctgattactggcgcgcactacaaaaccgcatacgtgaagggcatgtggaagatgtttatgcgtatcggcgcaggcaaagatttagcgtacggtatggggagatgcttttttgagtaaagcttccatataatttttctccgcaatgtatcgagggttatccgtaaagccaaagctttcagccatcttatttaatgtattaaggattaattcagcaataacccggtgaccaaattcaaaagccaactcaaaggcagagtatttttgtggcgctttgtgttgccaaaaatccataatatcttcagcggtaaatccaaacaggcgtgcatggtcagataaagcaagataaaccgtctctacaacattttgttgtttatgctgtatcgctgaaaacaaaccgggatattcattagaattatttgccaggaggaggggcttcatattttttttatcgaatttaaacgtattaaacagagtgggtaatgcgttaaaaatagtattaataacgttcatatgtccactattataggcagtcaacatttctgttctatgtagttctggcattttctggagctgaatcatcagttgcgtaagttggtgattctgaccaattgccattagcaaattcatcgttgctggtgataatggaggggttatttcatccacagatccttttaacatcaatagctgttctttcggaagtgctggaattattgcaacagattggttaataacatgatcatttgaccatttcaggaggctataatctacattcataaaatccatcagagaatagtgtttaatatcctctttgctttcgctcataattcttattttatcgttagttacattaggatcataaaccgaaaccacgtaatgggtacatccttcagttgtgttctttattcttagccggaccgtcaaagcatggttatccaccagtaatatggctgccataacactgatgccatttgattccatcttgtcaaaatatgctttcataactagcccgaaatcaccgcaggcagcaacgcaacgcccctcaggacggctggaaaccaacgccaaagtctggtttttgcattttttgttgaagtgcgtgagaaatttttcagctgaagagtaatcatcttgatggggtttgtaatcaacattctgataaatatcattaatatattgtgcagcaatgtgtcggcatactatacggttttggggtcgccccggaaaataacattgaccattaagtttaattcttgggaattctttttcttttctatctgattttaggtttaattcttgtttatcaagggtgtctgagcgttgaggtaaaatttccattaggtattcttcaaatattggggcaatggtttgagtaagtgtcgtgttttcgtttttattaattatcgtaatttctttcttatcagcttgtaagacggacgtggaaaatttaatgacaaaatccttgttgctaaagatatgacgaccattttgtctacagttctctgagaagctttttaatagaggcgtcgccagctccttgccagaaaatttatcctcgagttctttataaaacaattcactcagggtttggtgttcatttgtctgggctgtattattaatatttgcagagaaagaactacgagggatacgagtaatcatttaaatatctcattgtttattgatgtcttgaattttaactatcagaacagtgaaaaaatttaatatgattacaagtaaagaaatatcataaatcgctcaatctcataatgcagccgtaaaagtttcggtggaatgagatcttgcgattttgttaatgattaagtggtttgatgtttaaaaataatgctgagttaataaaagtgtgtgaagtgtatgacattaagttattttggcgtcaatgcgattaacagacacccttattctattgccactcaggtatgatgggcagaatattgcctctgcccgccagaaaaagtcagcgcattccaccgtacgccagcgtcacttccttcgccgctttaatcaccatcgcgccaaactcggtcacgcggtcatcggtaatgcgtgaaatcggtccggaaattgaaattgcggcaaacggttcgcggtgctcatcgaaaatacacgctgcaaggcaacgtagccccagtgcatgttcctcatcgtcaaatgaataaccccgtttgcgcgtttgggcgagatcttcttttaaatgcacaggagacaccagcgttgcgtgggtataggcatgtaaccctttgcggtgcagcagcttcgtcacctgttcttcgctcagttgggctaaaaaggctttacccgcaccggaagcgtgcatcggcaatttaccgccgataggcgcggacattcgcatcagatgcgtacactgtacctggtcgataataatcgcttcgtgatcgctttgatcaagcaccgccatattgaccgtttcgccagactcttccattaaattgcgcaggatagggtgaacaatcgctaacaaattacggctctggagaaagctgctgccgaccataaaggcatgtgcgccgattgcccaatgtcccagttcgccgacctgacgcacgaaaccctgctgttgcatcgtggttagcaggcggtgggtcgtggaattgggtaacccggcttgttgcgccagctctgtgagtgccacactgccattggattcggcaatccactccagtaatttcaggccacgcgttaaagactgaacctgtccagtcgctggtgcggtggcaacggcgggttttctgccgcgtttcgcgggaatgggtgcgaccatgacagcctcctttttctgtatcgtggaaatcattttcatttttattgttagctaatgcaatagttgctgaactgatccgatgagttaatgttgaacaaatctcatgttgcgtggtggtcgcttttaccacagatgcgtttatgccagtatggtttgttgaatttttattaaatctgggttgagcgtgtcgggagcaagtgtgagcagcaaagtggaacaactgcgtgcgcagttaaatgaacgtattctggtgctggacggcggtatgggcaccatgatccagagctatcgactgaacgaagccgattttcgtggtgaacgctttgccgactggccatgcgatctcaaaggcaacaacgacctgctggtgctcagcaaaccggaagtgatcgccgctatccacaacgcctactttgaagcgggcgcggatatcatcgaaaccaacacctttaactccacgaccattgcgatggcggattaccagatggaatccctgtcggcggaaatcaactttgcggcggcgaaactggcgcgagcttgtgctgatgagtggaccgcgcgcacgccggagaaaccgcgctacgttgccggtgttctcggcccgaccaaccgcacggcgtctatttctccggacgtaaatgatccggcatttcgtaatatcacttttgacgggctggtggcggcttatcgagagtccaccaaagcgctggtggaaggtggtgcggatctgatcctgattgaaaccgttttcgacacccttaacgccaaagcggcggtttttgcggtgaaaacggagtttgaagcgctgggcgttgagctgccgattatgatctccggcaccatcaccgacgcctccgggcgcacgctctccgggcagaccaccgaagcattttacaactcattgcgccacgccgaagctctgacctttggcctgaactgtgcgctggggcccgatgaactgcgccagtacgtgcaggagctgtcacggattgcggaatgctacgtcaccgcgcacccgaacgccgggctacccaacgcctttggtgagtacgatctcgacgccgacacgatggcaaaacagatacgtgaatgggcgcaagcgggttttctcaatatcgtcggcggctgctgtggcaccacgccacaacatattgcagcgatgagtcgtgcagtagaaggattagcgccgcgcaaactgccggaaatccccgtagcctgccgtttgtccggcctggagccgctgaacattggcgaagatagcctgtttgtgaacgtgggtgaacgcaccaacgtcaccggttccgctaagttcaagcgcctgatcaaagaagagaaatacagcgaggcactggatgtggcccgccagcaggtggaaaacggtgcgcagattatcgatatcaacatggatgaagggatgctcgacgccgaagcggcgatggtgcgttttctcaatctgattgccggtgaaccggatatcgctcgcgtgccgattatgatcgactcctcaaaatgggatgtcattgaaaaaggtctgaagtgtatccagggcaaaggcattgttaactctatctcgatgaaagagggcgtcgacgcctttatccatcacgcgaagctcttgcgtcgttacggtgcggcagtggtggtaatggcctttgacgaacagggacaggccgatacccgcgcacggaaaatcgagatttgccgtcgggcgtacaaaatcctcaccgaagaggttggcttcccgccagaagatatcatcttcgacccgaacatcttcgcggtcgcaaccggcattgaagagcacaacaactacgcgcaggactttatcggcgcgtgtgaagatatcaaacgcgaactgccgcacgcgctgatttccggcggtgtatctaacgtttctttctcattccgtggcaacgatccggtgcgcgaagccattcacgcggtgttcctctactacgctattcgcaatggcatggatatggggatcgtcaacgccgggcaactggcgatttacgacgacctacccgctgaactgcgcgacgcggtggaagatgtgattcttaaccgtcgcgacgatggcactgagcgtttactggagcttgccgagaaatatcgcggcagcaaaaccgacgacaccgctaacgcccagcaggcggagtggcgctcgtgggaagtgaataaacgtctggaatactcgctggttaaaggcattaccgagtttatcgagcaggataccgaagaagcccgccagcaggctacgcgcccgattgaagtgattgaaggcccgctgatggacggtatgaacgtggtcggcgatctgtttggcgaagggaaaatgttcctgccacaggtggtcaaatcggcgcgcgtcatgaaacaggcagtggcgtatctcgaaccgtttattgaagccagcaaagagcagggtaaaaccaacggcaagatggtgatcgccaccgtgaaaggcgatgtccacgacatcggtaaaaatatcgttggcgtggtgctgcaatgtaacaactacgaaattgtcgatctcggcgttatggtgcctgcggaaaaaattctccgtaccgctaaagaagtgaatgctgatctgattggactttcggggcttatcacgccgtcgctggacgagatggttaacgtggcgaaagagatggagcgtcagggcttcaccatcccgctattgattggcggcgcgacgacctcaaaagcgcacacggcggtgaaaattgagcagaactacagcggcccgacggtgtatgtacagaacgcatcgcgcaccgttggtgtggtggcggcgctgctttccgatactcagcgtgatgattttgtcgctcgtacccgcaaggagtacgaaaccgtacgtattcagcacgggcgtaagaaaccgcgcacaccaccggtcacgctggaagcggcgcgcgataacgatttcgcttttgactggcaggcttacacgccgccggtggcgcaccgtctcggcgtgcaggaagttgaagccagcatcgaaactctgcgtaattacatcgactggacaccgttctttatgacctggtcgctggccgggaagtatccgcgcattctggaagatgaagtggtgggcgttgaggcgcagcggctgtttaaagacgccaacgacatgctggataaattaagcgccgagaaaacgctgaatccgcgtggcgtggtgggcctgttcccggcaaaccgtgtgggcgatgacattgaaatctaccgtgacgaaacgcgcacccatgtgatcaacgtcagccaccatctgcgtcaacagaccgaaaaaacgggattcgctaactactgtctcgctgacttcgttgcgccgaagctttctggtaaagcagattacatcggcgcatttgccgtgactggcgggctggaagaggacgcactggctgatgcctttgaagcgcagcacgatgattacaacaaaatcatggtgaaagcgcttgccgaccgtctggcggaagcctttgcggagtatctccatgagcgtgtgcgtaaagtctactggggctatgcgccgaacgagaacctcagcaacgaagaactgatccgcgaaaactaccagggcatccgtccggcaccgggctatccggcctgcccggaacatacggaaaaagccaccatctgggagctgctggaagtggaaaaacacactggcatgaaactcacagaatctttcgccatgtggcccggtgcatcggtttcgggttggtacttcagccacccggacagcaagtactacgctgtagcacaaattcagcgcgatcaggttgaagattatgcccgccgtaaaggtatgagcgttaccgaagttgagcgctggctggcaccgaatctggggtatgacgcggactgattcacaaatctgtcacttttccttacaacaaacagggcgctcaatgagtgccctgtctctttattaatatgaaacacttatactggaaacaggctggaataatcttagccggaaaaacgaatgtcaaaaggcacagtaaagatgccagtcagcgtgtttccggtcctttggtcattcaattgcttcaggcacatataacgataaggagaacctgaactcgtgttaacgctgcttcacctgctttctgccgtcgccctgctggtctgggggactcatattgttcgaaccggcgtaatgcgcgtcttcggcgcgcgtttgcgtactgtccttagccggagcgtcgaaaaaaagccgctcgccttttgcgcggggatcggcgttaccgcactggtgcagagcagtaatgccaccaccatgctggtgacctcgtttgtcgctcaggatctggtagccctcgcaccggctctggtcattgtgctgggtgcagatgtcgggacggcgctaatggcgcgtattctcaccttcgacttatcctggctgtcaccgttacttatttttatcggcgtgatttttttcctcggacgcaaacagtcacgcgccgggcaactgggccgcgtcggtattggtcttgggctgattttgctggcgctggagttgattgtgcaggccgtaacgccgatcacccaggcaaacggcgttcaggtgatctttgcctcgctgaccggcgatattctgctggatgcgctgattggcgcgatgttcgccattatcagctactccagccttgctgctgtactgctgactgcgactctgaccgccgcaggcattatctccttccccgtggcgctctgtctggtgattggtgctaacctcggttccggcctgctggcgatgctcaacaacagtgccgccaatgccgcagcccgccgtgtcgcgctgggtagtttgctgtttaagctggtgggtagcctgattatcctgccgtttgtccatttgctggcagagacaatggggaagttgtcattgccaaaagcggaactggtgatctatttccacgtcttctacaaccttgtacgttgcctggtcatgctgccatttgttgacccgatggcacggttttgcaaaacgattattcgcgatgaaccggaactggatacccagctacggcccaaacatctggatgtcagcgcgctggatacgcccacgcttgctctggcgaacgccgcgcgcgaaaccctgcgcattggcgacgccatggaacagatgatggaagggctaaataaagtgatgcacggcgagccacggcaggagaaagagctgcgtaagctggcagatgatatcaacgttctctacaccgccattaagctgtatctggcgcggatgccaaaagaagagttggcggaggaagagtcgcgccgctgggcggagatcatcgaaatgtcgctcaaccttgaacaggcctccgatatcgtcgagcgcatgggcagcgaaattgccgataaatcgctggcagcacggcgggcattttcgcttgatggcttgaaggaactggatgcgctctatgagcaattgctcagtaatttaaaactggcaatgtcggtgttcttctctggcgatgtcaccagcgctcgtcgtttgcgtcgcagcaaacatcgttttcgcattcttaatcgccgctattcccacgcccacgtcgatcgcctgcatcagcaaaacgtgcagagcattgaaaccagttcgctacatttaggcttactgggagatatgcagcgcctgaactcgctgttttgttcggtggcttacagtgtgctggaacagccggatgaagatgaaggacgggacgagtattaatattgtgaatcctgtaggcctgataagacgcgtcaagcgtcgcatcaggcactatgaacaagatgccggatcatgcatccggcaattcacttaaaaacggtgaccagcttctagcggcaccgcttcttcaccagccttaaacacataagtggtgttcgggccacccagcgtagcgtgacctttactcactgtgatccagttaccttccggtagaccaataatcgtcagttctggcgcgacgaccagcagttcgcgaatacgctgctcacgggtttcacctttatggccttccggcagcgcgttggtgaagtgcgggttgatttgcaacgggaacagatttagcgcatcgaaaccttgcggatcgacaatcggcatatcgttggtggtacgaatggttgggcaagcaaggttagcgcctgcgctccagccaatatacagagcgccacgtttaaccacgtcagtaattggtgccagcagcccgcgctcgcggcactgtttcagcaactggaaagtattcccgccgccgacaatcacgatctcagcattttcaatcgcggcaacgggatcgacaacgctatgaataccggtgacagaaacacccagcggagcgagaaccgcagccgttttcgctgtgtaatcatcccaggtctgcgttacgccagcgaaagggataaacaccgctgagcggcgaccctgcaactgttcagcaattagcggcagtgcatgttccagccaggctttacccggcagcgtcgagttactcaataaaagcagttccattacttctccggttagtaagaaatcacgggaggcatgctaccactgcgaatttaaccacttactgacatggctcacgatgtcgcacattgcttctggaaagtgatttgagcaggtaacgaattcaagccaatggaaataacaaatagttcgctcatgactattttttatcaacccaaaggtacggtatattccgttttttacaggagaatttatgctgcccgactcatcagtccgtttaaataaatacatcagcgaaagcggaatttgctcacgccgcgaagcggatcgctatatcgagcaaggcaatgtgttccttaatggcaagcgagccaccattggcgatcaggtgaaacccggcgacgttgtgaaagtaaacggtcagttgattgagcctcgggaagccgaagatttggtacttatcgccctgaacaagcccgtcggtattgtcagcaccaccgaagatggcgagcgcgataacattgtcgatttcgttaaccacagcaaacgcgtgttcccgattggccgcctggataaagactcccaggggctgattttcctcaccaatcacggcgatctggtgaataagatcctccgtgcgggtaacgatcatgagaaagagtatctggttacggtcgataaaccgattaccgatgaatttattcgtggtatggggcgggggtgccaatcctcgggacagtgactaaaaagtgtaaagtcaaaaaagaagcgccgtttgtcttccgcattaccctggtgcaggggctgaaccgtcagatccgtcgcatgtgcgagcactttggttacgaagtgaaaaagctggaacgtacgcgcattatgaacgtcagtttaagcggcattccgctgggtgagtggcgcgatttaactgatgatgagttaatcgacctctttaagctcatcgaaaattcctcttccgaggcaaaacctaaagtgaaggccaaaccgaaaacagcgggcatcaaacgtccagtcgttaagatggaaaaaacggcggaaaaaggcggtcgcccggcgtccaacggtaagcgttttacctctccggggcgtaaaaagaaggggcgctaatcagcgcctgccgcgcgtcgacgtatttgctgaccagctaaatgacgcttcaggatccggtttataagcctgctttttcttcaactggcgggcttttttcgcttcagcctcacgctcgaccattaatttatcgatgtactctttcttaatgctgttggtttcggagttggtcagtacgcgaccatgcgcaatccgcgcccgatccagcagtgttttaagttcacgctgctcgcgttcagtcatctctttttgggtaatacgggggagtgccatgatggtgccctcagtgagccagagagttcagtgtacgggaattcgtttgcgagctgaactgataatattcctttgttctcttcttaaatatttatctttcttgataattgacgataaatacagatacaaatttagcgaaaagttttccctctacaaacaaaaataatttattaaatctttatttttcatttggttaataatttttctcaattctggcacgcttctcgcaatatctcgtacgcgttgaaactgaattacaaagggggtcaaaccccgtcggcacaccaggaacggccaggctgttttccgggcgtgttccgtcagcctttgacgccaattatgggttcgattcccacattcattcctgaaatgaatactggttgtaacttattaaataaaaagtgagggattgcgcagtcagcgatccccgataacgtcgccgataaagacgccgggtaacaggcaaaagggaattcccctgtcgcttcgtgtctgcttccgcgacggctgttaagcaaggaatagataatgattaagaaaataagcgtaagaaaagatcagctggcattactctccagaaatggcgattactacaaagtgctgcatgcaggcgagcatcttttaccctggttaaatacgccagaagtcttgctgattacgctcgatggcagcgaagttcccgacgtgctggcggattatttgcgccgctttcagcctgattgggtggagaaatattgcctggtggcagacttgtcggagattgaagccggggcgttgtatatggacggtattttgctggagattctgccgccatcaacgcgccgtttgtactggcgtgtagaagatgatttgacactggtgcggatgaatacgcagcaagtccaggtacaaacggaggtgatgaatgcggtattgcaaccacggcgcaaaggggcagttaaaggccgcgatgcgatactcacggtgcaggttccggcctggcatgtaggcgtgctgaaaatcgatggtgaaacgcaggcgctgttaccgccggggctgacagcatactggaaaataaatcatctggttgaggctgaagttgtcgacacccgcttgcaggtactggaagtcagcgggcaagaaatcttaacgaaagataaggtcaatctgcggattaatctcgccgctaactggcgctacagcgacgtgttgctggcatttagtcagttaacgaagccgattgatcatttgtatcgggaattgcaatttgccctgcgtgaagcggtaggtactcgtacgctggatgaactgctggaagataaacaggtcattgatgacgttgtcagcgaacaggtgaaatcgcgcatgttgccatttggtatggagattgcttcattaggggtgaaagatatcgtcctgcctggcgatatgaaaaatatccttgcgcagctggttgaggcggagaaatctgcgcaggcgaatgtgattcgccgacgtgaagaaacggcagcgacgcgctcgttactgaacaccgccaaagtcatggagaacaatccggtagcgttgcgtttaaaagagctagaaacgctggagagagtggctgagcggatcgataacatctctgtatttggcggtctggatcaggttctgcatgggttggttaatatcaaagggtgagtaacatgccattaaatggagtcagtgctgcgatgcgcgaacgggtatcgcagcagttaaaagaaatagaacggcgctacggcgtgaaagtgctgtatgcctgtgaatccgggagccgcggctgggggtttgcctcgcccgacagcgactacgatgtacggtttttgtatgttcacccgctggaatggtatctgcgggtggagccgccgcgcgatgttatcgagctgcccatcgacgacgagttagatgtttccggttgggagtggcgtaaggcgctgggattattgaaaggcgcgaacccgacgctgatagaatggctggattctccggttgtctatcaacaagatgaagaaacgataacggcgcttaaggcaatggtcccaatgtggttttctccgctgcgtgcgcgctggcattactattcgatggcgcagaaaaacttccgcggatatttgcagggcgatgaagttcgactgaaaaaatacttttacgtgctgcgtccgctgctggccgtgcgctgggtcgaagcgggaaaaggcgtgccgccaatgcgctttgctgagttactggcgggaagcgaacttgatgcgccgttacgtgcagaaatagacgaattactggaacgtaaacagcgcgcaggagaagcggaatatggtccgcgccgtccattgttacatgcgtttatttgtgcggaacaggcgcgtggggaaattccaccgctgttaccggatagcagagaaggggacgttaaggaactggatagcttaatgtaccagacggtaatgcgccgggcataaagcccggcgttatttcacgccatcagctcttattattattgtgtattcccgctgatttcattctgtataagtgttgcaatatcgtcattcgttgccgcttgtgaactaaatatcatcttctcacgcgaatacaccgcaaacttatctgacaggttcgaagcaaacaccttgcgggcattttctgccagcaaaccggtgacgatatcatggtggtttttatccacttttcgggcaatatttcccgcctctttgtccttactataccgttcattggtgctttcccagcttaatgccgctgaggttgtttttatcatgacttctgtttggtagcctgcatctttgagtttttttaatgtttgtaacggcgtcgcggcattacgaaatgttccttcgacaacaatgttgagtttactgactatcgctctctcaattgcacgttcgaccgtttcgccggaaaatttcgctgtatgggtaacaaaatcatccccataattttggtagatataattaaaatcagggtgtagaaatcgaaaatcatcaccgttaataatcattatattatcttttgtctctcttttggctaattcaatcagagatgatttacctgctccgggttgcccacctaaaacaaaaccaatgggatgctgttgcggtgtgacttcatgatttgtcagacgctgccaaatagaatcaaaagatgctttattttctgaatgcgtagtattgttgaattcatgctgatattgagttcttacctgctgaaggagaatcttaccttgtgtaaaatcaacaagttcagcgggggtagaataaagataatcgcgatagctgactaatcgcttgagagcatcgcctgaatcctgatgcgacgaaactgagcaattatcaatgatatttgataaaaacgcgatgcactgactggctccgtttaaaagtgcatctttttccattaaagtagccattaacactcctgttaaatgatatttttcggtgattataatactgttctacaggagtgattttgcttttcagatattatttaatctatgttttcagtgaggatggcgtataacaatcggtgagcgttatacgccagtagggaaatattactcaaacaaattaaaatgcagcttctgcaccacctgctcggcatcttcgccgggcaccaggaagcacaggttatggctggatgcgccgtaacaaatcatgcgaatgttgaacggttccagtacgccgaatacctctttgccaacgccgcaggcttttgacaggtcattgccaatcaacgcgaccagcgccagaccttcttctacttccacccggcacagtgcggaaagctccatcagcagagattgcgtcagcaacgtatcgccagtggaggttgaaccggtggtatcaagggttaatgccacgctcacttctgacgtggtgattaagtctaccgaaatattatgccgcgcgaggatgccgaaaacttccgcgaggaagccgcgagaatgcagcatattcaggctgtgcaaagtgagcagagtctgattgcgacgaagcgccagcgcgcggaacagcggcggattttcagttttattgcacaccagcgtaccacctgcgcgtgggtctttgctggagccgacaaagaccgggatatcgctgcgtactgcgggtagcaacgttgccggatgcagtacttttgcaccaaaagttgccatctctgccgcttcggcaaacgcgatttcatcaatgcgttttgctgcggaaactacgcgtggatcggtggtgtagatgcccgggacgtcggtccagatatcaacacgagatgcgtgtaaagcctccgccagcaaggctgccgtataatcgctgcctccacggccaagcgtcgttgtacgacctttattttcgctaccgataaatccctgggtgatcactaagccgtcattgaggcgtgggagcagctgcagcgcggccagttccgccagcgcggctacatctggctctgcacgaccaaatcggtcgttggtacgcatcactttacgtacatcaaaccactgtgcctgaacatcgcgttcgcgcaggatttcgacaaacagcagggtcgacatcagctcgccgtggctgaccagctcatctgtcagcgccggagacgttgccagcgccgccgcttctgccagaacagtaatgttctccagcagacgttcaatctcttcacggataacgttcgggtaacgcagacgttccagaatggcaaactggatgttgcgaatagcgtcgagtttttcgaatcgctcgccaggttccagcccttccgctaaagcgaccagcagattagtgataccagcagaagccgagaggactactaaacgcacgttggcatcagaaagcacaatatcagcgctgcggttcatggcgtcaaaatcagctacgctggtaccgccaaatttggagacaacaatttcagacataactacctcgtgtcaggggatccattttcagccttggcacaagggaagagcggaagacgggtgggcgcagagcgatacttcgctactattttcacccagaagtgctccaccacttgcgaaacgcccgactgcgaacgcttctggtgacaacccaggggattcagcccctgtagccgatgatgaacgtggccagccgttcaatcacctcggcgatgcaccccctcaggtgttatcacaggactggctcctccaacaccgttacttgggcaacgcgcctcttctggcctgcgctagcgcaggtagtacatttataaataaagggtgagcggggcggttgtcaacgacggggtcatgcggatttttcatccactcctggcggtcagtagttcagctaataaatgcttcactgcgctaagggtttacactcaacattacgctaacggcactaaaaccatcacatttttctgtgactggcgctacaatcttccaaagtcacaattctcaaaatcagaagagtattgctaatgaaaaacatcaatccaacgcagaccgctgcctggcaggcactacagaaacacttcgatgaaatgaaagacgttacgatcgccgatctttttgctaaagacggcgatcgtttttctaagttctccgcaaccttcgacgatcagatgctggtggattactccaaaaaccgcatcactgaagagacgctggcgaaattacaggatctggcgaaagagtgcgatctggcgggcgcgattaagtcgatgttctctggcgagaagatcaaccgcactgaaaaccgcgccgtgctgcacgtagcgctgcgtaaccgtagcaataccccgattctggttgatggcaaagacgtaatgccggaagtcaacgcggtgctggagaagatgaaaaccttctcggaagcgattatctccggtgagtggaagggttataccggcaaagcaatcactgacgtagtgaacatcgggatcggtggttctgacctcggcccgtacatggtgaccgaagcactgcgtccgtacaaaaatcacctgaacatgcactttgtttctaacgtcgatgggactcacatcgctgaagtgctgaaaaaagtaaacccggaaaccacgctgttcctggtagcatctaaaaccttcaccactcaggaaactatgaccaacgcccatagcgcgcgtgactggttcctgaaagcggcaggtgatgaaaaacacgttgcaaaacactttgcggcgctttccaccaatgccaaagccgttggcgagtttggtattgatactgccaacatgttcgagttctgggactgggtcggcggccgttactctttgtggtcagcgattggcctgtcgattgttctctccatcggctttgataacttcgttgaactgctttctggcgcacacgcaatggacaagcatttctccaccacgcctgccgagaaaaacctgcctgtcctgctggcgctgattggcatctggtacaacaatttctttggtgcggaaactgaagcgattctgccgtatgaccagtatatgcaccgtttcgcggcgtacttccagcagggcaatatggagtccaacggtaagtatgttgaccgtaacggtaacgttgtggattaccagactggcccgattatctggggtgaaccaggcactaacggtcagcacgcgttctaccagctgatccaccagggaaccaaaatggtaccgtgcgatttcatcgccccggctatcacccataacccgctctctgatcaccaccagaaactgctgtctaacttcttcgcccagaccgaagcgctggcgtttggtaaatcccgcgaagtggttgagcaggaatatcgcgatcagggtaaagatccggcaacgcttgactacgtggtgccgttcaaagtgttcgaaggtaaccgcccgaccaactccatcctgctgcgcgaaatcactccgttcagcctgggggcgttgattgcgctgtatgagcacaaaatctttactcagggcgtgatcctgaacatcttcaccttcgaccagtggggcgtggagctgggtaaacaactggcaaaccgtattctgccagagctgaaagatgataaagaaatcagcagccacgatagctcgaccaatggtctgattaaccgctataaagcgtggcgcggttaatttaaaaaccttaataacaatgccgacgttatgtcggcattgttttatcagataaatccccttgtctgtgatttaacggaaatcataccgtgaggttaatcctaaaatagatttttaatcgtgattgatttcggaaaatactcagattaattacttttacttttattttaacattatgatttttaatgttatttatatataagttgtagcttatatttgatattcattccaattatcctaaaaccccatctctaattccccgcgccgtaattcgcatgctttagttgtgtatactcgatcccgcccgaaatgtttttgggtaaatctccattcattcaatgaagggaaattgttatgaaaaaagttctgtatggcatttttgccatatctgcgcttgcggcgacttctgcgtgggctgcacctgtacaggtgggcgaagcggcagggtcggcagcaacgtcggtttcggcggggagttcctccgcgaccagcgtcagcaccgtaagctcggcggtgggtgtcgcgctcgcggcaaccggtggcggtgatggttctaataccgggaccaccacaaccacgaccaccagtacccagtaataaagtatgtatccccaaaataatttgagtcattgcatctgtggcttgaagtatgaagggatttaccataaccacactccggtgtggttattctgcccctctggagaagagtcgtgaagcgacctgcactcattcttatctgcctgctattacaggcctgttcagtcacgactaaagagctgggcaattcactgtgggacagtctgttcggcacgccaggcgtacagctgacggacgatgatattcaaaatatgccctacgccagccagtacatgcagcttaatggcgggccgcaattgtttgtggtgctggccttcgctgaagacggacaacaaaaatgggtcactcaggatcaagccactcttgtcacacaacatggtcgtctggtgaagactttgcttggcggcgacaacctgattgaagtgaataaccttgccgccgacccgctgattaaacccgcacaaattgttgatggtgcaacatggacgcgcacgatgggctggaccgagtaccagcaggtacgctacgccaccgcacgctcagtcttcaaatgggatggcaccgataccgtcaaggtcggcagcgatgaaaccccggttcgcgtgctggacgaagaagtctccaccgaccaggcgcgctggcataaccgctactggatcgacagcgaagggcaaattcgccagtcggaacagtatctcggcgcggattatttcccggtgaaaaccactctcatcaaggcggcaaaacaatgattaaacaaactattgtcgcattgattttgagtgtgggggcgtcatcggtcttcgcggcgggaaccgtcaaggtattcagcaatggcagcagtgaggccaaaacgctgacgggcgcagagtatttaatcgatctggtaggccagccgcggctggcaaacagttggtggcctggtgcggtgattagcgaagagctggcaacggcggcagcattgcggcagcagcaggcgttgctgacacggctggcagaactggctgcagattccagcgccgacgatgccgccgcgattaacgccttacgccagcaaattcaggcgttgaaagtgacgggcaggcaaaaaatcaatcttgatcctgatatcgtccgcgttgccgaacgcggtaacccaccgttgcagggcaactacacgctgtgggtcgggccaccaccgtccacggtcacgctgttcgggcttatcagccgtcctggcaagcagccattcactccaggtcgcgacgtggcgagctatctctccgggcagaacctgcttagcggtgcggatcgcagctacgcgtgggtggtttacccggacggacgcacgcaaaaagcgccggtggcttactggaacaagcgtcacgtagagccgatgcccggcagcattatttatgttggcctcgcggactccgtctggagtgagacgcctgatgcccttaacgccgacattcttcagactctgacgcagcggataccccaataatgaaaaaaagacatctgcttagcttactggcgctgggcattagcacagcttgctacggcgaaacatatcctgcgcccattggtccgtcgcagtcggatttcggtggcgtaggattattacaaactcccaccgcgcgtatggcacgggaaggggagttgagtctgaactatcgcgataatgatcagtaccgttattactcagcttcagtgcaactcttcccgtggctggaaacaacgctgcgctacaccgacgtgcgcacccggcagtacagcagcgtcgaagcgttctctggcgatcaaacgtataaagataaagccttcgatctcaaactgcgtttgtgggaagagagttactggctgccgcaagtggcggttggtgcgcgggatatcggcggtacggggctgtttgatgcggaatatcttgttgccagcaaagcctgggggccgttcgattttacgctcggcctgggctggggatatctgggcaccagcggtaatgtaaaaaatccgctctgttcagccagtgataaatattgctatcgcgataacagctacaaacaggcgggatctatcgacggtagccagatgttccacggtcctgcctcactgtttggcggcgtggaataccagacgccctggcaaccgctgcgcctgaaactggagtatgaaggcaataattatcagcaggattttgccgggaagctggagcaaaaaagtaagtttaacgtcggtgcgatttatcgcgttaccgattgggccgacgttaaccttagctatgaacgtggcaacacctttatgtttggcgtcacgctgcgcaccaactttaacgatctgcgcccgtcttacaacgataacgcccgcccgcaatatcaaccgcagccgcaggatgccattttgcagcattcggtggtggcgaatcagttaacgctgttgaaatacaatgccggacttgccgatccgcagatccaggcgaaaggcgatacgctgtatgtcaccggcgagcaggtgaaatatcgtgattcgcgcgaagggatcatccgtgctaatcggatcgtgatgaacgatctgccggatgggatcaaaacgatccgcattacggaaaatcgtcttaacatgccgcaggtgacgacggaaaccgatgtcgccagcctgaaaaatcatctcgccggagagccgttgggccacgaaacgaagctggcgcaaaaacgcgtcgagccagtggttccgcagtccaccgagcagggctggtatatcgacaaatcacgctttgatttccacatcgatccggtgctgaaccagtcggtcggtggcccggaaaacttttacatgtatcagctgggcgtgatgggaacggcagatttgtggctgacggaccatctgctgaccaccggcagcctgtttgcaaatcttgccaacaactacgacaagtttaactacaccaatccgccgcaggactcgcacttaccgcgcgttcgtacccatgtgcgcgagtatgtgcagaacgatgtctatgtgaataacctgcaagccaactacttccagcatctgggcaacggcttctacggtcaggtctatggaggttatctcgaaaccatgtttggcggtgcgggggccgaagtgttgtatcgtccgctggacagtaactgggcgtttggtctggatgccaactacgttaaacagcgcgactggcgtagtgcaaaagatatgatgaaattcaccgactacagcgtgaaaaccggacatctgaccgcctactggacgccatctttcgcccaggacgtgttggtgaaagccagcgtcgggcagtatctggcaggggataaaggcggcacgctggagatcgccaaacgctttgatagcggcgtggtggttggcggctatgccacgatcactaatgtttcaaaagaagagtacggcgaaggggacttcaccaaaggcgtgtatgtctcggtaccgttggatctcttctcgtctggcccgacacgcagccgtgcggcgattggctggacgccgctgacgcgtgacggtggtcagcaacttgggcgtaagttccagttgtatgacatgaccagcgaccgtagcgtcaatttccgctaagtcatgggaaaggtgccagttttcgcaatcactggcaccctcattcttaatggcctgttgagccatcaggaacgcagttcacccccggtttgcgatctggtgtgtaaaggcgaaaacattctgtcttcctgtccgtcgatatcggttgcagatctggttgcctgagcgactgggccatcattgggctggagacattgctttgcggtaggtcggctttatcagcagtaccgagcggaccagcataagcaggaagaacagagactgataacatcaaagcagcaaaataaggcttcatttttaccacctttatcaggttacgtttcatttgttccagaggaacatggtcgatttttcgcgcattgctggtggctgggaatcacctgaatgggtgatttttgaattaccggctttggtgcggtttgtcttgccggatgcgccgccaggcgcggcttatccggcctacgggtaggtatatccggctttggtggaggcgcgctccaaatccaggttgaacaaaacatacacaaaaaatatagatctccgtcacatttttgcgttatacaggaagctcgccactgtgaaggaggtactgctatgacgtcactctctcgtccgcgcgtggagtttatctccaccattttgcagaccgtactcaatcttggcctgttgtgcctcggcctgattttggttgtcttcctcggcaaagaaacggtgcatctggcagatgtgctgttcgcgccagaacaaaccagcaaatatgagctggtagaaggactggtggtttactttctctatttcgaatttatcgcgctgattgtgaaatactttcagtccggttttcacttcccgctacgttactttgtctatattgggatcaccgccattgtgcgcttgatcatcgtcgatcataaatcgccactggatgtgttgatctactcggctgcgatcctgttactggtgatcactctgtggctgtgtaattcgaaacggctgaagcgggagtaaaaagacagcacgccgaactggcgcggcgtgctggacaggaagattacagcgtagcagtttgttgtgttttcttcgtttccggttcccagagggcttccagctcctcaagggttttacctttggtttccgggacaaatttccacataaatagtgctgccagaacgcccatacacccgtaaatccagtaggagaaaccgttgtggaaatgggccaccagccaggagtttttgtccatcatcgggaaggtccaggagacgaagtagttcgccagccactgggccgccaccgcgattgccagcgctttaccacgaatagcattcgggaagatttccgacagcagtacccagcataccggaccccaggacatggcaaaggcggcaacatagaacagcatcgacagtagcgccacaatacccgatgcctgagtgtaaaacgcggtaccgaggctaaacataccgattgccattccgagtgcgccgataatttgcagtggcttacgaccaaatttatccaccgtcataattgccagtacggtaaaggtgaggttgataactccgacaataatggtctgcaacagcgcgatatccgtgctggcccccagcgttttgaacacttccggcgcgtagtacagcaccacattgatgccgacaaattgctggaagatggagagcataacgccgattacaatcacgcccacgccaaacatcagcagacgaccaccggttttgcggccatgatccagggagtgtttaatttcctgtactgcctgagttgcaagcgtgttgcccataattttgcgcaggatactttccgcctgttcttgcttgccgcgtgacatcagccagcgaggactttctggcacggtatacagcagcattaagaacagcagtgcagggatacattccgaggcaaacatataacgccagccgtcagtattcagccagctggcatcaccggaacgggcaataaaatagtttacgcagtaaactaaaagttgcccgaaaataatcgcaaactggttaaatgaaaccagttttccgcgaatatgagctggagccagttccgcaatatacattggtgaaagcattgaggctaaaccaacgccaataccgccaataatacgataaataacaaattccgggacataacctgccagataaatagggactgtgttgtccgggtttatagaggtgaaaccaagttctggccaggcagaacctacaccagaaataaaaaacaggacagcagcaatcttaagtgaatcacgacggccgaagcggttactgcaataaccaccgagggcaccgccgatgatgcaaccaatcagagcgctggctacgcaaaatcctaacagggagttggcagcggattcacttaagttttgtggagcaacaaagacggtattgagtgactcaacagtaccggaaataacggcggtgtcgtagccaaataataaaccacctaatgtagcgactaaggtaatcgaaaatatataactggaattatactgggtattcattcagacctgccttagaccattctgatcttttatcagtgcattgatgttggaattgtcaggcagttaaggcaattatcattttttacaatgcgtttacgtaatgtcttttctgtgatcttaattgtgataattatcaaaaattgatgaaaacaatactattgccgtgactcagagcacgaaagagaattatcgtaagtgggaaaacaaataacgtaaaaataataagctctatgatgggaatattaaccggcgaacgattcagattgcagacgaaagaaaaaaaggcgctccgtggagcgccgaataacagtcacaagttgggataacgtaagttgagggtgcagcggcataacattggcagaacaacatctttaacctttcacaccacctgccgtcaggccgttgaccagccagcgttgagccagcaagaagacgatggtgatcggtaatgcagacataacggcagcggcggcaaagtcaccccacaggtagttttgcgggttgaggtattgctgcatccccacggccagggtgtagctgtttacgtcacgcagtaacagcgacgcgaccggaacttcagtaatggcagcgataaacgacaggatgaataccaccgccagaatcggtactgacagcggcaacaggacaaggcggaaggcctgccacggtgtcgcaccatccagcgcagccgcttcttccagcgaactgtcgatggtttcgaaatagcctttgatggtccagacatgcagcgcaatcccacccagatacgcgaaaattacgccgccgtgagtattcaggccaatgaatggaatgtactcacccagacgatcaaacaacgcatacaacgcgaccagtgaaagtactgccgggaacatctggaaaatcagcattcctttcagcagcgtcgctttgcctggaaagcgcatacgggcgaaagcgtaggcgcaggtggtggagagcgccacaatgccaatcgcggaaatcccagcgacctttaccgagttccacagccacagcagtaccgggaatggcggtggcgtaatgcgaccatcagcctgttcaacgctaaaacctaacgccagtttccagtgatcccaggagatttgctccgggatcaggctaccggtcgcgaagtttccctgacgcagcgagatagcgacgaccatcagcagcgggaacataatcgccgcgataaaaagtagcagtagcaggtgagtaataaacaaacgtgctttttgcgatttcggttggaccattgccatttttgttatctcccttaatcaaacttcattcgcgtggctttcaggttcactatcgccagcgcacccaccagcaggaagatcagcgtggcaattgctgccgccagaccgaagtcctgacccccgccgccttcaaaagcgatgcggtaagtgtagttaacaagcaggtcggtataaccggctggcgtggtcgtgccaagacgatccgggccgccgttggttaacagctgaatcagcacgaagttgttaaagttaaaggcgaagctggcgatcatcagcggcgtcagcggtttaatcagcagcggcagcgtaatcttaaagaagttctggaacggacctgcgccatccattgctgaggcttcatacaaatcgtccggaatcgctttcagcaagcccatgcagaggatcatcatgtacggataacccagccaggtattgacgataattagcatcgtgcgggcggtggtcggatcgctgaaccaggcgggcttcacgccaaacagcgcgctcaacatcatgttgatttcaccgaagctctggttaaacaaccctttgaaaatcaagattgaaatgaatgatggcaccgcgtagggcagaatcagcagaacgcgatagaccgctttgccgcgcaatgcttcccactgcaccagacatgccagaaccatgccgaccgccaccgttaaaaagacagtgatcagcgagaacaccacggtccagacgaaaatggcgaggaacggtttctgaatgccttcgtcggtgaagacgcgggtaaagtttttccagccagtagtcacggtgtaaccggggcttagcttttcatcaccccagttgccgtcggcggtaatggactggtaaaagccaatttggttattcggacgatatttcacgccgctctgattattcgtcaacgtgccgtcaccgtcgagtgtgtagagcggctgcgtgccagaaaactggcgcagggagctcatcatcactttgttgccatccggcagaatggcggtaatgtcactcagcgcctgacgattctgggtaatcacgcgtagattcgcgcgttcgccttggggctgggcggtcgtttctttcagttgcagtttttgttcgccgccaaatttaaacgcgtcggagaggtaatttttgccggtttcgccgtcactgagcgccagttgccactcatcgcccgccgggtaaagaccaaagttataggttttgcctgcttgccaggagcgatctaacaacacttcctgcgcacgttcaaaagtcagctggttagtgctgctgtagttggtgaaggcaatggcgatggtgcagaccagagggaagaggacgaataatcccattccagccattcccgggtaaacatagcgccaggcgtaggctttacgattggcgaaaatatacagccccgctgaactcaatatcagcgtggtaatggcgaacaggtattccccttgtgcgtacattaaaacaacaaggtaacccaccagcaggccgagcagacctagcactgaccatttcagcgcgtcgctttgccaccaatgtttctttttaatgacatccatggggttcttcctcattccaggacggataaggctttcacgccttatccgacaacaactgcctgatgcgacactgatgcgtcttatcaggcctacatgcgtttcagttttgtaggccggacaaggcgttcacgccgcatccggcatttcacagcattacttggtgatacgagtctgcgcgtctttcagggcttcatcgacagtctgacgaccgctggcggcgttgatcaccgcagtacgcacggcataccagaaagcggacatctgcgggatgttcggcatgatttcacctttctgggcgttttccatggtggcggcaatacgtggatctttcgccaactcttcctcgtaagacttcagcgccactgcacccagcggtttgtctttattgaccgcttccagaccttcgtcagtcagcagatagttttcgaggaactctttcgccagctctttgttcggactggcggcgttaataccggcgctcagcacgccaacgaacggtttagatggttgacccttgaaggtcggcagtaccgttacaccataattcactttgctggtgtcgatgttggaccatgcccacgggccgttgatggtcatcgctgtttcgcctttattaaaggcagcttctgcgatggagtaatcggtgtctgcattcatgtgtttgtttttaataaggtcaaccaggaaggtcagacccgctttcgcgccagcgttatccacgcccacgtctttaatatcgtacttgccgttttcatacttgaacgcataacccccgtcagcagcaatcagcggccaggtgaagtacggttcttgcaggttgaacatcagcgcgctcttacctttcgctttcagttctttatccagcgccgggatctcttcccaggtttttggtgggttcggcagcagatctttgttataaatcagcgataacgcttcaacagcgatcgggtaagcaatcagcttgccgttgtaacgtacggcatcccaggtaaacggatacagcttgtcctggaacgctttgtccggggtgatttcagccaacaggccagattgagcgtagccaccaaaacggtcgtgcgcccagaagataatgtcagggccatcgccagttgccgcaacctgagggaatttctcttccagtttatccggatgctcaacggtgactttaattccggtatctttctcgaatttcttaccgacttcagcgagaccgttatagcctttatcgccgttaatccagattaccagtttaccttcttcgattttggcgagagccgaggcggaaaacatcatcgtcgttaatgcggataatgcgaggatgcgtgcacctgtttttattttcataatctatggtccttgttggtgaagtgctcgtgaaaacacctaaacggactctagtttctttatacggcaacctctttccatcctccttgcccctacgccccaccgttgctttgtgtgatctctgttacagaattggcggtaatgtggagatgcgcacataaaatcgccacgatttttgcaagcaacatcacgaaattccttacatgacctcggtttagttcacagaagccgtgttctcatcctcccgcctcctcccccataaaaaagccagggggtggaggatttaagccatctcctgatgacgcatagtcagcccatcatgaatgttgctgtcgatgacaggttgttacaaagggagaagggcatggcgagcgtacagctgcaaaatgtaacgaaagcctggggcgaggtcgtggtatcgaaagatatcaatctcgatatccatgaaggtgaattcgtggtgtttgtcggaccgtctggctgcggtaaatcgactttactgcgcatgattgccgggcttgagacgatcaccagcggcgacctgttcatcggtgagaaacggatgaatgacactccgccagcagaacgcggcgttggtatggtgtttcagtcttacgcgctctatccccacctgtcagtagcagaaaacatgtcatttggcctgaaactggcaggcgcaaaaaaagaggtgattaaccaacgcgttaaccaggtggcggaagtgctacaactggcgcatttgctggatcgcaaaccgaaagcgctctctggtggtcagcgtcagcgtgtggcgattggccgtacgctggtggccgagccaagcgtatttttgctcgatgaaccgctctccaacctcgatgctgcactgcgtgtgcaaatgcgtatcgaaatctcccgtctgcataaacgcctgggccgcacaatgatttacgtcacccacgatcaggtcgaagcgatgacgctggccgacaaaatcgtggtgctggacgccggtcgcgtggcgcaggttgggaaaccgctggagctgtaccactatccggcagaccgttttgtcgccggatttatcggttcgccaaagatgaacttcctgccggtaaaagtgaccgccactgcaatcgatcaagtgcaggtggagctgccgatgccaaatcgtcagcaagtctggctgccggttgaaagccgtgatgtccaggttggagccaatatgtcgctgggtattcgcccggaacatctactgccgagtgatatcgctgacgtcatccttgagggtgaagttcaggtcgtcgagcagctcggcaacgaaacccaaatccatatccagatcccttccattcgtcaaaacctggtgtaccgccagaacgacgtggtgttggtagaagaaggtgccacattcgctatcggcctgccgccagagcgttgccatctgttccgtgaggatggcactgcatgtcgtcgactgcataaggagccgggcgtttaagcaccccacaaaacacacaaaacctgtcacaggtgatgtgaaaaaagaaaagcaatgactcaggagatagaatgatgattactctgcgcaaacttcctctggcggttgccgtcgcagcgggcgtaatgtctgctcaggcaatggctgttgatttccacggctatgcacgttccggtattggctggacaggtagcggcggtgaacaacagtgtttccagactaccggtgctcaaagtaaataccgtcttggcaacgaatgtgaaacttatgctgaattaaaattgggtcaggaagtgtggaaagagggcgataagagcttctatttcgacactaacgtggcctattccgtcgcgcaacagaatgactgggaagctaccgatccggccttccgtgaagcaaacgtgcagggtaaaaacctgatcgaatggctgccaggttccaccatctggcaggtaagcgcttctaccaacgtcatgacgttcatatgatcgacttctactactgggatatttctggtcctggtgccggtctggaaaacatcgatgttggcttcggtaaactctctctggcagcaacccgctcctctgaagctggtggttcttcctcttttgccagcaacaatatttatgactataccaacgaaaccgcgaacgacgttttcgatgtgcgtttagcgcagatggaaatcaacccgggcggcacattagaactgggtgtcgactacggtcgtgccaacctgcgtgataactatcgtctggttgatggcgcatcgaaagacggctggttattcactgctgaacatactcagagtgtcctgaagggctttaacaagtttgttgttcagtacgctactgactcgatgacctcgcagggtaaaggtctgtcgcagggttctggcgtcgcgtttgataacgaaaaatttgcctacaatatcaacaacaacggtcacatgctgcgtatcctcgaccacggtgcgatctccatgggcgacaactgggacatgatgtacgtgggtatgtaccaggatatcaactgggataacgacaacggcaccaagtggtggaccgttggtattcgcccgatgtacaagtggacgccaatcatgagcaccgtgatggaaatcggctacgacaacgtcgaatcccagcgcaccggcgacaagaacaatcagtacaaaattaccctcgcacaacaatggcaggctggcgacagcatctggtcacgcccggctattcgtgtcttcgcaacctacgccaagtgggatgagaaatggggttatgactacaacggcgatagcaaggttaacccgaactacggcaaagccgttactgctgatttcaacggcggcagcttcggtcgtggcgacagcgacgagtggaccttcggtgcccagatggaaatctggtggtaatagcaaaacctgggccggataaggcgtttacgccgcatccggcataaaaacaggttgtcattatctgaaaggggcgaaagcccctctgattatcgggtttagcgcgctattgcctggctaccgctgagctccagattttgaggtgaaaacaatgaaaatgaataaaagtctcatcgccctctgtttatcagcagggttactggcaagcgcgcctggaatcagccttgccgatgttaactacgtaccgcaaaacaccagcgacgcgccagccattccatctgccgcgctgcaacaactcacctggacaccggtcgatcaatctaaaacccagaccacccaactggcgaccggcggccaacaactgaacgttcccggcatcagtggtccggttgctgcgtacagcgtcccggcaaacattggcgaactgaccctgacgctgaccagcgaagtgaacaaacaaaccagcgtttttgcgccgaacgtgctgattcttgatcagaacatgaccccatcagccttcttccccagcagttatttcacctaccaggaaccaggcgtgatgagtgcagatcggctggaaggcgttatgcgcctgacaccggcgttggggcagcaaaaactttatgttctggtctttaccacggaaaaagatctccagcagacgacccaactgctcgacccggctaaagcctatgccaagggcgtcggtaactcgatcccggatatccccgatccggttgctcgtcataccaccgatggcttactgaaactgaaagtgaaaacgaactccagctccagcgtgttggtaggacctttatttggttcttccgctccagctccggttacggtaggtaacacggcggcaccagctgtggctgcacccgctccggcaccggtgaagaaaagcgagccgatgctcaacgacacggaaagttattttaataccgcgatcaaaaacgctgtcgcgaaaggtgatgttgataaggcgttaaaactgcttgatgaagctgaacgcctgggatcgacatctgcccgttccacctttatcagcagtgtaaaaggcaaggggtaattacgccccacagtgctgattttgcaacaactggtgcgtctcctggcgcacctttttttatgcttccttcctgggatatgagcgattttttatagtaactcacttcttcttcactaagaatatccattatctcaatgccttatcagagattcttttcctttcgccggtagtgtctggacattcaggctacttttccaggttattttatttctgttatgcagaggttttatgataagtcatatcctaaattctggcggcaataactctttgatgaaacatgatgtggtgcaaggaaataatatagtagatcttgatttactacgtaatttcaatggggtgccaggtttaaacagagataactttatttatatcagcaatattttttcaaatataaaacaacggaacgaaaaaatcatgcaataaatatgtttcgtgaagtctcaatcagtaatgatactataagtgtaaaattctacagaaatgaaaaaaattgaatgcgcttgcaattttctgatggataaagatgcgcaggggtatatcgacctgtctgatttggatttaacaagttgtcattttaaaggtgacgttatatcgaaggtgtcttttttatcatcaaatctacaacatgtaacattcgaatgtaaagaaattggggattgcaattttactactgcaatagttgataatgtcatatttagatgtcgacgtttacacaatgtgatttttatcaaagcgagtggtgaatgtgtcgatttcagcaaaaatattcttgatacagttgacttctcgcagagtcaacttactcagagtaattttcgcgaatatcagattagaaattcaaacttcgataattgttatctttacgcttcgcacttcaccagagcagagtttctgtctgccaaagaaatatcatttattaaatcgaatatgacagctgttatgtttgatcatgtgcgaatatcgacagggaattttaaagattgcattacagaacaattggaattaactattgattattcagatatatttgggaatgaagatctcgatggttatatcaataacattataaaaatgattgatacattgccagataatgcaatgatattgaaatccgttctggcagtaaaactggttatgcaattaaaaattcttaatattgttaataaaaactttattgagaatatgaagaaaacatttagccattgtccttatataaaagatccaattatacgcagttatatccattctggtgaagataacaagttcgatgattttatgcgtcaacatcgattcagcaaggtggatttcgatacccaacagatgatccattttattaacaggtttaatatgaataaagggctgattgataaaaataacaatttttttatccaacttatcgatcaggccttacgatcaacggatgatatgatcaaagcaaatgcctggtatctttataaagagtggattcgtagtgatgatgtttcacctatatttatagaaactgaagaaaagttaagaacctttaacactaataaattaacacgaaacgataatatatttatcctgttctcctctgtcgatgatgggcctgttatggtggtaagctcccagcgcttacatgatatgttgaatcctacaaaagataccaattggaattccacgtatatctacaaatccagacatgagatgttgcctgttaatcttactcaggaaacacttttcagctccaaatctcatggtaaatatgcgcttttccccatttttactgcgagttggcgagctcatcgtataatgaataagggtgtttaagtaaaggaaaacatcaccgttcctggcatcctgggcggtgatgcccctatggttgccctctccagcgcgggcatcggcaaagcgtaaggttcaacagcgttttaccacttcatgcgattgttgcgtttttgttgcgtattagatcacttaatttgctttacatctcccgtaaacacttttctgcgatacaatgcctttacgttatgtaacggagagttcggcatgtcacaccccgcgttaacgcaactgcgtgcgctgcgctattttaaagagatccctgccctggaaccgcaactgctcgactggctgttgctggaggattccatgacaaaacgttttgaacagcagggaaaaacggtaagcgtgacgatgatccgcgaagggtttgtcgagcagaatgaaatccccgaagaactgccgctgctgccgaaagagtctcgttactggttacgtgaaattttgttatgtgccgatggtgaaccgtggcttgccggtcgtaccgtcgttcctgtgtcaacgttaagcgggccggagctggcgttacaaaaattgggtaaaacgccgttaggacgctatctgttcacatcatcgacattaacccgggactttattgagataggccgtgatgccggactgtgggggcgacgttcccgcctgcgattaagcggtaaaccgctgttgctaacagaactgtttttaccggcgtcaccgttgtactaagaggaaaaaaatatggagtggagtctgacgcagaataagctgctggcgtttcatcgcttaatgcgtacggataagccaattggcgcgttactgctgctctggccaacattatgggcgttgtgggtggcgacaccgggcgttcctcagctctggatcctggcggtatttgtcgcgggtgtctggctgatgcgcgctgctggatgtgtggtgaatgattatgctgaccgaaagtttgatggtcatgttaagcgcacggcgaaccgaccacttcccagcggcgcggtaacagagaaagaggcgcgcgcgctgtttgtagtgctggtactgatttcgtttttactggtactgacgctgaatacgatgaccattctgttgtcgattgccgctctggcgttggcgtgggtgtacccgtttatgaagcggtatacccatctcccgcaagtggtgctgggcgcggcgtttggctggtcgattccaatggcttttgccgctgtgagtgagtcggtgccactgagttgctggttaatgttcctcgccaatattctctgggcggtggcttacgacacgcagtatgcgatggttgaccgcgatgatgatgtgaagattggcattaaatccacggcaatcctgttcggccaatacgataaattgattattggtattttgcagattggcgtactggcactgatggcgatcatcggtgagttaaatggcttaggctggggatattactggtcaattgtggtggctggcgcgctgtttgtttatcaacaaaaactgattgccaaccgcgagcgtgaagcctgctttaaagcatttatgaataataactatgttggtctggtactgtttttaggactggcaatgagttactggcatttctgatgatgtaaaaaagccggatgatcatccggctttcttctgggttgccttatgcgcggcgcttctcaggcctacacaacacatcgcaatttattgaatttgcagattatggaaggccggataaggcgttttcgccgcatccggcaattctctctgattacccttcgccctgcgtcgcactctcaatcgtcaaacgcacgtctgatgtaatcaactccgccagcaactgataaaccttcatcgtttctgccggttcggcgtcgccgctatcgctgatatacccttcatcacgcagcgtcagcaccagagaactgaacaccgccttgtcgaagaactccggcgcgttgatgccgtgcagcacggagagacgttgcgcgacggtgcggctctctttctccagcgtaccgcggttgatcgacgggttggcactcaacaaccagaaggtgatggcataacgttgcagcgtttcgcgcgcgcctgcggccagcagctgtagggtgcgagaatgcgccgggttgatatgcaactcatcatcttgcagggtaatcagcccctgacgttgcatctcatttgccagcgcatcaataacgtccggcaactcgtcgcgatcccagcgcaggaacagctccgctttcagcattgggtaaagcacattgacgtgctccatcaatacgtcgcgggagatgtggcgatgctgggtgacaattgccgccatcagcgaaggcagcaccaacatatgcgcaatgttgttgcgatagtaggtcatcagcaccgcttgctcgcgtggcagaatgatgatgtcgccgatagtgtctttctcgacttcaaacttgttcatttgcagcgcgtgatcgataagctcgctggcgctggctgaaggaacggtagagtccgtggagtaaggtacgttgcgcatcagatccaggtagcagttgagttgctcggttaactgctcgcgggtgagtgagcgctgacgtgatgccagtagcgcagtacagcacaggttcatggcgtttgccgcgcctgcgttgttaatgcgtaccatcagatcggcagcaatattattgaccgtcggcgttaaccaggccggacgcaccgcttcgatgggatcgatagattcacgccagtctggtacgtgctggttaaggtaggtcatcaacggcattggttcaccgaagttgacgtaaccctgaccgagattacgcagcttgcttaaaccgcgcagcatctgcggcaggctctctttctctttcgtcgcgccgcgcagttctttggcgtaagtacccacttccatgacgtgctcataaccgatatagatcggaatcagcgtaatcggacgcgtgccgccacgcagcatcgcctgaatggtcatcgacagcgtgccggttttcggatccagcaaacgccccgtgcgggaacgaccgccttccacgaagtactcgacggaataaccacggctgaacagttcgccgagatactcacggaaaacggtggaataaagtttattgcctttaaaagtacggcgaataaagaacgcccccagacggcggaaaatcggcccggccggccagaagttcaggttgatcccggcggcgatatgcggcggcaccagcccctggtggtacagcacgtaagaaagtagcaggtagtccatgtgactgcggtggcaaggcacatacaccagctcatgaccgtcgtgggccagctggcgaacgcgctcggcgttatggacgttgatgccctgataaagtcggttccaggtgaagcccagaatgcggtcagtcaggcggatcatctcgtaagagaaattcgccgcaatctcttccatcagcgcaatcgcgttctgctgcgctttttcatgggagatttttttgctgcgcgcttcatcttctaccgctttggcaatggcgcgggaggcgagcagcttattaaacagatcctgacgagcaggcagacgtgggcccacagcagccagacgttgacgggcaaagtgcatacgcgccacgcgcgccagtttctgtgcgatagttttatccgtgccgtgttcatccgccatacggcgcagcgaaactgacggcgagaaacgcacaaaactgtcgcgaccgagccacagtacggcgaaaaatttctgtacgccgttaagcatacgcagcggcgggtttacttcgcctttttcacgccccggcgcgcgaccaaacatcaccgatactggcaccatctgcacatccagatttgggttgctacggtgcaaatcgagatagtcgtggaacagcttaatagactcttctttcggcgtgtaataggtgaatacacgcggcccgccgtgaatgaacacatagcgcggcagtagcgtgccgtcgatttccagcggctctaacgggtcaggcaagtcatgagccagacactgggcgcgtaacgtcagcaaatctgctttcgagttgtacggtaaaacgtacataattggacgagaagtatccagccccagttccggggcaggatctgccggaatagacttgctttttaccaggatgcttaatggtaaattcagtaatttgtagtaaattcgtggccagccggacataaacgatgtaaagcctctggttaataatgcaaatgcgcggcaaggatagcagaaagtcatgggaaattctgtggtatccgctcatgtttcgcgcggcgttacgcaaacccgaatcatcggatttaacggtacactgatattgacgctcataatgtaaaaaggttctttcaatggccaataataccactggattcacccgaattatcaaagctgctggctattcctggaaaggtttacgcgctgcatggatcaacgaagcggcattccgtcaggaaggcgtagcggtattgttggcggtggtcatcgcctgctggctggatgtggacgcaattacccgcgtgctgcttatcagctccgtgatgctggtgatgattgtggaaatcctcaatagcgccatcgaagcagtggttgaccgaattggctctgaataccatgagctttccggacgcgcaaaagatatgggatccgccgcggtgctgattgccattatcgtcgccgtgattacctggtgcattctgttatggtcgcattttggataacccttccagatttcgataaatctctggtttattgtgcagtttatggttccaaaatcgccttttgctgtatatactcacagcataactgtatatacacccagggggcggaatgaaagcgttaacggccaggcaacaagaggtgtttgatctcatccgtgatcacatcagccagacaggtatgccgccgacgcgtgcggaaatcgcgcagcgtttggggttccgttccccaaacgcggctgaagaacatctgaaggcgctggcacgcaaaggcgttattgaaattgtttccggcgcatcacgcgggattcgtctgttgcaggaagaggaagaagggttgccgctggtaggtcgtgtggctgccggtgaaccgcttctggcgcaacagcatattgaaggtcattatcaggtcgatccttccttgttcaagccgaatgctgatttcctgctgcgcgtcagcgggatgtcgatgaaagatatcggcattatggatggcgacttgctggcagtgcataaaactcaggatgtacgtaacggtcaggtcgttgtcgcacgtattgatgacgaagttaccgttaagcgcctgaaaaaacagggcaataaagtcgaactgttgccagaaaatagcgagtttaaaccaattgtcgttgaccttcgtcagcagagcttcaccattgaagggctggcggttggggttattcgcaacggcgactggctgtaacatatctctgagaccgcgatgccgccaggcgtcgcggtttgtttttcatctctcttcatcaggcttgtctgcatggcattcctcacttcatctgataaagcactctggcatctcgccttacccatgattttctccaatatcaccgttccgttgctgggactggtcgatacggcggtaattggtcatcttgatagcccggtttatttgggcggcgtggcggttggtgcaacggcgaccagctttctctttatgctgttgctgtttttacgcatgagcaccaccgggctgactgcgcaggcttatggtgccaaaaatcctcaggcattagcccgtgcgctggtgcaaccgttgctgttggcgttgggggctggggcgttaattgcgctgctgcgtacaccgattatcgatctggcgctgcatattgttggcggtagtgaagcggtcctggaacaggcgcggcgctttcttgaaatccgctggttaagcgctccggcgtcgctggcgaatctggtattactcggttggttactcggcgtgcaatatgcccgtgcgccagtaattttgttagtggtcggcaatatcctcaacattgtgctggatgtctggctggtgatggggctgcatatgaacgtgcagggcgcggcgctggcgacggttattgcggaatatgcaacattgctgattggtctgctaatggtgcgtaaaatcctcaaactacgcggaatttccggcgaaatgctgaaaactgcctggcgaggaaacttccgtcgcttgctggcgcttaaccgcgatatcatgctgcgttcgctgttgttgcaactctgtttcggcgtgatcaccgtacttggtgcgcgactggggagtgacattatcgctgttaacgcggttctgatgacgctactcaccttcaccgcctatgcgctggatggttttgcctacgcggttgaagcacattccggtcaggcatacggtgcgcgcgacggtagccagttgctggatgtctggcgggcagcgtgccgccagtcggggatcgtagcgctactgttttcggtggtttatttgctggcaggggaacacatcattgcgttactgacgtcgttaacccagattcaggagctggccgaccgctatcttatctggcaggtgattttgccgttggttggagtctggtgttatctgctggacggcatgtttataggcgcaacgcgtgccgccgaaatgcgtaacagtatggcggtggccgccgcaggttttgcgctgacgctccttacgctgccgtggctgggtaatcatggtttgtggctggcattaaccgtctttctggcgttgcgcgggctttctctggcggctatctggcgggcgtcactggcgcaacggtacctggtttgccgcaacgtgacggttaaaaattctgaataaataatcctaagccaaattgctgactacacttaatctcacgttcagaagaaaagtgaacgtactctcattcacaacctaacgatgaggtcttgattatgaataaagatgaagccggcggtaactggaaacagtttaaaggtaaagtgaaagagcaatggggcaaactgaccgatgatgatatgacgatcattgaaggtaaacgtgatcaactggtcggtaaaatccaggaacgttatggttatcagaaagatcaggcagaaaaagaggtcgtggattgggaaacccgcaatgaatatcgctggtaattaatccctcctgcccgacgtgtacaaggatgtacgccctcttaacgcggtttctttttcacctgcacagagtgatcatgctggcactgttcaggatgacgacacgcttccacttccacgcatgccgcacagagcccatgtgcttcaatcacattatgccgcagggcaaaccccatttttgccgccagcgtatgcataatgtcttccacgccttctgcacactcttctttcaccgcgccgcagcgatcgcaaataaacatggctgacgtatgggtgggctggtcgaacagatgacagagcacataactgttggtggattccaccttatgcacaaaaccttgctcaagcagaaaatccagcgcgcgataaaccgttggcggcttggcttgcggttcagcttcgcgcagtaaatcaagcagatcataagcgctgatagcgccatcctgcagactcatcaggcgcaacacttccaggcgctgtggggtcaggcgcacattacgctgcgcgcagattttttcagcctgcgctaataactcctgcgttgtggtcttttccatcgggcacctcaaagtgggggttaagaatgtccttactttaccatgttccaggaaaaacaccgagaacccttattgttgccgtaatgttgattttctgttttgtaggtaaggtgttgtgttgccttgtcgtaccattatcaacacgataataattaataattcatttttaaataaattgcttcaagttaactcgctatttatttaactgggtttaaacgcatacctgtagttcagaaattatgagcgatttttgatagtgaccagatggcaaaagaattataaggaggacacggtacgacaaaaaaggtagatgaatcatgttgaagataatacccggtgcaactggatactttaataaaacactcaattcaaatcaattcgataatgaagatgcaatcaaagataaattagataatagaggttcaatcaaaggtaaattaaataatatatatggtaaatctattgattatgcagcgctgcgtcatcgggatataattattgcaaaaatagatttgtttattcaacgaatcacgcataatttatggcatgcacgtaaaaaaatgtgtttttaattgagcaaataaatgatctcaaaatgtgggtcaataagtatattgacgattgcactgatgaggatttaaacgatcgtgactttattgcatcagttgttgaccgggctatttttcatttcgcgattaatagtatatgtaatcctggggctaataaagatgcgactcccattgaacgatgtacttttgatgtagaaactaagaatgaccttccctccacggttcagctattttatgaggaatctaaggataatgaacctttagcgaatatacattttcaagcaataggttctggttttttaacgtttgttaatgcctgccaggaacatgatgacaacagcttaaaattatttgcttcgctgttaatttcactttcatattctagtgcctacacagatttagccggagcagaaaaagtgaatattaatgaatataatgagaactatctgacagctcagtttgaagaattatctcaacgtgatatgaagaagtacctgggagagatgaagcatctggcggaccgggggggatgaaatttgatgactatctggataaaatgtcacttctggtgaatgaaggaaagctcgaacctgatattttaagcaaaatgcgagatgctgcaccgaaattaattgactttgctaagtcgtttgacccaaactcaaaggaaaagattaaaatacttacagatacttctaatttaatttatgatttattcggggttaaatcggcgaaataatatgtgaagttcttcgatggtatggaaggcattacataaaagaacctaatacttattgggttcttttttcttctatcagtgccattagcaggaagagatatcaccggagtttaatgtgtgattttttatttatcgtcgaacctggattgtttatcattgtccttaacaaggctaacggctaataagattatttccatcacttcgtgagagcttcatgccttgatttgatctcaattttcttttgcaatgagacaggcgcttcctgttgttatggtatagtaccccgctattgagcctcctgaacagtgatgctgaataacataacccaatgatatatcgataaaataatctctacatttgaaaatgcacggtaattctgaaatgcaaaaaatcaaccaaaccagcgcaatgcctgaaaaaactgacgttcactggagtggtcggtttagcgttgcaccaatgctcgactggacggacagacattgccgctatttcttgcgtctgctttcccgcaatacgttgctgtataccgaaatggtgaccacaggggcgattattcacggtaaaggtgattacctggcgtacagtgaagaagaacatccggtagcgttgcaactcggcggtagcgatccggcggcgctggcacagtgtgcgaagctggcagaagcgcgtggatatgatgagatcaacctgaatgtcggctgcccgtctgaccgggtgcagaacggcatgtttggtgcgtgtctgatgggtaatgcgcagctggttgccgactgcgtgaaagcgatgcgcgatgtggtgtcgattccagtgacggtgaaaacgcgtattggcatcgatgaccaggacagctatgaatttctctgcgatttcatcaacaccgtttccggcaaaggcgagtgtgagatgtttatcatccacgcacgtaaagcctggctttcggggttaagtccgaaagaaaaccgtgaaatcccgccgctcgattatccgcgtgtgtatcaactgaagcgtgactttccgcatctgacaatgtcgattaacggtggtatcaagtcgctggaagaggccaaagcacacctgcaacatatggatggcgtgatggtcgggcgcgaggcgtatcagaatccgggtattctggcggcggtagaccgggagatctttggttcctcggataccgatgccgatccggtggcggtagtgcgcgccatgtatccgtacattgagcgtgaactcagccaggggacgtatctcggccatattacccggcatatgttgggcttgttccagggtattcctggcgcgcggcagtggcggcgttatttaagtgaaaatgcccataaagcgggtgcagacattaatgtgctggaacacgcgctcaaactggtggcggataagcgttaacttttcaccaaaaagtagtcaaattcaccacgccctgcgcaccgtcgcggggcgttttgctgttaaatcaatagattatttttggcatgattcttgtaatgccagcaagagatttcatatttgggagagcatcatgctggaactactttttgtgattggcttttttgtcatgctgatggtcaccggcgtttcgttgctgggcattatcgccgcgctggttgtggcgacggccattatgttcctcggcggtatgctggcattgatgattaagttgctgccgtggttactactggcgattgcggtggtgtgggttattaaggcgattaaagcaccaaaaatgccgaaatatcagcgttatgaccgctggcgttactaagggattgtgcggatgatcacaacctaaggttttatccttagaacaaaataggaattgataatcaaatctgtcactattgcgcctctaacagattcatcgtgctgtaccctacatacagccgaactataaaaagaaagggcttcccaggtggaagccctatttcttttatggaatcagcaggctggaaccttgcgtcgcccggctttccagaatctcatgcgcacgctgcgcatccttcagcggatatttctgctgctcggcgacatcgaccttaatcacaccgctggcaatcaaagagaacagttcattactggcctcggttaattcctcccgcgtggtgatatagccttgcagggaagggcgtgtcacatacaacgagcctttttgattgagaatgcctaagttcacaccggtaaccgcacctgatgagttgccaaaactgaccattaagccgcggcgttgcaggcaatccagcgaccgttcccaggtgtctctgcccacggaatcgtacactacgcgcactttcttaccgccggtgatctctttcaatcgctcgaccagattctcttcacgatagttaataacctgccacgcgccggcttttagcgcgctctgcgctttttgcgcggttcctacggtgccgataagtttcgtgcccagggcttttgcccactggcaggcaattaagccaacgccgccagccgctgcgtggaacaggaactgttcatcgggtttaatttcataggttttgcgcagcagataataaaccgttaagcctttcaggaaagatgctgcagcttgctcaaaagaaattgccgcaggcagaatcgccgctttatccgcattaatgttatgcacagagctgtaagcgcctaacgccgactgcgcatagacaacacgatcgcctgccttaatatgctttacaccactgccgactttactcacgatgcctgccgcttcggtacctaatccgctgggtagtgatggcggcgggtaaaggccgctgcggatatacgtgtcgataaaattgatgccgatggctttattttcgacctggatttcattctctgccggatcggcaggagtgaactctacggcttgaagtacttccgggccaccgtgcttgtgaaattcaattcgtgttgccatgtgtcctccagaacgtatcgtcagggtctgcttcatatggtaaagtttcgacccattctttatctcggtaactccattcactatggcaggaaataaacccttcaacaaacagcaggctgaaccccgcgaacgcgatccacaagttgccgggctgaaagtgcctccgcactcgatcgaagcggagcagtcggtgttgggcggtttaatgctggataacgaacgctgggacgatgtagccgagcgtgtggtggcagacgatttttacacccgcccacaccgccatatctttactgaaatggcgcgtttgcaggaaagcggtagtcctatcgatctgattacccttgcggaatcgctggaacgccaggggcaactcgatagcgtcggtggttttgcttatctggcagagctgtcaaaaaatacgccaagtgcggcgaacatcagtgcttatgctgacatcgtgcgtgaacgtgccgttgtccgtgagatgatctcggttgcgaatgagattgctgaagccggttttgatccgcaggggcgtaccagcgaagatctgctggaccttgctgaatcccgcgtctttaaaattgccgaaagtcgtgcaaacaaagacgaagggccgaagaacatcgccgatgtgctcgacgcaaccgtggcgcgtattgagcagttgtttcagcagccacacgatggcgttaccggagtaaacaccggttatgacgatctcaacaaaaaaaccgctggcttgcagccgtcggatttgatcatcgtcgccgcgcgtccgtcgatgggtaaaacaacatttgcgatgaacctcgtcgaaaacgcggcgatgttgcaggataaaccggtacttatcttctcgctggagatgccttcagaacagattatgatgcgttctctggcgtcgctgtcgcgcgttgaccagactaaaatccgtaccgggcagctcgatgatgaagactgggcgcgcatttccggcaccatgggtattttgctcgaaaaacgcaatatctatatcgatgactcctccggcctgacgccaacggaagtgcgttcccgcgcacgccgtattgcccgtgaacacggcggcatcgggcttatcatgatcgactacctgcaactgatgcgcgtaccggcgctttccgataaccgtacgctggaaattgcagaaatctcccgctcgctgaaagcactggcgaaagaactgaacgtgccggtggtggcgctgtcccagttgaaccgttctctggaacaacgtgccgacaaacgcccggtcaactccgacctgcgtgaatctggctctatcgagcaggatgcggacttgatcatgtttatctatcgtgatgaggtgtatcacgaaaacagtgatttaaaaggcatcgcggaaattattatcggtaaacaacgtaacggcccaatcgggacggtacgcctgacctttaacggtcaatggtcgcgcttcgacaactatgcggggccgcagtacgacgacgaataataattattttatgaattaggtaattaaagcaaacacttatcaaggaacacaaatgcaagcggcaactgttgtgattaaccgccgcgctctgcgacacaacctgcaacgtcttcgtgaactggcccctgccagtaaaatggttgcggtggtgaaagcgaacgcttatggtcacggtcttcttgagaccgcgcgaacgctccccgatgctgacgcctttggcgtagcccgtctcgaagaagctctgcgactgcgtgcggggggaatcaccaaacctgtactgttactcgaaggcttttttgatgccagagatctgccgacgatttctgcgcaacattttcataccgccgtgcataacgaagaacagctggctgcgctggaagaggctagcctggacgagccggttaccgtctggatgaaactcgataccggtatgcaccgtctgggcgtaaggccggaacaggctgaggcgttttatcatcgcctgacccagtgcaaaaacgttcgtcagccggtgaatatcgtcagccattttgcgcgcgcggatgaaccaaaatgtggcgcaaccgagaaacaactcgctatctttaataccttttgcgaaggcaaacctggtcaacgttccattgccgcatcgggtggcattctgctgtggccacagtcgcattttgactgggtgcgcccgggcatcattctttatggcgtctcgccgctggaagatcgctccaccggtgccgattttggctgtcagccagtgatgtcactaacctccagcctgattgccgtgcgtgagcataaagccggagaacctgttggttatggtggaacctgggtaagcgaacgtgatacccgtcttggcgtagtcgcgatgggctatggcgatggttatccgcgcgccgcgccgtccggtacgccagtgctggtgaacggtcgcgaagtaccgattgtcgggcgcgtggcgatggatatgatctgcgtagacttaggtccacaagcgcaggacaaagccggggatccggtcattttatggggcgaaggtttgcccgtagaacgtatcgctgaaatgacgaaagtaagcgcttacgaacttattacgcgcctgacttcaagggtcgcgatgaaatacgtggattaatcgttctgtaatatttgattgtctgtgccggatgcggcgtgaatgccttatccggccaataaaatcctaaaaattcaataagttgatgttctttcatgctcttataaaggtcgtgcctctggcggatgtacgtttgtcatgagtctcactctgttgctaattgccgttcgctcctgaacatccactcgatcttcgccttcttccggtttattgtgttttaaccacctgcccgtaaacctggagaaccatcgcgtgtttcaaaaagttgacgcctacgctggcgacccgattcttacgcttatggagcgttttaaagaagaccctcgcagcgacaaagtgaatttaagtatcggtctgtactacaacgaagacggaattattccacaactgcaagccgtggcggaggcggaagcgcgcctgaatgcgcagcctcatggcgcttcgctttatttaccgatggaagggcttaacagctatcgccatgccattgcgccgctgctgtttggtgcggaccatccagtactgcaacaacagcgcgtagcaaccattcaaacccttggcggctcaggggcattgaaagtgggcgcggatttcctgaaacgctacttcccggaatcaggcgtctgggtcagcgatcctacctgggaaaaccacgtagcaatattcgccggggctggattcgaagtgagtacttacccctggtatgacgaagcgactaacggcgtgcgctttaatgacctgttggcgacgctgaaaacattacctgcccgcagtattgtgttgctgcatccatgttgccacaacccaacgggtgccgatctcactaatgatcagtgggatgcggtgattgaaattctcaaatcccgcgagcttattccattcctcgatattgcctatcaaggatttggtgccggtatggaagaggatgcctacgctattcgcgccattgccagcgctggattacccgctctggtgagcaattcgttctcgaaaattttctccctttacggcgagcgcgtcggcggactttctgttctgtgtgaagatgccgaagccgctggccgcgtactggggcaattgaaagcaacagttcgccgcaactactccagcccgccgaattttggtgcgcaggtggtggctgcagtgctgaatgacgaggcattgaaagccagctggctggcggaagtagaagagatgcgtactcgcattctggcaatgcgtcaggaactggtgaaggtattaagcacagagatgccagaacgcaatttcgattatctgcttaatcagcgcggcatgttcagttataccggtttaagtgccgctcaggttgaccgactacgtgaagaatttggtgtctatctcatcgccagcggtcgcatgtgtgtcgccgggttaaatacggcaaatgtacaacgtgtggcaaaggcgtttgctgcggtgatgtaatgcaggaaagcaggctggagctacccagcctgcagtgaaattaaactgtcgtcgctttcactctttctttatagatgatttttttgatgccatcgttctacgtgagagataataaacgttattagttcttttattgttaagcttatcctaattatctggaattccttatcctgtttttttgggtggagtaataatttctgcacatctaactattattaaatttaataataagtatcgggtttgttacgatagaatttttctatatcctcaagaatatgctttgccttattgcctgtgactttctgagattcaattatagtatcgttaaattctaaagttaaagagagctctttttttccgctttgtgtaagtttaaccttatattgattaccaatatcaaataaaaaggtcctgtaatgagaataatcacctttaacctcctcggcaaaacagcaaagcgtgcaaatatacataaagtctttcttacctctgattttgttaactaaatcaataaatgcgtgaaaaactttacttgcaatagaacttgatacttcttctccaggtctacaaaaatcttttgcaatttttaactgtgtttctatgtataaaaagaaatctttagcataagaaaaatctttggcataagagatatctttattatttagtgcatctagctcaacaggtaaagatgtcgttttgttgctattcacatatgatatattcatatcatcatctccatcgggagtaataaaattagtcaccattgtaggatagggttctggtcaatcaggaatcatctttataaacttcgattgtttttgtaatgctgtatcattaagttcattaaatcgtacagcagataaatgttctatcaaatttcgctcatttgcagaggattcatcataataaacgtaaaattaatgtatccttacatcgagtaataaacattttttatacaaaaaaagacaggaacgtatttactgggttaaacataatcatcctgcttttcatcacaaaaaccgcagataatccttcctttccccggcagctggcgttatggtcagatggtttttgcaacaaatctcacaataaaaagtttcaacatactgactatttagggaaaaatatgcgcaagatcacacaggcaatcagtgccgtttgcttattgttcgctctaaacagttccgctgttgccctggcctcatctccttcaccgcttaaccctgggactaacgttgccaggcttgctgaacaggcaccaattcattgggtttcggtcgcacaaattgaaaatagcctcgcagggcgtccgccaatggcggtggggtttgatatcgatgacacggtacttttttccagcccgggcttctggcgcggcaaaaaaaccttctcaccagaaagcgaagattatctgaaaaatcctgtgttctgggaaaaaatgaacaatggctgggatgaattcagcattccaaaagaggtcgctcgccagctgattgatatgcatgtacgccgcggtgacgcgatcttctttgtgactggtcgtagcccgacgaaaacagaaacggtttcaaaaacgctggcggataattttcatattcctgtcaccaacatgaatccggtgatctttgcgggcgataaaccagggcaaaatacaaaatcgcaatggctgcaggataaaaatatccgaattttttatggcgattccgataacgatattaccgctgcacgcgatgtcggcgctcgtggtatccgcattctgcgcgcctccaactctacctacaaacccttgccacaagcgggtgcgtttggtgaagaggtgatcgtcaattcagaatactgacagagcgggagagcgtgacactctcccgaatgctgtttttttaatcacacctttatcctttcgctgtcttgctgcaaactgattaagagagttttatcaaggagcagcacatgtggtatcaaaagacgctcacgcttagcgccaaatctcgtgggtttcatctggtaacggatgaaattctgaatcagctggctaatatgccgcgcgttaacatcggcttactgcatctgttgctgcaacatacctccgcctctctgacacttaatgagaactgcgatcccaccgtacgccacgacatggagcgttttttcctccgcaccgttcccgacaacggaaattatgagcatgactatgagggagcagacgatatgccttctcatatcaaatcctcaatgctgggaacatcgcttgtattgccgttacataaagggcgtattcagaccggcacctggcaaggcatctggctgggggaacatcgcatccacggcggatcgcgtcgcatcatcgcgacactacaaggggagtaaaaaatgaccatttcggagttgctacaatattgcatggcaaaaccaggcgcagaacagagcgtgcataacgactggaaagcgacgcagatcaaagtggaagatgtactgtttgcgatggtgaaagaagtagaaaatcgcccagctgtttcgctgaaaaccagcccggagctggcggagctgctacgtcagcagcacagcgatgtgcgtcctagccgccatctgaataaagcgcactggagcaccgtgtatctcgacggttcgctgccggattcgcaaatctattatctggtggatgcgtcttatcagcaggcagtgaatttactaccggaagaaaagcgtaaattgctggtacaactctgaaaggaaaaggccgctcagaaagcggccttaacgattacagcatcggcttgaggaagcgtgccgtatgcgaagcttcgcactccgcgacggtttctggcgtaccggagacgaggatttcgccgccgccactgccgccttctggtcccaggtcgacaatccagtcagcggttttgatcacgtcgagattgtgctcaatcaccacaatggtattgccctgatcgcgcagtttatgcagcacgtcgaggagttgctgaatatcggcgaagtgcagaccggtggtcggctcgtcgagaatatacagcgtctgcccggtgccgcgttttgacagctcacgcgccagcttcacgcgctgggcttcaccaccagaaagtgtggttgcggactgccccaggcgaatgtacgtcagaccaacgtccatcaacgtttgcagcttacgcgccagagctggcaccgcatcaaagaactcacgcgcctcttcgatggtcatatccagcacttcgtggatggttttgcctttgtacttaatttccagcgtttcacggttatagcgtttacctttgcactgatcgcacggcacgtagatatccggcaggaagtgcatctccactttgatcacaccgtcgccctgacaggcttcgcagcgcccgccacggacgttaaagctgaaacgtcctggcgtataaccacgcgcacgggattccggtacgcccgcaaacagttcgcgcacaggtgtaaacacgccggtataggtcgccgggttagaacgtggagtacgaccaattgggctttggtcgatatcgatcactttatcgaaatgctccagcccctgaatatcgcgatacggtgccggttcggcgatggtcgcaccattcaactggcgttgggcaatcgggaacagtgtgtcgttaatcagcgtcgatttaccggaacctgaaacccctgtgatgcaggtaaacagaccgactggcagcgtgagcgtcacgtccttcaggttgttgccgcgtgcacctgtcagcttcagcactttttctggattcgccggaacgcgtttcttcggcacttcaatcttgcgtttaccgctcatgtactgcccggtcaacgattcaggcactgccataatcgcttccagcggaccttctgcgaccacttcaccgccgtgaacacccgcaccaggaccgatatcgatcacatggtcagcggcgcgaattgcgtcttcgtcatgctccaccacaatcacggtattaccgagatcgcgcagatggataagcgtacccaacaggcgctcgttatcgcgctggtgcaggccgatagacggctcgtccagtacatacataacgccaaccaggcccgcaccaatctggctcgccagacggatacgctgggcttcaccgccggaaagtgtttctgccgagcgggaaagtgtcaggtaattcaggccgacgttaacgaggaatttcagacgatcgccgatctctttaaggattttttctgcaatcttcgcccgttgaccagcgagtttgagattgttgaagaattccatcgcatgaccgatgctcatgtcggagatagcaggcagcggcgtattctcgacataaacgtggcgcgcttcccgacgcagacgcgtcccttcgcagctggcgcatgggcgattgctgataaacttggctaattcttcacgtaccgcactggattctgtctctttataacggcgctccatattgtgcagcacgccttcgaacggatgacgacggatggaggtatcgccacgatcgttcatgtatttgaattcaatgttttctttgccagaaccgtacaacaccactttatgcacgttcgcgctcaggctgccccacggcgcttcgacgtcgaacttatagtgatctgccagcgatttcagcatctggaaataatagaagttgcggcgatcccagccacggatcgcaccgccagccagtgacagctcggggttttggatcacgcggtcaggatcgaaatattgctgtacgccaaggccgtcacaggtcgggcaggcacctgccgggttgttaaacgaaaacagtcgcggctccagttcacgcatactgtagccgcaaattgggcaggcgaagttggcggagaacagcagctcttccgctttcgggtcgtccatatccgccactaccgctgtaccaccggaaagctccagcgcggtttcaaacgactccgcaagacgttgggtaagatcgtcacgcaccttgaagcgatcaaccaccacttcaatagtgtgtttcttttgcagttccagtttcggcggatcggaaagatcgcagacttcgccatcaatacgagcacggatgtaaccctggcttgccaggttctccagcgttttggtgtgttcgcctttgcgctctttaatgattggcgcgagcagcatcagacgcttgccttccggctgcgacagcacgttatccaccatctggctgacggtttgcgccgccagcgggacgtcgtggtccggacagcgcggttcgccgacgcgggcgaacaacaaacgcaaatagtcgtggatttcggtgattgtccccaccgtagaacgcgggttatgagacgtcgatttctgctcaattgagatggcaggagaaagcccctcaatatgatcgacgtccggcttttccatcagtgacagaaactgccgcgcgtaggcggaaagggattcaacgtaacggcgctgcccttcggcatataaggtgtcgaaagcgagcgaggatttgccagaacccgaaagcccggtcacgacaatgagcttgtcgcgggggataacgaggttgatgtttttgagattatgggtgcgggcgccccgaacttcgatcttatccattcacctttcccggattaaacgcttttttgcccggtggcatggtgctaccggcgatcacaaacggttaattatgacacaaattgacctgaatgaatatacagtattggaatgcattacccggagtgttgtgtaacaatgtctggccaggtttgtttcccggaaccgaggtcacaacatagtaaaagcgctattggtaatggtacaatcgcgcgtttacacttattcagaacgatttttttcaggagacacgaacatggccagcagaggcgtaaacaaggttattctcgttggtaatctgggtcaggacccggaagtacgctacatgccaaatggtggcgcagttgccaacattacgctggctacttccgaatcctggcgtgataaagcgaccggcgagatgaaagaacagactgaatggcaccgcgttgtgctgttcggcaaactggcagaagtggcgagcgaatatctgcgtaaaggttctcaggtttatatcgaaggtcagctgcgtacccgtaaatggaccgatcaatccggtcaggatcgctacaccacagaagtcgtggtgaacgttggcggcaccatgcagatgctgggtggtcgtcagggtggtggcgctccggcaggtggcaatatcggtggtggtcagccgcagggcggttggggtcagccacagcagccgcagggtggcaatcagttcagcggcggcgcgcagtctcgcccgcagcagtccgctccggcagcgccgtctaacgagccgccgatggactttgatgatgacattccgttctgatttgtcattaaaacaataggttatattgttttaaggtggatgattaaagcatctgccagccataaaaaagaagcctccgttatggaggcttctacgtatcaggtcaaaatcattggccattgtggcggtgtctgattcatctcttctatcatcaccgactcgatgttgtgccagatagcggtgatgtccgccattgtgatgccaagcaaccccattgcgaaccaacaggcggaaacaacgcccagaccgctgctgatcaccgcaagcccgacataatcagaccgacgaaaacggatgttgagtgtgctggccagaaacatcattacggcactaagaagttgccagcgaagaagaaccacgccagtggtgagggtagccatcaaacaattcctctgaaaagagccgatgccctggacagcgcggcgttgttcacgggaggcgtggtacactctggctatcgcggggcttgcagaacacaaaaatgaaacactctgtttgtttcattaattttgtgaactatatcacaattgattgtttgttagccatattaggccgtgacttttattgctgtacagattatgtggtttttcagtggcattaagggcatatcttcccgccgcctctgcattcctgtaggaaattaattttgaatatcaatgaattattttcatccaggtgacgattagaaaggtatcaatttcaaatcaggcaaaagtgctatttataccgtaagatttatctaaagacgtcggtacccagggttttcaccttgcaatggccgggtataaacaggcaggaaattgatagcaatgagtcatcgtgcacgacaccaattactggcgttgccgggcattatctttttagttctctttcccatcattctttcgctatggattgccttcctttgggcaaaatcagaagtgaataatcagctccgaacctttgctcaactggcactggataaatccgagctggtcattcgccaggcagatttagtgagcgatgcagctgaacgctatcaggggcaagtttgcactccagcccatcaaaagcgaatgttgaatattattcgtggctatctttatattaatgaattgatctatgcccgtgataaccattttttatgctcatcgctgatagcgcctgtaaacggctatacgattgcaccggccgattataagcgtgaacctaacgtttctatctattattaccgcgatacgccttttttctctggctataaaatgacctatatgcagcggggaaattatgtggcggttatcaaccctctcttctggagtgaagtgatgtctgatgatccgacattgcaatggggtgtgtatgatacggtgacgaaaacctttttctcgttaagcaaagaggcctcggcagcaacgttttctccgctgattcatttgaaggatttaaccgtacaaagaaatggctatttatatgcgacagtttattcgacaaaacgcccaattgcagccattgttgcgacttcatatcaacgtcttataacccatttttataatcatcttatttttgcgttgcccgccggtattttggggagtcttgttctgctattactctggctacgtattcgacaaaactatttatctcccaaacgtaaattgcaacgcgccctcgaaaaacatcaactttgtctttattaccagccaataatcgatatcaaaacagaaaaatgtatcggcgctgaagcgttgttacgttggcttggtgagcaggggcaaataatgaatccggcagagtttattccgctggcagaaaaggaggggatgatagaacagataactgattatgttattgataatgtcttccgcgatctgggcgattacctggcaacacatgcagatcgctatgtttctattaacctgtcggcctccgattttcatacgtcacggttgatagcgcgaatcaatcagaaaacagagcaatacgcggtgcgtccgcagcaaattaaatttgaagtgactgagcatgcatttcttgatgtcgaaaaaatgacgccgattattctggctttccgccaggctggttacgaagtggcaattgatgattttggtattggctactctaacttgcataaccttaaatcattgaatgtcgatattttgaaaatcgacaaatcgtttgttgaaacgctgaccacccacaaaaccagtcatttgattgcggaacacatcatcgagctggcgcacagcctggggttaaaaacgatcgctgaaggcgtcgaaactgaggagcaggttaactggctgcgcaaacgcggcgtgcgctattgccagggatggttctttgcgaaggcgatgccgccgcaggtgtttatgcaatggatggagcaattacccgcgcgggagttaacgcgcgggcaataaaattacaggcggtggcgataatcgctgggagtgcgatcaaactgccgacggaaaacgcgggagaaggtctgctgcgagacataacccaggtccattgcgatatcaaaaatcggacgctcggtggtgcgcaactcaacggcggccagtaacaggcgacgttggcgaatgtaatcgccaagcgtctgatgcgtcaccgtgcggaacattcgttgcaagtaccactttgaatagcctgatttttttgcgactacatcaatgttaagcggctggtcaatatgctcgtcaatccatgcgataagatcctgaataattttctgatgggacataaatctgcctcttttcagtgttcagttcgttaattcatctgttggggagtataattcctcaagttaacttgaggtaaagcgatttatggaaaagaaattaccccgcattaaagcgctgctaacccccggcgaagtggcgaaacgcagcggtgtggcggtatcggcgctgcatttctatgaaagtaaagggttgattaccagtatccgtaacagcggcaatcagcggcgatataaacgtgatgtgttgcgatatgttgcaattatcaaaattgctcagcgtattggcattccgctggcgaccattggtgaagcgtttggcgtgttgcccgaagggcatacgttaagtgcgaaagagtggaaacagctttcgtcccaatggcgagaagagttggatcggcgcattcataccttagtggcgctgcgtgacgaactggacggatgtattggttgtggctgcctttcgcgcagtgattgcccgttgcgtaacccgggcgaccgcttaggagaagaaggtaccggcgcacgcttgctggaagatgaacaaaactaaagcgccacaagggcgctttagtttgttttccggtctttgtctttctctctatcccgctggtacacaggagggtttcccccgacgtcaacacacctcattcgagcacgtggtggaggttccggttggtgttgatgctttaattgtatgtcaccgacgtttcttcgccagtgtaaaagtatactttttaaccgcaatatttttgtcatctcagacgattttttatcgcaatcctgaacggtatacggctcgataacgctgcaatcttgcgcaccgacgataacgtttgcgcatcaattgcctggtttttcatcgtcaagacaataaaagagaaaaaagcagcaaacttcggttgaaaaagccgctatgatcgccggataatcgtttgctttttttaccacccgttttgtatgcgcggagctaaacgtttgcttttttgcgacgcagcaaattgtcgcaaacctggagcaggaagataacgtttcgctggcaggggattgtccgccacgcatcttgacgaaaattaaactctcaggggatgttttcttatgtctacgccatcagcgcgtaccggcggttcactcgacgcctggtttaaaatttcacaacgtggaagcactgtccgtcaggaagtggttgccgggttaacaacgtttctggcgatggtctactcggtcatcgtcgttccaggtatgttgggtaaagcaggcttcccgcctgcggcagttttcgttgcaacctgtctggttgccggactcggttctatcgtgatgggtctgtgggctaatctgccgttggcgattggttgcgccatctccctgacggcatttaccgcattcagcctggtgctggggcaacatattagcgtacctgtcgcgctgggtgccgtgttcctgatgggtgtgctgtttacggtaatttctgccacgggtatccgtagctggattttgcgcaacttgccgcacggtgtggcgcacggcacggggattggtatcggtctgttcctgctgctcattgccgctaacggtgtcggtctggtgattaaaaacccgcttgatggtctgcccgttgcgctgggtgatttcgcgaccttcccggtgattatgtcactggtaggtctggcggtgatcatcggcctggaaaagctgaaagtccctggtggcattctgctgaccattatcggtatctcaattgtcggtttgatcttcgatcctaacgtccatttctccggcgttttcgccatgccttcattgagggatgaaaacggcaactcactgattggcagcctggacattatgggcgcgctgaatcctgtagtcctgccaagcgttctggcgctggtaatgacggcagtatttgatgccaccggaactatccgtgccgtcgccggccaggcgaacctgctggataaagatgggcaaattatcgacggtgggaaagcactgaccactgactccatgagcagcgttttctctggcctggtgggtgcagctccggcagcggtatacatcgagtctgcggcgggtacggcggcgggcggtaaaaccggtttgacggctatcaccgttggcgtgctgttcctgctgattctgttcctctctccgctctcttacctcgttccggggtatgcaacggctccggcgctgatgtacgttggcctgctgatgctgagcaacgtggcgaaaatcgactttgctgattttgttgatgcgatggcgggtctggttacggcggtattcatcgtgctgacctgtaacatcgtaacaggcatcatgatcggcttcgcgactctggtgattggtcgtctggtttccggcgaatggcgcaagttgaacatcggtacggtcgttatcgccgtggcgctggtgaccttctatgcgggtggctgggctatctaatctttcatcggattctgaaaacgggtggcaatggctgcccgtttttattttctccgcacattgtgtgagcttttgcgatattctgaaaaaatgagaattcaggcataacgtctttctcagatcataaaaaacatcgcaaacagggaacgcatggaaatcttcttcaccatactgataatgaccctcgtggtctcgctgtccggggtggtcactcgtgtcatgccctttcagatcccgcttccgcttatgcaaatcgccatcggtgcgctactggcgtggccgacgtttggtttgcatgtggagtttgatcctgaactctttttagtcttgtttatcccgccgttgctgttcgctgatggctggaaaacgccgacccgtgaatttctcgaacatggtcgagagattttcggcctcgcgctggcgctggtggtggtcaccgtggtcggcattggcttccttatttactgggtggtgccgggcattccgctgatccccgcctttgcgctggcggcggtactttctccgaccgatgctgtggcgctctccgggattgttggcgaagggcgcatcccgaaaaaaatcatgggcattttgcagggcgaagcgttgatgaatgacgcttccggcctggtgtcgttgaagtttgccgtggcagtggcgatggggacgatgatcttcaccgtcggcggtgcgacggtcgaatttatgaaagtagccattggcggtattcttgccggttttgtggtgagctggctgtatggtcgctcgctgcgattcctcagccgctggggcggtgatgaacccgcgacgcagattgttctgctgttcttgctgccattcgcttcttatctgattgccgaacatattggcgtttccggcatcctcgctgcggttgccgccgggatgaccatcacccgctccggtgtgatgcgccgtgcgccgctggcaatgcgcctgcgtgcaaacagcacctgggcgatgctggaatttgtctttaacggcatggtgttcctgctgttaggtctgcagctgccgggtattctggagacgtcgctgatggcagcagaaatcgaccctaacgtcgaaatctggatgctgtttaccgatattattctgatatatgcggcgctgatgctggtccgtttcggctggctgtggacgatgaaaaagttcagcaaccgcttcctgaagaagaagccgatggagtttggttcgtggaccacacgagaaatcctgatcgcgtctttcgccggggtgcgtggggcgatcactctggccggtgtgctctctatcccgctgctcttgccggatggtaacgtcttcccggcgcgctatgagctggtgttcctggcggctggcgtcattctcttctcgctgtttgtcggcgtggtgatgttgcctattctgctacaacacattgaagtcgcggaccattcgcaacaattgaaagaggaacgtattgcgcgagcggcaacggcagaagtggcgattgtggcgatccagaaaatggaggagcgtctggcggcggataccgaagagaatatcgataaccagctgcttacggaggtcagttctcgcgtcattggtaacctgcgtcgtcgcgccgatggacgtaacgacgttgaaagttccgtgcaggaagagaaccttgagcgtcgcttccgtctggcggcattgcgttctgaacgtgctgaactttaccacctgcgcgccacgcgggagatcagcaacgaaacgctgcaaaaattactgcacgatctcgatttgcttgaagcgttgctaattgaggaaaatcagtaagccgaaagcgacgtaaccaggcccgaggtaatctgaaaaaggtgcaatcttttgcacctttaacaggttagctcgggctaacattcatgattctaaaacaaataagttatctctcttgtaaagtcaattcattggctgttcttcgacttaacctcaatctgcgtgttgcataatatctgcagtaatcttcatagcgactgcattaatattatcctcagtttgtgacatgccagtatgagaggtacaatcttcttcaaagaatttctgtagtgttaccagggtatcactatcaatggggatattttcctccccacggagaatggaaatgcccattccctggacgctagcctcatcaaaattaacccgatagagacgggtattaaacatacaggcttttgttaaaatagaacagttgaaatggcagttgcttaaattggcattattaaaattaacattagccatattagagccggtacatataaccatttcgaggaatgtatttgtcagccacgtacaaaagagtttgctatcaattaagtttatattctggaggattgctttgttcagattgacgcgagacagatcagcatgttcaaagttaattaaatcgagtttagagaaactaaggtcggctttaaataaattaacatatggcgctattactttataaagatttacctcagccatgtacgccatataaaaatttgaatagtcaaggaaggtgtttttaatattggctctattcattgctgcattgtagaattgaacatgcatagcggagcatgcatttagagttccgtcggccatttttatctgagcgaaatttgagtcatcgagaatacaattatcaaaaagtattttttccattatggcgtaataaaaattcgttttatacatattacagtcctggaaaatagcgttttgtagtctgcaacctgcaaaattcgaattggataaatcttcatctttaatcacgatacctttcaggctaaggtgtgaaaaatcgtaaccaccatttactgtctgtggaatttcgatagtattattatgggcggcgacattatttataaaatataccaccttaatggatacttccttttctttactaaggtaaactcttctcgtaattctatcgtcacatttattatttgcatataaagctatatctataaaatgtttatgtattttcctgtccgtttccttcgtgatttttcctgatggtaaactatcataaattcttttcattttctgaatcaaacctatcactttttcatgatcatccattttgaaaagagagagggctttattgtcaattaacgtgtttttatgatgtttgctgtaattatatgattttgttttctttgtatgtgatgaacttgtgagagagtggttatcgttaatctggcaaagagagaaaaacatattatttaaaccattatagcgcataaaatatccttataattaacaagaaagaaaaggcatattctctgcattatcattttctacgactgtcaaaaatcgctcattttttaatgagtttatttgtttaatattttgggaaaaggtgatgcatgctggagaggaagagtattccccggtcaggcgaccggggaaggggagagattaatgtgcgcggccttgctcaacgccaaagccggtctgggagcggataaactgcgcgcggaacagttcacgctcgcgcgccccttccgctgagttatcggttgccgagaagaaccagatgccgaggaatgccacggtgatagagaacagcgccgggtattcatacgggaagatggctttttcgtgaccaaggatctgtacccaaatcgtcgggccgaggatcatcagtactactgcggtaatcagcccagccagccacccatcatcgcgccacgcgtggtcagtttcgaccagtacatagaaagcagaatgatcgggaagttacagctcgccgcgatggcaaacgccagccccaccataaaggcgatgttctgattctcaaacagcacgccgaggataatggcaatcacacccaaaatcagcacggtgattttcgatacccgcagttcttcacgttcggtcgcgccttttttgaagacgttagcgtacaggtcatgcgaaaccgctgatgcgcccgccaacgtcagacccgcaaccaccgcaagaatggtggcaaaagcaactgctgaaataaaaccgaggaacaggttgccgcccactgcattcgccaggtgaacggccgccatgttgttaccaccaatcagatggcccgccgcgtctttatattccggattcgcaccaaccagcatgatcgcgccgaagccgataataaaggtcagaatatagaagtagcccataaatccggtggcgtagaacacgctcttacgtgcttcgcgggcatcgctgactgtaaagaagcgcatcagaatgtgcggcaagcccgccgtaccaaacatcagtcccagacccagagagagcgcggagatcggatctttcaccagcccgcccggcttcatgatgtcgacacctttcgggtgtaccgccatcgcttcactgaacagattgttgaagctaaagccgacgtgtttcatcaccataaaggccataaagctggcaccgaacagcaacagcacggctttgataatctgtacccaagtggtcgccagcatgccgccgaacaggacgtacatcatcatcagcacgccgaccagcaccaccgcaatgtgatagttaaggccaaacagcagctcgatcagtttacctgcgcccaccatctgggcgataaggtaaagcgccaccaccaccagagaaccacaggccgaaagaatacgaatcggcccttgtttcagacggtaagaggccacatcggcaaaggtgtagcgccccaggttacgcagacgttcggcaatcaggaacaaaatgatcggccagcccaccaggaagcccagcgagtaaattaagccgtcatagccggaggtaaacaccagcgcggagatccccaagaatgaggcggcggacatatagtccccggcaatcgccagcccgttctggaagccagtgatattgccgcctgcggtgtagtagtcgctacgagaacgtacgcgttttgatgcccagtaggtaatgccgagcgtaaacacgacgaaaatcaggaacataataatcgcctgccagttcgttggctggcgctctacggccccgctaatagcatccgcggcgttagctgcgaaagggagtgtggcggcaagcgccgtcagaactcttttcatgatgcttgtacctcatgcaggacttcattattaagacggtcgaattcgccgttcgcccgccagatgtagataccggtgagaacaaaggagatcacaatcactccaacaccaattggaataccgcgtgtgacgctggtgttcggattcagcggcgtgcccagccagccgggcgcgaaggcgatcagtaaaataaagccgatataaactgccagcataataatcgacaggatggtggcaaaccgttgccgtttttcgactaactccctgaaatgcgcattgtcttctatccgctgataaatagtgccattcatcacagattctccagaggtaatgtagggattgttttaattcccgctcccttatgggagaaggttaacgctcgggtaacccttgccgaatgtaggccggataaggcgtttacgccgcatccggcaatcaatgcctgatgcgacgctgtcgcgtcttatcaggcctacaaaccgttaccgactcgcatccggcaattgtgggttacgatggcatcgcgatagcctgcttctcttcaagcagcttctcgactacgccaggatcggcaagcgtcgaggtatcgcccaggttgctggtatcgcccgccgcaattttgcgcagaatacggcgcataattttgccggagcgggttttaggcagggagtcggtccagtgcagcacgtctggcgtcgccagcgggccaatctctttacgcacccagttgcggacttctgcgtacagttctggtgacggttcctccccgtgattaagcgtgacgtaggcgtagatcgcctgacctttaatattgtgcggaatacctactacggcggcttcggcaatcttcggatgcgccaccagcgccgactcaatctctgccgtccccagacggtgaccggagacgttcagcacgtcgtccacacgcccggtgatccagtaatagccatcttcatcgcgacgcgcgccgtcgccgctgaaatacatatttttgaaggtggagaagtaggtctgttcaaaacgttcgtgatcgccaaacagcgtacgcgcctgacccggccaggagtcggtgatcaccaggctgccttcggtagcgccttccagcgggttaccttcgttatcgaccagcgccggttgcacgccgaagaacggacgtgttgccgaaccggctttcagctcggtagcgccaggcagcggcgtgatcatgaaaccgccagtttcggtctgccaccaggtatcgaccaccggacatttctcgttgccgatttttttccagtaccactcccacgcttccgggttaattggctcgcccacggaaccgagaatgcgcagcgacgaacggtcggtgccttcgatcgctttatcgccttccgccatcagcgcgcggatcgccgtgggtgcggtatagagaatattgacctgatgcttgtccaccacctgcgccatacgggcaggcgtcggccagttgggtacgccttcaaacatcagcgtggtcgcaccgcaggccagcgggccgtacagcaagtaactgtgtccggtcacccagcccacatcggcggtgcaccagtagatatcacccggatgataatcaaagacatatttaaaggtcagcgccgcgtacaccagataaccgccggtagtatgcagcacaccttttggcttaccggtagaaccggaggtgtagagaataaacagcggatcttcggcgttcatctcttccgcctggtgctgatcgctcgcttgctcaaccaggtcgtgccaccacaggtcgcgcccttcctgccagtcaattttcccgccagtacgcttcagtaccaccacatgctctacgctggtgacgttcgggtttttcagcgcgtcatcaacgtttttcttcagcggaatactgcgcccggcacgcacaccttcgtcggaagtgatcaccagtcgtgagttggaatcaataatgcgcccggcaacggcttccggcgagaagccgccgaaaatcaccgaatgcaccgcgccaatgcgggcgcaggccagcatcgcaaccgcggcttccggcaccatcggcatataaatcgccaccacatcaccttttttaatgcccagctcgagcagggtattggcgaagcggcagacgtcgcggtgcagctctttatagctgatatgtttgctctggctggcgtcgtcgccttcccagatgatggcggtgcgatcgccgttttcttgcagatggcggtcaaggcagtttgccgccagattcagcgtgccgtcctcgtaccatttaatggacacattaccgggggcaaaggaggtgtttttcaccttctggtaaggtttgatccagtcgagaatttttccctgttcgccccagaaggtatcaggtacgttaatagattgttgatacatcgcctcgtactgctgagggtttatcaggcaacggtctgcgatgttggcaggaatggtgtgtttgtgaatttggctcatgcttttgttctccttgtaggatgttaataatatgtggcataagcgttaaatgtaggggtattggcagttttgtttagtatttgggcgacagatcacgcaaaagtagaattgtgcaaataaacggcagggtaatttttgaaggtcagcaacaaaagttgattaattctttgaggaacatgcagttatgcatgctgttgaaaaagaggaagatactgactaactctaaagtggtattttacatgcacttacaattgattaaagacaacattcacagtgtggttatttgttacacataggggcgagcaatgtcatgacagtgtaggtgcggttactgtcgtgaaaacaataaaaaccgccattgcaacaatggcgcaattcggatgaagcccctatgacaaggataaaaataaacgcacgccgtatcttcagcttattgattccttttttctttttcacttctgttcacgctgaacaaacggcagctcccgcaaaacctgtaactgtggaagcgaagaatgaaacctttgccccgcagcatcccgatcaatatctctcctggaaagccacctcggaacagtcagagcgtgttgacgccctggcggaagatccacggctggtgatcctgtgggcggggtatcccttctcgcgcgattacaacaagccgcgtggacatgcctttgctgtgaccgatgtgcgtgaaaccctgcgtaccggtgcgccgaaaaacgctgaagatggtccgctaccgatggcgtgctggagttgtaaaagcccggatgtggcgcgtctgatccagaaagacggcgaagatggctacttccacggtaagtgggcgcgcggcggcccggaaatcgtcaacaacttaggttgtgccgactgccataacaccgcctcaccagagttcgccaaaggcaaaccggagttaaccctttcccgtccgtatgcggctcgcgcgatggaagccattggtaaaccttttgagaaagccggacgtttcgaccagcaatcgatggtttgcggtcagtgccatgtggagtattacttcgacggcaaaaacaaagcggttaaattcccgtgggatgacggcatgaaagtcgaaaatatggagcagtattacgacaaaatagccttctctgactggactaactccctgtcgaaaacgccaatgctgaaagcgcagcacccggaatatgaaacctggacagcgggcattcacggtaaaaacaacgtgacctgtatcgactgccatatgccaaaagtgcagaacgccgaaggcaaactctacaccgaccataaaattggtaatccgtttgataacttcgcccagacttgtgcgaactgccatacccaggacaaagctgccttgcaaaaagtggtcgcggaacgtaagcagtcgattaacgacctgaaaatcaaggttgaagatcaactggttcacgctcacttcgaagcgaaagcagcgctggatgcaggcgcgacggaagccgaaatgaagccaattcaggacgatatccgtcatgcccagtggcgctgggatctggcgatcgcttcccacggcattcatatgcacgcaccggaagaaggtttacggatgctcggtacggcgatggataaagcggcggatgcacgcaccaaactggcgcgcctgctggcgaccaaaggcatcacccatgaaatccagatcccggatatctcaaccaaagagaaagcccagcaggccattggcctgaacatggaacaaatcaaggccgagaagcaggacttcatcaaaacggtgatcccgcagtgggaagaacaggcacgtaaaaacggtctgttaagccaataaccccgttccgcctcgcaaggggcggaaaacacaatggagtgaatatgagcgtattacgttcgttattaactgccggggtgctggcgtcgggcctgttgtggagcctgaacggaattaccgctacccctgcggcgcaggcatctgatgatcgctacgaagttacccagcagcgtaacccggatgccgcctgtctggactgtcataagccagataccgaaggtatgcatggaaaacatgcttccgttatcaacccgaataacaaactgccggtcacctgcaccaactgtcacggccagccatcaccgcaacaccgcgaaggggtgaaagatgtgatgcgctttaacgagccgatgtacaaggttggagagcagaacagcgtctgtatgtcctgtcatctgccggaacagttgcaaaaagcgttctggccgcacgatgtccacgtaaccaaagtggcgtgcgccagctgccattccctgcatccacagcaagatacgatgcagacgttaagtgacaaaggacggattaagatttgcgtcgattgccacagcgatcagcgcaccaatccgaactttaacccggcgtctgttccgttgcttaaggagcagccatgacctggtctcgtcgccagtttctcaccggcgtcggcgtgctggcagccgtcagcggcaccgcagggcgcgtggtggcgaaaacgttgaatatcaatggggtgcgttacggcatggtgcatgacgagtcgttatgcatcggctgtaccgcctgtatggatgcttgtcgggaagtgaacaaggtgccggaaggcgtctcgcgcctgacgattattcgtagcgagccgcagggcgaatttcctgatgtgaaatatcgcttcttccgtaagtcttgccagcactgcgatcatgcgccgtgcgttgacgtctgcccgaccggtgcgtcttttcgtgatgccgctagcgggattgtcgatgttaatcctgatctctgcgtcggttgtcagtactgcatcgccgcctgtccgtaccgcgtgcgctttatccatccggtcacgaagacggcggacaaatgcgatttctgccgtaaaaccaatttgcaggccggtaagctgcccgcgtgcgttgaggcttgcccgacgaaggcgctgacgtttggcaatctggacgatcctaacagtgagatttcgcaactgctgcgccagaagcctacttaccgctacaagctggcgctgggaaccaaaccgaagctgtaccgcgtaccgtttaaatacggggaggtgagccaatgacgcagacttccgcatttcattttgaatcgctggtgtgggactggccgattgccatctacctgtttttgattggtatttctgccggtctggtgacgctggccgtgctgttacgtcgcttctacccgcaggcgggcggtgcagacagtacgttgctgcgcaccacgctgattgtcgggccgggcgcggtgatcctcggtctgttgatcctcgtcttccacctgacaagaccgtggaccttctggaagctgatgttccactacagttttacctcggtgatgtcgatgggggtgatgctgtttcagctctacatggtggtgctggtgctgtggctggcgaaaatctttgaacatgatttgcttgccctgcaacaacgctggttgccgaagctggggatcgtgcaaaaggttctgagcctgctgacgcccgttcatcgcggactggaaacattgatgctggtgttggcggtgttgttgggggcttataccggctttctgctgtcggcgctgaaatcgtatccgttcctcaataacccgatcctgccggtgctgttcctcttctccggcatctcgtccggtgcggcggtggcgctgatcgccatggcgatacgccaacgcagtaacccgcattccacggaagcgcagtttgtacaccgtatggaaatccccgtggtatggagtgaaatcttcctgctggtggcgttttttgtcggtctggcgctgggcgatgacggtaaagtgcgtgcgctggtggcggcattaggtggcggtttctggacgtggtggttctggcttggtgtcgccgggctggggctgattgtgccaatgttgctcaaaccgtgggtcaatcgcagttccggcattcctaccgtgttggcggcgtgtggggccagtctggtcggcgtgttgatgctgcgctttttcattctctacgccgggcagttaacggtggcgtaagccagaaaagaggtggtttctggacgtattccttcctgaagtcggttttctggcgttgttgttaagtctcggggtcaacgtgttgaccccgttgacggcctttgcgggagtgcggttgcgctggcctgccatgatgcgactcacttgcatcggcattctggcgcagttcgcgctcctgctgctcgcctttggcgtactgacgtattgttttctcatcagcgatttctcggtcatttatgtcgcccaacatagctacagcctgctgtcgtgggaactcaaactggcggcggtgtggggcggccatgaaggttcgctgctgctttgggtgctgctgctttccgcctggagcgcgctgtttgcctggcattatcggcagcaaaccgatccgctatttccgctgacgctagccgttttatctctcatgctcgccgcactgctactgtttgtagtgctgtggtccgatcccttcgtgcggatatttccaccagcaatcgaaggccgcgatctcaatccgatgctgcaacatcccggtcttatctttcatccaccgctgctttaccttggctatggcggtttgatggtagcggcgagcgtggcgctggcgagtttactgcgcggcgagtttgatggtgcctgcgccagaatttgttggcgctgggcactacctggctggagcgcattaacggcggggatcatcctcggttcctggtgggcctattgcgaactgggctggggcggctggtggttctgggatccggtggaaaacgcctctttattaccctggctttctgccactgcgctgctgcacagtttgtccctgacacgccagcgggagattttccgccactggtcgctgttgctggcgatagtaactctgatgctgtcgctactgggtaccttaattgtccgttctggcattctggtttcggttcatgcgttcgcactggataacgtccgcgccgtgccgttgttcagcctgtttgcactgattagccttgcgtctctggctctgtatggctggcgagcgcgggacggtggcccggtggtgcgtttttcggggttatcgcgggaaatgttaatcctcgctacgctgttgctgttttgcgcagtgctactgatcgtgctggtgggaacgctttatccgatgatttacggtctgctgggctggggacgcctctccgttggcgcgccgtattttaaccgcgcgacgttaccgtttggcctgttgatgctggtggtgattgtgctggcgacgtttgtctctggcaaacgcgtgcagcttccggcgctggtagctcatgcaggcgtgctgttatttgccgcagggatcgtggtttccagcgtcagccgtcaggagatcagcctgaatttacagccgggtcagcaggtgacgctggcaggatacaccttccattttgagcgcctcgatctgcaagccaaaggcaattacaccagcgaaaaagcgatagtggcactgtttgaccatcagcaacgcattggtgaactgatgccggagcggcgtttttacgaagcacgtcgtcagcaaatgatggaaccgtcaattcgctggaacggcatccatgactggtatgcggtcatgggtgaaaaaaccggagcggatcgttacgcttttcgtttgtatgtacaaagcggtgtgcgctggatctgggggggaggattgttgatgattgcgggcgcattgttaagcggatggcgggggaggaagcgcgatgaataaaggacttctcacgctactgctgttatttacctgttttgcgcgcgctcaggtcgtagacacctggcaattcgccaatccgcaacaacagcaacaggcgttaaatattgccagccagttacgttgtccgcagtgccagaatcaaaacttactggaatccaacgcgccggtggcagtcagtatgcgccatcaggtttacagcatggtggcggaggggaagaacgaagtcgaaatcattggctggatgaccgaacgctacggagattttgttcgctataacccaccgttaacgggtcagacgctggtgttgtgggcgctgccagtggtgttgttactgctgatggcactgatcctctggcgagtgagggcgaagcgatgaaagagcccaaaataccggtgaaaatgctgacaacactcacgattttgatggtatttctctgtgtcggcagttatctgttaagtccaaaatggcaggcggtacatgcggaatatcagcgtcagcgcgatccgctacatcagtttgccagccagcaaaccccggaagcgcagcttcaggcattgcaggataaaatccgcgctaatccacaaaacagcgaacaatgggcgttactgggcgagtactatctgtggcaaaacgattacagcaattcgctgctggcgtaccgtcaggcgttgcaactacgtggtgagaacgctgaactgtatgcggcgctggcgacggtgctttattaccaggccagccagcatatgaccgcccagactcgcgcaatgatcgacaaagccctcgcgctggactctaacgaaatcaccgctctgatgctgctggcttccgatgcgtttatgcaggcgaattacgcgcaagccatcgaactatggcaaaaagtgatggatctcaactcaccccggatcaaccggacacagctggtcgagtcgattaatatggcgaaattgttgcagcggagatcagattaatcatctggtgatgaagattatgttattgagttgtataaaaaataatcgaatgaacatatgccaaaaataatcaccaatcagtattattgcagattaaacaaataaaaatctttccataacaaatggttattcattaatcctgccataaactcgcgttattatgcattaatgcagcgaaaagctctgttgttaaagggttgcgcaacataccgcgcaaatgatactgatcataagcgttaaaaaaatctacaaaccaacgcaacacaattcatgccctggcagtatgtcacgttctcgcgtttctgaacggggaacggcgctccattgaggaagttattctgatgaaaagtataaaattcagcctggcctggcagattctgtttgctatggtgctgggcattctcctgggaagctacctgcactaccatagcgacagccgcgactggctggtcgtcaatttgctctctccggcgggtgatatcttcatccatctgatcaaaatgattgttgtgccgattgtgatctccacgctggtggtgggtatcgcgggtgttggtgatgccaaacagctcgggcgtattggcgcgaaaaccattatttacttcgaggtgatcaccaccgtcgccatcattttggggatcactctggcgaacgtcttccagcccggtgccggggtggatatgtcgcagctggcgaccgtcgatatctcgaaatatcagagcactacggaagcggtacaaagcagttcccacggcattatgggcacgattttgtcgctggtgccgacgaacattgtggcgtcgatggcgaaaggcgaaatgctgccgatcatcttcttctcggtgctgtttggtctggggctttcctccctgcccgcgacgcatcgtgaaccgctggtgaccgtgttccgctccatctctgaaaccatgtttaaagtgactcacatggtgatgcgttatgcaccggtgggtgtgtttgcgctgattgcggtgacggtggctaactttggtttctcttctctgtggccactggcgaaactggtgctgctggtgcatttcgccattctgttcttcgcgctggtagtgctgggaattgtggcgcgcctgtgcgggttaagcgtctggatcctgattcgtattctgaaagatgagctgattctggcgtactccactgccagctctgaaagcgtactgccgcgaattattgagaagatggaagcctacggagcaccggcgtcgatcaccagcttcgtggtgccgaccggttactcttttaaccttgatggttcgacgctgtatcaaagtattgccgctattttcatcgctcagctgtatggcattgacctgtccatctggcaggaaatcattctggtgctgacgctgatggtgacctcgaaagggattgctggcgtgccgggcgtgtcgtttgtggtgctgctggcaacgctgggtagcgtaggtattccgctggaaggcctggcgtttattgctggtgttgaccgtatcctcgacatggcgcgtactgcgctgaacgtggtgggtaatgcgctggcggtgctggtgattgccaagtgggaacacaaatttgaccgcaaaaaggcgctggcttatgagcgtgaagtgctgggcaaatttgataaaactgcggatcaataattgaagattgccggggttatccacccggcaatgtgtggatgcctgatgcgacgctggtgcgtcttatcaggcctaccttaaccgttggttaatttttcaaactcttcacacccggtatcaaacccttccatacagctcaggttcaaccagtgcagcgccttttgtttgttcttctcgataaaaccttcctcaccgtttaagaacatcattcccgcccagtactcggaataaccggttcgggaaattgcagagctgcgtttgaaataccaggttgccttgtcatcgtcggccttaatgcccacgccgttggcgtaaatcaaaccaagcagcatttgggcatcgacggcggagtcattctccagatcttccgaggcgttttctaacagcgaaatcgcctttggataatccggtttacccgcttgagtatttaccagaatatgcgccagcgttacttcaccttctttactgcccgcttgcgccgctttctctgcaagaacttttgcttgtggatagtccagactgaccggattggtgattttgatctgcgccagcagcgcgcaggcatcagcatcaccgctgtcggcggctttctgtgcccaatattcggctttgctcaaatcgccggagctaaaccagctgtcggcaagaaaatattgtgcgcgtcggtccccggcctctgctgcctttaaatactggctgccaggctcggagtcgttcgcgtgggcaaagaatgtcaaaaacaacatcaatgcgataatttttttcattttgataatacgattgggtagggagtaaccagtataaagagttcgaatggataaaaaaacagcctccgaaaggaggctgtagaaaggactgtattacgccagtgccgcttcgcgcaggcgagttttcaacttgttgtactcgtcaatcacgtactgctcggcggcgcgctgatcggcgatcggctcgacgcgcacggcgcagtatttgtattccggcgttttcgtaatcgggcttaagttttcggtaaccagctcgttacaggcaccaatccaccactggtaggtcatgtaaatcgcccctttgttcggacgatcgctgacctgcgcacgggtgataattttgcctttacgcgagtgcacccaaaccaatgcctcatcttcaatacccagacgtttggcgtcttcggtattgatttgtgcgtagccaggttcatcagccagcgccgccagtgccgcacagttaccggtcatcgaacggcaagagtagtgaccaacttcacgcaccgttgacagtaccatcgggtactcgtcggtgagtttgtcgattggcgctacccagtcgcaggtgaagaactgtgccagaccgttcggggtatcaaacttctctttaaacagataagaagtcccctgatcggcatctgaagtatcgcggcaaggccactgaatgaagcccagttcgcccattttctcgtaagtcgcaccgtagaaatccgggcacagatgacgcaactcatcccagatctcctgggtgttgttgtagtgcatcggataacccatacgggtggcgatttcactgatgatttgccagtccgttttcagatcccatttcggttcaactgctttgaagaaacgctggaagccacggtcagccgcagtaaacacgccttcatgctcgccccacgacgttgacggcaaaatgacatccgccgccgacgcggttttggtcataaagatgtcctgaacgataaccagttccagatcttcaaaggctttacgtactgccgacagctccgcgtcagtttgcagcggatcttcgcccataatgtatgcggcacgcacttcgccatgcgctgcgcggtgcggcagctcgctgatgcgataaccggtatgagcaggcaggctttccacgccccaggctttggcgaatttctcgcggttagccggatctttcacgtactggtatcccggatacgtatccggcagcgcgcccatatcgcaggcaccctgcacgttgttctgaccacgaaccgggtttacacccgcatgcggcttaccgaggttaccggtcagcatcgcgaggctggtcagagaacgcacggtttccacgccctggtagaactgggttacacccatgccccacaggatggcggcgcttttcgcctgggcatacatccgtgccgcctgacgaatctcactggcgctgacgccggtgatatcttcaaccgactccggcgtgtagccttcaacgattttacgatactcttcaaagccttctgtacgggaagcgacgaacgctttgtcgtacagattttcttcaataatgacatggcccatcgcattcaacagcgcgatgttcgagccgtttttcagtgcaatgtgcatgtcagcaatgcgcgcggtttcaattttgcgcggatcgcagacgataattttcgccccgttacgtttagcgttaattacgtgattcgccacgattgggtgggaatccgccgggttgtacccgaaaacgaacactaaatcggtattatcaatttcgttaatagcattgctcattgcgccattaccgaccgattggtgcagacctgcaaccgatgggccgtgtcagacacgagcgcagcagtcaacgttattggtaccaataacggcgcgcgcaaatttttgcattacatagttggtttcgttacccgtaccacgcgaggagccggtcgtctggatggcatccggaccgtacttctctttgatggcgctcaggcgctcggcaacgtaattcagtgcctcatcccaggaaacaggttcgagtttgccgccacgctggcgacggatcatgggggttttcaggcgcggggtcaggatctgggtatcgttaatgaaatcccagccataataacccttcagacacagggtaccctggttggttttcccctgcgctgcctccgcccggacgattttgccgttatcgacgaccaggttgattttgcaacctgatgcgcaataggggcaaaccgtgacgacttttttcatcggtctcgctccagttaatcaaatcacgcatacgcgctctcgactacagtatgcatcttttatgccacattttatttggggtcattccctgatattacgggcactatttattcaaaactctgacgaaaaacaggctgtcgtcagttttgacgtgacgaaacgaaataccgcgtgacagccatcacgcggcagacattttattttttctcgacgacgggagccgcctgatacccgccgcccagcgatttcatcaactgaatgctttggatcacccggcggctgtccagcatcagtaatgacatctcttcggcaagtactggcaaccgggcttcagtggcctgtaagcggctggttaagccgcgctgataggcggcctcggcagcgcgctgggtgaagcgcgttgcttccacgcgttcagcctgcatttctcgctcgtcgttgagcgtttgcagacgcgtgccgttgacggcaacgtcacgcaccgcgttcagtactgactggttgtaacgttcaatcatcatgttgctggcggcgcgcgtgccttcgagattggcattcaaccgtccaccgtcaaacagcggcaatttcagacccgggatgaagttgaactggcgactggtttttttgaataaggtatccaggtggatggcatcaaggccgaaaaacgctttgatatcaaagctcgggtagaacagcgcccgcgcggaatccacctgatctaatgacgcctgaacataccagcgcatggcttgcagatccgggcgtctggcgagcaactcataagagagtgtcgccggaatgccggtctggactcgtggtaatgccaccggtttgatctccggcatatcgctggcccccgcgccaatcaatgcacgcagagattctcgcgtttcggtgatttgccctttgacggcagcaatttgtttatcgaccgccagaatctgtgcccgcgcgccgtggaaaggcacttgtgcttccagaccgtgcgccactttactctggtgcgctttcaccgcgtaatcaatcacatcgcgagtttgttctaacagatcgagcatctgatagctggcctgcatactgtaataaagctgcgctacgcccgtggtcagcgatagctctactgctgcggtttctgccagcgcggcattatgcgcgccaatggcggcggcaaccgctgagcgatgcacaccccacaaatcaagatccagtccggcaaacaaacctactgtggcttccgtatagtacggcccgtccatacccagtgcgggcgcatccatcgcataagggcttaaaaagccgttcgccgagacgcgttggcggttgagcatccctaacgctgcgacctgtaattgtgaaccggcatctaacaaatcggcctgagactgcgctttttcttcccgcagtttcgcttcggcgagggtgtgtgaaccacttagcgtccgttggatcagcgcatccagctgcgggtcattgagttgtttccaccactgcgcctgcggccagccggagctggcaagatgaatatcgtcggccagtttgatttgttccggtttgagctgttgatgaggtgcagaatccttacgtaccagggcacagccggaaatcagcgtcgtgctgccgagaatgctgcacaacagcagacgtgaaagttgacgattgatcattgcgtggctccttgtgcctgttccgtggcgggcgttaatgccggggctgtccagtctggcaagcgggcgaaaagctggcagacgtgttgctcctgttttaataaggtgggcaggatggcctgcgaggcgggtgtctcttcaagcgttatttgaggagaacggctgagtgcggttgccagaccggcagcgtatttctccagggcgtcggcaaactgagctgctctgtccggctgtagtgcgttatccagcgcctgcgccgagttccaggtggcatcccaggcgtgaagaatatcgcggccctgacgaataaccgtttgcgaacgttcaatcagtaaggcgcgttcttcgctgtccagttgacgctccagcgccacgcgttggcacatctcttcacaggcattaaacgccgcatgcagaccgatacgaatttgcagataagtgcgcagagccgtgacttcctgctggcgtgggatccgcattactttacttaacatacccagcgtgccagccagtttttgcggcagtgtgcgcgcttcactttcaggccagacaaaggtgtaaatcaccgcggacaccacggtaccaatgatgatacccagggcgcgatcgcgaatttccaccaggtcgtacactgggccaaaaacgttttcgagcgtggcgagcgcgaaggtgaccaccatctgtgtgccgatataagaagagcgttcagagctggtggcaatccatgcgcccaacaggaaaatcggtgccagcacaaacagcaattcgacaatattgtccagccagggcatgaccagtagcgtgaataacagcgccagaatcgcgccgcaaaaggccccgccaaaacgcagcaccatcttctggtacgacgaaccgacatttgggttagcgacgatcacgcatgtcagcatacaggtgtgaatgccttcccagtccacgccgctgtaaaaggtgtaacagatcaaacaggcgagcagcgtttttaccgcgtagcgcatatagtctggattggtaaaagcatcggcggccattgatggcggtttggctgcgggcgttggcggcgtattcgggtccatctgacccagttgtaacaacgtctggcagatattctccaggttacattcccgtgccgccatcgcttcactttcactgatccgccagtcgctttgccagcactgaccttcagcaacggcatgctgcagcttattgatttctgaggctaatttttgccgaaattcaataattgcctgagaatcagcaaaagaggtgggatcgtagcgattcagcgtcgagtaaatgtaggttaccgttgccacgcagctttgccaccatgcgctttgagttcgccagttggcatcgtccgcgagacaaaagacattcagtttttgcagcgccagcgcctctctttcaatccgcgtttcgggtagcggtgcgaggctgtccgtcaggtggctaatggcatcatcaagccgatcattaagcgcctgatgcatttgcgaaatggcacgactgggaaaccacagcacgccgattaacgtcatcagcaaggttggataaaggccaacaacgatacaccacagcgttaagcgcacgaccacttccggatagtcgagcatggcggggaaggtttgcccgtaaatggcgacaatggcgactgcgaaaaagaccagtcccagccgatgggtgcgcatcaaaaacatacagcccatcaggatcggcccggcgatgatcaatcggatcaacggttcgccgtatgaccatttgtagatcaaaaacaggctgccgatctccagcatcgtggcgaccacaaataagatcgcgacaaatttggtgtaaaacgcgttcgactgaataccgtaaaacagcactgccagcgataacgccacgaatgggatctcaaaggtcatcgagatcagaatcaccagcaggcagcctacccagagttgcacggtctgcggcacgcggcctggtcgccgctcgcttaactcttcatgaaagaacgccagcagcctgaccaccggtaatggcagggagttgagcgcgctcattattgcggctcaagattagcgactgccgaagcgccgatgcggaacatttccgggtcaggtttatcgaccatgattttgaccggaaaacgctgggcaacgcggacccagttaatagagcgagaaactttcggcaggccgcccagcaccaggccgccgtcatccggtagcacgccgtagccaatcgaatccactttaccctcgaaggttttgccgctgtcactcatcaggcgaatcgttgcgggtgtacctgagcgaatatttttcagatcggtttcgcggaagttggcgatcacgtaccagtgacgagtgtcgattagggtaaaaatagggcgcatggcagaagcaaattgcccgacggaggttttgagggaaatgacccggccatcaaacggcgcgcgaacggtcgccatttccagatgaagtttggtcagggcaatatccgcttcgaccgccgcacgttgcgccaccagcgcatcgacgccgctgacggcgctggcggctgactgcgcctgtaacaatacggcattaagatcggcttctgcggcgcgctgcgcagttcttgcacggtcaacgtcttccgctgagacaaaaccctctttcagtaatggctcggtgcggcgtaatgtatctgtggcctgtttcgcggcggcacgggctttttctaccgtggcattaatcgagtcggcaccaaactgttgcgcatcaacgctacgctgggtgagcataatttgcttatccagcgccgcgagggaggcttcagctttcgccagattggcttcgtacgggcgcgggtcaatgcggaacagcaaatcgccctgtttgactgcctggttgtcggtgaccgccagttctacaatgcgaccgctgacttccggcaccacatcaatggtatctgctgacgcgtaagcgtcattagttgatggcgcactgtctacgcgccagataacgaaaacaagggcaaccagcgccaacgcaaccactaacagagcagggaatttactgcgaggagcttttttcggcgtactttccatgagcgcgtctcaaatagattagaaaaatgccagccagaacagcatggcgtagagagcaaaaagggcggtataaataattccgacaaatgccagattgatatttgcccgctgaataactcgcctcgtgatgagcatcaaaataaggctggcaatggcgcagaaaaaccagctgggataataagcaccgatcaccgggattgccggagataatgagcatcccgaaaccatgaagacgggaattatccaggctgattttttgagttgcatcgccatgcgagagagaactgttggcatattaaatacatcctgtctgctgcgaacaatatctgtagtgaatatcaatatccattgaaggcgtcagtatggctattttctcgatgaataaaaatagctttattcagccaccgcattcataacttatatattttatttattaattggctgtatatatttttaaaataaatgcttttgggggcttcagcgcccccaaaagcgagtgacattaatttggggttacgatattcacccacaaatcgaaattatccagacaggcgataatttcttccagtttcgcgccattgccaataattttggctttcttcgcttttaccagatccgccattttggcttgcccggtcagcacggcgtgcagatcttcacggctgatgtagaaagaggcgtcagcttgggattgcagtgttttacggtagttaagcacgctatcgttcagcgtcaggttgaggttatcgccattgctcatattgaagttcaggctgatatttttacccgcggctttcgcgctatcgaggcgaacggacataaagtcgaacagcatttcgaccgacatcccgcgaatggtgtccggggaaccggtggtgccgtggctgaacttatgcaccccttcgcgcagctctttcgcgccggtcaggtagaaaccgcgccaggtggcggactcggcctgatagcccagctgttcaaagttattcgcttgcagattcttcgcgacctggtcacccgggttggcggcaatcacctgtttcagcagttctgccgaccagcggtaatcaccttgcttgttcgcttcttgcgccaggttgatgacacgggcagaaccgcccagcgcctgcacgtaacgtttacccatctccacctgaccatacggatgcaggttagccgggttaccgtcgtaatagccaagatagaagttatacaccgcgcgggcgttgtggctgacagaaccgtaatagccacggctggcccagttattggcaagtgcaggcggcagtttaatcatgtcgccgatttcattcatggtgtagccctggttcgccaggtgcagggtctggtcgtgaatgtacttgatagtatcgcgatatttaccaatataatcattgatatgcttattgccccagaccggccaggtgtgcggcataaacaggacttccgcgtcgttaccccacatatccagcgtttcgttcagatactcggtccacttgctggtgtcgcgggttttcgcgccgcgcagagtgtagaagttgtgcagggtatgcgtggcgttctcggcggtacacagcgctttcagggccggaatatagaagtgcatttcggctggtgcttcgctacctggggtcatcaggaagtcaaactccaggccgtcgataatcatcttctcaccggttttggtgatggttttgttcggtgcgatgatgctcgggtagcccgatgccagcgttacgccaagaccattgccgatgttaccctgagggttatgcgccagcagcaggccgtaggagtaaagtgcacggcggctcataatattacccgccagtacgttttcgctgatggcttcgtccataaagccagcaggggcgataacctgcactttaccggatttcacatcggcttcagagataatgcctttcacgccgccatagtggtcggtatggctgtgggtataaataaccgcaacaatcggtttttgcgggcgattttggaagtaaaggtcaagggcggcttttgcgctcggtggcgtcaccagcgggtcgatgacaataatcccggtatcaccttcgataaaggtgatgttggagatatcctgaccgcgaacctggtacattctgtcggtgactttaaacaagccggaaataccgtttaactgcgactgacgccacaggctagggttaacggtttcgggcgcgggcgcattgatatcaaatttataatcttccccgcgataatatggtttgccattagcatcgcgcagaataccttcatccagcagcggagcgataaatccacgctgagcgtcgtcaaaatcctgacgatcgctaaacggtaatgatttggcgtaattctgattaacctgttgggtatattgagtggcggctttcgcttcatctgttgcgtaagcggtatttaccatcatgccgctggcggcagttaacgcaataacaattctgctcaaacggaataaccgagagttattcatataaatctccatttatcatttatgtcgtaaatatgtaatccatgcaaaatacgtcatttaaagctggggttatcataattgggaatttgcgactttaataagtggaagtgtgagcggaacgatccattttattaggcatttgtgctgaagggggaaaattacgcgaatttattatctctgtaaataatatgaggtgttttatatatttattatatatattgtacttcggcaaatactgagcacaatttatcaatgcaaccggtgtttctttttaaaaaacgtaccggagcaatgggcggtcatgtcgctggcaccgcaggattctgcgttgctgtgccagccttttattcatggtcaatgagtgaggtgattgataaagacaccaggtcgtcagagcgcactgattatccgcattatgccagtgaagttgcactggcttttggttcacgagtggttggcctcgaactggcaaaaatgattgtggatgcgtggctgggcgcacagtacgaaggcggtcgtcatcaacaacgcgtggaggcgattacggcaatagagcagcggagaaattgagattcatccactacttgcatggatgagtaatgactaatgtggatagagtttctttttgaggttggctaatgaaacgctttccgctatttcttttattcaccctgctcacgctgtccaccgttccggcccaggctgatattatcgacgatactattggtaatattcagcaggcgattaatgacgcttataaccctgaccgtgggcgagactatgaagattcgcgcgacgacggctggcagcgtgaagtgagcgacgatcggcgcagacaatatgacgaccgccgccgccagtttgaagatcgccgcaggcagctggacgatcgccagcgccagcttgatcaggagcgtcggcaactggaggatgaagagcggagaatggaagatgagtatgggcgatgaggttgggtatggagcaggcatcgcccctcaccccaatggggagagggagaaaacgagcgcaatattcaatattgagcacaatcggtcccctcgcccctctggggagagggttagggtgagggggccagcgcgcacattccctctcatcacgccaccccaatctccatcccatcaaaccccacctcaaaccctgacggtagtgcgttttccatcagccacgcatcaaactggtggctgatatgggtcagaatcacctgtggcgagcggataacctgattcagcgcaagcacggtatttaaatcacagtgattacgcggtgcatccgcgcgcggcgggtgactgcaatcaatcaccatcacctgcggatgattattgagtaaaaatttcagcgttttttccggcaggccagcggtgtcagacagccacgccacccggctatgtgccgtttccagcagataaccgaaggtcagttttgagtggttaagcggcagcggcgtgacctgcaacccctgcaaatcaaacaccacaaacggttccactgtgtggctgaaatcaagcaggcccggatgtttaaacagatcgtcgcagccctgttcatccggcgggccgtagaccgggatcacatcgcccacgccccagcgtagcggaaatagcccttggacgtgatccatatggtagtgcgtcagcaaaaactgctggaacgatccaggcgaccagcgatcggtgagatcgtgccgcccggcgtcgatcagggtgatcgcgtcgttaaacttcactacgccgctgcatggctggcggcgatactgcggcgagcgccgcgctctggcgcaggccgcgcactcgcagccccatgccggaacgccctgtgcgccgccagtgccggtgagcgtgagggtcaggctcatgttacagcgccttggtgaagcggaagtggctctgctcgtagccttcacgcaggtaaaaacggtgtgcgtcgtggcgcttcacgttggtggaaagctcggtcatttcggccccggcctggcgggcttcttcttctgcccatgccagtaatttactgccgacgttcagaccgcgcgcctgcggcatcaccaccagttcctgaatttcgccgatccagttgacatgatgcagatgaaactgcaaatgcaggccgatcatgccgacaacttcgccatccagcagcgccagatggtagcgcatgtttgggtcgcgcaggttggcgttaaagcccacgcgaaacgcatggtggtcaaactccgcctgttttagctcacaaatcagcgcgtaaaccgcgtcggtatcgtactgcgtggccgggcgaagctcacaagcaggcatggtgtttctccttctgatggatcagcgtcagcagcgtgtcgaccgactggcgcaggctgccgtcattgttgagcgtatggcaatcctgtggagtatagcgggcggcgcgcgccaggcgggcgttaatttcactggcgttttcacggccacggttttccaggcgctggcgcaggatctccggcgaaacctgtaaacagacgggcagcagcgccgattgatagcgcgcccgtgcctgcggcaaatgcgcgcgtgaaccgttgacgactacgtcgaatccagcgtgcagccagaggtcaatctcgatgccgacgccataatacagaccgttagcgtgccagcttaaggccagcaggttttgccccgcgcgggtaaaaaactcccgctcactcagggcgatatggttttcacttccggcgctggcgtcgcgcgtgatgtagcgatgcgccaccagtaactgcgtttgttcccgcaggcggagttccgccagcaggctgtctttcccggagccggacggccccattaaccaaatcagttttcccatcatcagaacacccttttaccctgacgccagacgtggtcgatatgaatgtgattgccctggcgatgcgccagcaccaggtcagcgcgtttaccctcgccaatcaccccgcgatcctgaagattcagcgcctgcgccggatttttggtcaccagcctcaccgcctgcggtagcgtaaagcggttgctctcgtcatcggcgacgcggaacgccgcatccagcaggctggcggggtagtagtcggaagagaggatatccagcagaccaagctgcgccagttcactggccgccacattgccggagtgcgagccgccacgcacgatatttggcgcacccatcagcacgttcatgccatgcttacgcgaggcttccgccgcttcgaacgtggtgggaaattcggcgatcacgctgccaagttggtgggattcggcaacgtgggcgtgcgtggcgtcatcgtggctggcgagcgcaatttgtcgcgcgtggcacagggcggcgatggattcgcgattcggctgcgaccagcgtgcggcgagcgccaattgctcttcttcgtactgctgcatctgcgcatcggtgagggagtatttgccctgataatattcgcgatacttctcgcggttagcgaactggcgctggcccggtgagtggtccatcagcgacaccagcgtcaccggttcgcgctgaaccagtttttcaaacagcggcagtgtggtgtgatgcggcagttcgcagcgcaggtgcaggcggtgctcggcgcggttgacgccgcgtttttgcgtctcttcgatggcgttgatcatcttctccagattctccagccgatcgccgccgtcgcgcacgtcgccaatcgccacggcgtccagtacggtggtgatgccgcttgccaccatcagcgcgtcgtggctgctcatcgccgaatgggcgggccagtcgactttcgggcgcggggtgaagaatttatcgaggttgtcggtatgcagctcaatcaggccgggtagtagccagccaccttcgccgtccatcgcttctggcaggcggctctggctttcggcaaaggcgcggatttcgccatcctgcacctccagcgaaccgtgtaccacttcgttttccagcaccagtttgacgttattgataatcatgcagaggctcccattgggtgcaagcggtcggcgacgtcattacgtacggcttcgtcatggaagatgccgacgatggccgcgccacgggttttggcttcgcgaatcagctcgactacggcggcgctgtttttggcgtccagcgaggcggtaggttcgtcgagcagcagaatgggggtagtcgacgataaagccgcgggcgatgttgacgcgctgctgttcgccaccggaaaaggttgatggcgccaggtgccacaggcgttccggcacgttcaggcgggtgagcagacgcgcggctttagcggcgcaggcttcacgcggaacgccggtatcgagcagcggctgcatcaccacttccagtgctgaaatacgcgggatgacgcgcagaaactggctcacccagccgacggtggttttgcggatctccaccactttgcgcgctggcgcggtgaccagatcgacccattcgtcaccgtgtttgatctggatttgcccttcgtcgggcagatagttggcgtacagcgagcgcagcaaggttgatttgccgctgccggaatggccgtggagcaccacgcattcgcccgcgttgacggtgagcgaggcacgttgtaagacgggcaggcgcacgccgttttgctggtgcaggatgaaggttttactgacgttttgtacgttaatcatttttcgcctcgtggttcgcatattggggagcggtgcgcgcattgcccctcaccctaaccctctccccgaaggggcgaggggaccgattgtgcgcggtgttgaatattgcgccggttttctccctctccctccgggagagggccggggtgaggggatcagcgcgcacggtgttgcattcaattctgcaaaaccgatgacaccagcagttgtgtatacggatggtgcgggtcgtcgagcacgcggtcggttaacccactctccaccacttgcccctgcttcatcaccagcaaacggtccgccagcaggcgggcgacgcctaaatcgtgggtgacaatcactaccgcgaggttcagctccaccaccaggccgcgcagcaggtcgagcaggcgtgcctgtaccgacacatccagtccgccggtcggctcgtccataaacaccagcttcggatgcgtcaccaggttgcgggcgatctgcaaacgttgctgcatgccgccggaaaaggtggtcggcaggtcgtcgatccggttggcgggaatttccacctcttccagccacttctgcgcggtggcacgaatatcgccgtaatgacgtgccccggtcgccatcagccgctcgccgatattgccgcctgccgacacctggcggcgcaggccgtcgagcggatgctgatgcactacaccccattcggtgcgcagcaggcgacggcggtcggcctcgctcattgcgtacagcgaacggctctcatagtgaatctccccctgctgcggcgtcaggcgcgcggagattgatttcagcagcgtggtcttcccggagccggactccccgacaatgcccagcacttctcccggccataaatcaaaagagacatcgctaaagcctttgcccggcgcgtaaaggtgggtcaggttattgaccgaaagtaacggtttattcattggcttttcgcctcgctctgttggcggcaataatcggtatcggagcagacaaacatgcggtttccggcgtcatccagcaccacttcatcaagatagctgtgggtcgatccgcagatggcgcatggctcatcccactgctgaacggtgaacgggtgatcgtcgaaatcgagactttccacgcgggtaaacggcggcaccgcatagatgcgcttctcgcgccctgcgccgaacagctgcagggcgggcatcatgtccatttttgggttatcgaatttcgggatcggcgacgggtccattacgtagcgcccgttcaccttcaccggataggcgtaggtagtggcgatatgaccgaagcgggcgatatcttcatacagtttcacctgcatcacgccgtactcttccagcgcgtgcatggtgcgggtttccgtttcgcgcggctcgataaagcgcagcggttccgggattggcacctggaagataatgatctgatcttcggtcagcggcgtttcggggatgcggtgacgcgtctggataagcgtcgcatcgtccgtacgttcagtggtgtttaccccggtcacgcgcttaaagaagttgcgaatcgacacggcgttggtggtgtcatccgcaccctggtcaatcaccttcagcacgtcgctttcgccaatcacgctggcggtgagctgtatgccgccggttcccagccgtatggcatcggcatctcgcgcccgccaaacggcacctgataaccggggatcgccaccgcttttaagatagcgcggcggatcatgcgtttggtctgctcgtcgaggtaggcaaagttgtagccgctcagattagccatggttcttctcctgttgcagacgtttgagtagctccagttcggcctggaaatcgacgtagtgggggagtttgaggtgcgagacaaagcctgcggcttcgacgttgtcggcatgtgccagcacaaactcttcatcctgcgccgggcctgtcgcgtgctcgccgtattccggggcttgcaacgcacggtcaaccagcgccattgccatcgctttgcgctcgctcatgccgaataccagcccgtagccgcgcgtgaagtgcggcggctcatccggcgggtcgataaaaccgttgaccatttcacattcggtcatcagcagttcgccgacgttcaccgcaaatcccagctcttccggcacaatcgacacgtcgatgtaaccactgcggatctcgcccgcgaacgggtgattgcgcccgtaaccgcgttgggtggagtaggccagcgccagcaaatagccttcgtcgccgcgcatcaactgctgcaaacgggaagaacgtgagcaggggtaaaccggcggcgtgcgggtgatatcatccggctgtgcgccgctatcctcttcaaacttcgccagcccctgacgcgccagcaggctgaaaacgtgcggcgacggctgttgttcgctgtcggcggtggtcagcgtcggcgcttcaccgtttgccagcagggtgaaatcgagcaggcgatgggtgtagtcgtaggttgggccaagcagctggccgccgggaatgtctttataaaccgccgaaatacgccgttcgagacgcatctctgtggtgtcgagcggctcgcttaccgcgagcttcgccagcgtggtgcggtaggcgcgcagcaggaaaattgcttcgacgttatcgccgctggcctgtttcagcgccagcgccgccagttcgcggtcggcaatgccgccttcggtcatcacgcgatccaccgcaagattaagctgctgttcaatctgggcgacgctcagttcaggcaaatcggtatcgccccggcgtcggctctcttgcagggcgtgagcggcgtcgatcgcctcctcgccccctttcacggcaacgtacatcagcacacctccacatgagtggttcgcggaatagccagcaggcgctcgccgcaggtcaggatcaggtcgatgccgagcgggaacgggtgcgggcgctcggtgagttcgtgcagaatgcactccggcagctgcggagcgatcattcgttcttcggcaatgcccgcgccggtgagacgtaacatgcgcccgccgctcaggctggcgacctgtaaaatcagcgttgcacccgcttccggcgcaacggcggtgccggtggaaagggcgttaagctgttcgctggaaatcgcctcatccgtcaccgcgaaggtcgcctgttccggctggctgaccagcggcgcgttggtatgaaaacgcaggctctggctgacgatatcgttactcaatggcgcggcaagccacaccggcgtgtcgttatcggccagcgtcagcagcacgctggtggtggcgatattcagcggctgccagccgcgcttgagctgatgcagggcgacaatcacgcccggctcgctcatggcctttaacaggcgacgaaaactgtgctgggcatcctgcacgggaagcataaaagcggtttccagggtcatgcgttgtctccgcgaaccatcgtaaagaagtcgacccggctggcgttcacttcggcctggcgtgcggcaatgcgtgccatacggtcagcgtccagcggggcaataagggtttctgataagttttgaaaatagcgagattgctgcatcagcgcgtcaatcagcgcgcagcgttcggcgtgctgtttgtcgcgccccagcacccagctgtagccgagcgtgccgtcagtcaggcgtacggcggcgcgggtgagcgtggcgtcgccggcaaaaaagcgttcgccggtgccgcccatccgcgcctgaatctgcaccaggccggtttcggcggcgcggataacctcatagtcggcggtgatgttcagcgcgttcaggcgggctgccagttcagccggttggctgtgcgccagtacggacatccagtgctggcgggtcgcggtatctgcgtgcattcagtgctccatagtgaattcaatcatgtcggcgcgcgtcaggctgacggagtactccgccgggctgctttcaccgtcacggtggttaagggtgcgcacgcacagcagcggcgacatattcggaatttcaagacgctggcactctttggcctgggcgcgacgggcgctgatccgcgtctggctgcggcgcagcgcaattccggtttgctcgcgcagaaaatcgtgcagcgaaccgctgtcgaagcgttgcagcgtcggccaaagggtgaggtccgcaaagtagtggtcgattaaacagagcgcgacgccgttgacgcgacgcagggtgcgcaaatggataacgttctcgccctcggtaatccccagcgcgtcagcgacgtgaccggacgcggggcgcaataccgacagcagtttttcgctggtgggatggctaccctggtccagcaggttctggctaaaacgcgcctgggcgttgagcgggtaatcgaacgggcgcatcagcaccagcacgccgacgccctgacggcgctgtacccagcctttttccaccagttggtcgatggcgcggcgcagggtgtggcggttcacctcaaagcgcgccgccagttgctgctcggcgggaagatagtcgccgcagcggtagtgttgacgaagctcctgctcaagttttgcggctatctcctgatagcgtgttgggtagctggtcggatgtgtagacaagtgcatagatatcaatgcctcgcttatcagataaagtgcttacgcaaccgttgagagaggaaatccagcaggctgaccgtgacgatgataagcaccatcagggcgcaggtttgttggaactggaaaccgcgaatcgcttcccacagggtgacgccgatcccgcctgcaccgaccatgccgacgacggtcgccgagcggacgttggattcgaagcgatagagggagtaggagatcagcagcggcatcacctgcggcagcacgccgtagaggatctcttcgagcttgttggcgccggtggcgcgaatgccttccaccgggccgggttcaatcgcttccaccgcttcggaaagcagtttggagagcacgccggtggtgtggataaacagcgccagcacgccagcgaacgggccgaggccgacggcgaccacgaacagcatggcgaagaccatttcgttaatggcgcggcaggcgtccatcaggcggcgaacgggctggtaaacccaccacggcaccaggttttcggcgctcatcaggccgaaggggatggagagaaccaccgccagcgccgtgccccagacggcgatttgcagcgtgacggccatttcggtgaggtaatcctgccactggctgaaatcgggcgggaagaagtcggcggcgaacgtcgccatgttgccgccgtctttaatcagcgtgagcggggccatttccgcgccctgccacgagacgaccaacacggcgagaacaacggcccagctcagaagcgagaaccagctacgcttgggtggggcgatggtgatggtttgcatgtttggctccggtctgtaggccggataaggtgcttgcaccgcatccggcatcaacgcctgcacattgtcggatgcgacgccggggcgtcttatccgacctacgatttactgcaccgctttactcaccgaactcatcgcgcttaacgcgttgttcaggcggtccaggtcatccagctgcgcctgaatctcggtggtttttgccagcttgtcctgctcattcagtcctttattgcttttcacgccctgcatctctttaaacagcgcgagctggcgaatcggcaccagttgcaggtcgctggaagcgcggaacggcgcccagcccaggcgttccagcaccgctttttcttccggcgttttgccgtagttcataaagaagtcgtagatcttgtctttggtggtttcggaaaggtttttacgccagacgatcggatcgcctgggatcagcggcgacttccagatcaccttcagttctttcagcttctctggcgcggaggttttcagcttgtcgaggttttcggtgttgttggtggcaacatccacctgcttgttggcgacggccagcgcgttggtttcatgcccagcgttgacggtgcgcttaaagtcgctggcggagatattgtttttggcaaagacgtagtaaccggggacgaggaagccagaggtggagttaggatcgccattgccgaaggtgagatctttccgcttcgccagcagatcgttcaggttgttgatcggactatctttgttgacgatcaacacgctccagtaacctggcgatccatccgccgcgaccgtctgggcgaagacctggccgttggcgcgatccaccgcttccattgccgacaggttgccgtaccaggcgatatccactttattgaagcgcattccctggataatgcctgcgtagtctggggcaaagaaggcgttcaccttcacgcccagcttcttctccatatcctgtaagaatggcgtccattgcggtttaaggttttgctgtgattccgttgaaataatgccgaaattcagcgccttttcctgctcttcggcgtgtgccgggcttaacagggtgctgaggctgaacatgctggtgaaggccagcgaggcaattatcttagcgttcattcgttttcctcaatgatggggatgtcaggcagctttcgcgttctcttcgatgcgattaatgctgcggtagagatggtcaaaacgttcgttatcaaactgttggctgctgccgtcgtagaaaacgtgcccctggcgcagggcgacgatgcgttcgcagtagcgcagggcgtaatccacctgatgcagcgtgacgaccacggtgatgccgtcgttctgattgatgtcgcgcagggtgtccatcacgatgcgggcggattccgggtccagcgaggcgatgggttcatcggccagaatcaccttcgcctgctgcatcagcgcgcgggcaatcgccacacgctgctgctgtccgccggagagggtggaaacgcgctgatgggcaaaatgcaccatgccaacgcgggtcagcgcctgtaacgcgcgctgtttctgctcgccggtgaaccagctaaaacaggtgcgccagaacggcgtgctgccgagcgcgccaatcagcacgttctccagtacgctcaggcggttcaccaggttgaattgttggaagatgtagccggtgttggcgcggcttttgcggatatcgcgcgccagacggccttcgcgctggactgtgcggcccagcagctcgatatggctgccggcggatttatcgccggtaatcaaaccgcttaagtgacgtaaaagggtggatttgccggaacccgacggcccaagcagagccaccatttcaccgtgatgaatgttcagatcaaccgcatgcagcgcctgatgctgattgaaggttttggcgagcttctcgacacggataatcgtttgcatgatgcagcctccctaaaaaagtggctccatcgtggcggattattgtgacgatttggttaattaaaagtgactaacagatgaagagttaacgggaattcgatgacagtgcgggagggcgggcctcccggcggattattgcgttggttgttgtttgacgacattaatcatccacggtacgccaaatttatcggtgactttgccaaagccatgcgcccagaaagtttcctgccaggccatttcgatttttccgttagcggcaagattgtcaaaccagcgttttccttcttcgacctgttgcgaatcgagcaccagcgtaaagccggagtagctggcttttcctgacggcatggcatcgctcatcatgatgtcgcttccggcaatgcgcacgttggcatgagcgatggcggtatcgggaaattgcattccggaagggcagttctcggcgctgtcctgcgctgattttggcatttcgccgaagctgattttatagagcagttcagcgcccaacgtacgttgataataagcaattgcgtcggcacagttaccggcaaaagagaggtagggacttaacggcatgatggtgacctcagttaagagaagccagttaagtgtagttcgaaatttatacagatgagagggaagcctgataagacgcggtcagcgtcgcatcaggcagtcggcatcgttgccggatgcggcgcgagcgccttatccggcttaccgatcacaatacaatcagttctttttcacaaactcagatttcagtttcatcggaccaaaaccgtcgattttgcaatcgatgttatggtcgccttcaaccaggcggatgtttttcactttggtgccaattttcagcatcgaagagctacctttcaccttcagatctttaatgatggtaacgctgtcgccgtcagccagcagattgccgttagcatctttaacgatcagctcgtcgctttcctgtgcaggttctgcgtcgttccattcgtaggcacattccgggcagatgtacatgccgttatcttcgtaagtgtattcggagttgcattttgggcagtgtggtaatgacatgtggatttcctcaaaagtcagcagggcaaaagcgccaaaaaacggcagattgccgaaaaaggccgcaattatacacaaaatccctgagtttgtcgggggtactgctgattttagacgacgatcgttttcatttgaaaggaaacgcaaaaagaaaataatctttttgcctctatttattatttaagataatgttaatgctctacttgttcttttttttattcacatgatatttttatctttctgacgttttaaacgtatcagaagacgttatttattctgataaaaaacaacacactaaatataaaattatttcttgcagtaattataaaagccgaaaacagaactcaaaaacaatctggctaaataaaagtaacaaaatttgctttaaggaagaattttctatgtacacacagaccctgtatgagttaagtcaggaggctgaacgcctgttacagctttctcgccaacagttgcagttactggaaaaatgcctctctctgtacccggagacgacgcgccacaactggctttaccctggagtcagcctaatatcgccgaacgtcacgcgatgctgaataatgagttgcgtaaaatttcccgactggaaatggtgctggcaattgtcggtaccatgaaagcagggaaatcaaccaccattaatgccattgttggtacggaggttctgcctaatcgtaatcgcccaatgactgcgctgccgacgcttattcgccatacgcccgggcaaaaggaaccggtactgcatttttcacatgtcgcgccaatcgattgtttaattcaacaattacaacagcgcctgcgtgattgcgatattaagcatctgaccgatgtgctggaaatagataaagatatgcgtgcgcttatgcagcggatcgaaaatggcgtcgctttcgaaaaatattatctgggtgcccagcctatttttcattgtctgaaaagtttgaatgatttagtgcgactggcgaaggcgctggacgtcgattttcctttttctgcttacgccgccattgagcatattcccgtgattgaagtggagtttgtccatctggcggggctggagagttatcccggtcagttgacgttactggatacccccgggccaaatgaagccgggcaaccgcatctgcaaaaaatgcttaaccagcagctggcacgcgcctcggcggtactggcggtgctggattatacgcaactgaaatcgatctccgatgaagaggtccgtgaggcgattttggcggtggggcaatcggtgccgctgtatgtgctggtcaataagttcgatcaacaggatcgtaacagtgacgacgccgaccaggtgcgggcactgatttccgggacgctgatgaaaggctgtattacgccacagcagatatttccggtgtcgtcgatgtggggctacctggcgaatcgggcgcgccatgagttagccaacaacggtaagttaccagcgccagagcaacaacgctgggtggaagattttgcccatgccgcgctcggcaggcgctggcgtcatgccgatctggcggacctcgaacatattcgtcatgctgccgatcagttgtgggaagattcgctgttcgcccagccaattcaggcgttgcttcatgccgcttacgctaacgcctcgttgtatgctttgcgatctgctgcgcataaactgttgaattacgcgcagcaggcgcgggaatacctggattttcgtgcgcacgggttaaacgtcgcttgtgaacaattgcggcaaaatatccatcaggtcgaagaaagtttgcagctattgcaactcaatcaggcgcaggtgagcggcgaggttaaacatgaaatcgagctggccctgacctccgccaaccactttctgcgtcaacagcaagatgcgctgaatgcgcagttagccgccttgtttcaggatgattcggagccgttaagcgagattcgtacctgctgtgagacactgttacagacggcgcagaacaccatcagtcgcgactttacgctgcgttttgccgagcttgaatccaccctttgccgggtgttaaccgatgttattcggcccattgagcaacaagtcaaaatggaattgagcgagtcagggtttcgtcctgggtttcattttcctgtttttcacggcgtagttccccacttcaacactcgccagctgttcagtgaagtcatttcgcgccaggaagcaacggacgagcagagcacgcgtttaggcgttgtgcgtgagactttttcgcgctggttgaatcagcccgactggggacggggaaatgagaaatccccgacagaaacggttgattacagtgtgttgcaacgagctttaagcgcagaagtcgatctttattgccaacaaatggctaaagttctggcagagcaggtcgatgaatctgttacggcaggcatgaatacttttttcgctgagttcgcttcatgtttgacggaattacagacgcgtttacgcgaaagtctggctctgcgtcaacaaaatgaatcggtggtcaggctgatgcagcagcaattgcagcagactgtgatgactcacggctggatttacaccgacgcccagctgttacgcgatgatattcaaacacttttcacggcagaacgatattgaccaagacgttacttgacggccccggtcgcgtgctggagtcggtttatccccgctttttagtggatctggcgcagggcgatgatgcccgccttccacaagcccatcagcagcagtttcgtgaacgactgatgcaggaacttcttgcgcgcgtgcagcttcagacatggacgaacggcggcatgttaaatgcgccgcttagcctgcgtctgacattggtggaaaaactggcgtcgatgctggatcccggtcatctggcactgacgcagatcgcgcagcatctggcgctgctgcaaaaaatggatcaccgccagcactctgctttcccggagctcccccagcaaattgccgccttgtatgagtggttttcagcccgttgtcgctggaaggaaaaggcattaacgcaacgaggcctactggtgcaggcgggtgaacagagcgagcaaatttttacccgctggcgtgctggggcgtataacgcctggtcgttgcctgggcgctgttttatcgttctcgaagagttgcgttggggggcatttggcgatgcctgtcgtctgggaagcccgcaagcggtggcgttgttgctgggtgatttgcgcgtgaaagcgacacaacatctggcagagagtatcaatgcggccccgaccacgcgtcactattaccatcagtggtttgcctcttcgaccgttccgacgggcggggatcatgctgattttttaagttggctgggaaagtggaccacggcagataaacaacccgtttgctggtcagtgacccaacgctggcaaactgtcgcgctggggatgccacgactctgttcagcgcagcgtctggcgggggcaatggtcgaggaaatcttctctgtaaatttggcgtaaataatcagttacatcaatgagtcctaaacgaaatccatgtgtgaagttgatcacaaatttaaacactggtagggtaaaaaggtcattaactgcccaattcaggcgtcaactggtttgattgtacattccttaaccggagggtgtaagcaaacccgctacgcttgttacagagattgcatcctgcaattcccgctccccttttgcggccgtcgcgctgatttttctggcgtttgcggaaatgggccaactctgcgaggaaagctatgctgaaaaggaaaaaagtaaaaccgattacccttcgtgatgtcaccattattgatgacggtaaactgcgtaaagccattaccgcagcatcactgggtaatgcaatggaatggtttgattttggtgtttatggttttgttgcttacgcattaggtaaagtttttttcccgggggctgaccccagcgtgcagatggttgctgcacttgccacgttctccgttccctttctgattcgaccgcttggcggactcttctttggtatgttgggcgataaatatggtcgccagaagatcctcgctatcactattgtgattatgtcgatcagtacgttctgtattggcttaataccgtcctacgacacgattggtatttgggcaccgattctgctgttgatctgtaagatggcacaaggtttctcggtcggcggtgaatataccggggcgtcgatatttgttgcggaatactcccctgaccgtaaacgtggctttatgggcagctggctggactttggttctattgccgggtttgtgctgggtgctggcgtagtggtgttaatttcgaccattgtcggcgaagcgaacttcctcgactggggctggcgtattccgttctttattgctctgccgttagggattatcgggctttacctgcgccatgcgctggaagaaactccggcgttccagcagcatgtcgataaactggaacagggcgaccgcgaaggtttgcaggatggcccgaaagtctcgtttaaagagattgccaccaaacactggcgcagcctgttgacatgtattggtctggtaattgccaccaacgtgacttactacatgttgctgacctatatgccgagttatttgtcgcataacctgcattactccgaagaccacggggtgctgattattatcgccattatgatcggtatgctgtttgtccagccggtgatgggcttgctgagtgaccgttttggccgtcgtccgtttgtgctacttggtagtgttgccctgtttgtgttggcgatcccggcgtttattctgattaacagtaacgtcatcggcctgatttttgccgggttactgatgctggcggtgatccttaactgctttacgggcgttatggcttctaccttgccagcgatgttcccgacgcatatccgttacagcgcgctggcggcggcatttaatatttcggtgctggttgccggtctgacgccaacactggcggcctggctggtcgaaagctcgcagaatctgatgatgcctgcctattacctgatggtagtggcggtgattggtttaatcaccggcgtaaccatgaaagagacggcaaatcgtccgttgaaaggtgcgacaccggcggcgtcagatatacaggaagcgaaggaaattctcgtcgagcattacgataatatcgagcagaaaatcgataatattgaccacgagattgccgatttgcaggcgaaacgtacccgcctggtgcagcaacatccgcgaattgatgaataagctgaaacggatggcctgatgtgacgctgtcttatcaggccaattgaactcttaaggttcacttaatctctgacgcgcatactctcctccaggttaacggaggagagtgcaatgaaaaaccgtgtttatgaaagtttaactaccgtgttcagcgtgctggtggtcagcagctttctttatatctggtttgccacgttctgatctttcttcagccgtacccaggcccgcgtgccggaagtctcttgccggttttgcaggaaaaactgcccgtgatgcaactgtgtaatgcggctgacaatacttaaccccagaccaatcccgccataacggctgtccatacgtacaaacgctttactcaactccccgcatttactctcatcaatacctggtccttcatcttcaactgccatgaccgctccgccatcttcttgcagcttaatcataatgttgctgccttgcgggctgtaacgatgggcgttttctaccaggtttcgcaataacatccgcagcagggttgcatcaccctgaacggtgatgtcggcggcgctctctggcaatagcagggtttgctgtcgctggtcgagcatggtactgagttcgtcatacgaggggagaatgacatcttccagcagttttacatgttgataattaccggaagaaaatgactgtccggcacgcgccagttgcagcagctgggagacgctctccatcatctgatcaagccgtgccactaacggtgctacatcaatgtgatgcgttttcgccagcagttccagatgcaaacgcaccccagccagtggcgttcgcagttcgtgcgcgacgtcagcggtaaacaacctttcgttatccagcgtgctggtcaggcgactgaccagatcgttcaacgccgaaaccaccgcttcgatttcgagggtggcgctgtgaatggcaatgggcgttaagttgtcggcggtgcgcgcttccagctctttttgcagctccgccagcgggcgggtgatgcggcgtaccgcctgatagcagataaatagcgtcaggctgaccataaacacgccggggacaatcaggctggcgaccgcctcgcggatctcacgcatgatgtggcgatcgttgttgcgattgtcgcgtagcgcctgctcaaacagctgaatctgctcggtactttcatgccatagccagaagacgctgatcagctcaaacaccaacaaaatggccccgatggtcaatatcagccgttggcgcagcgatattggtcggcgcagaaaatgcatcagattcaattagttttcctcattcgcgaccagcatatagccaaagccgcgcacggtgcggatacgggctttgcccactttgtcgcgcagattgtggatatgcacttccagggtgttggtcgagggttcattgtcccagttatagatgtcgttgtagagaatttcccgatgcaccggactgcctgctttgagcattaaccgtgacagcagagcatattctttgggcgtcagaatcaactcttcaccgcccatccatacctgacggcgacccatattcagcgtcagattgccaacaatcagctcactttcgccctgattattatggcgtcgtagcagggcgcggatacgggcgtgtaactcttccagcgcaaaaggcttcaccagatagtcatcggcaccgacatccagcccggcgattttgtcggtcagcgtatcgcgagcggtgaggatcagtaccggcagggtatattttttctgccggatacgggcgagaaaatgcagtccatcttcgtcgggtaaccctaaatccagtaccaccaggctgtaatgaccggcctcaaggctttgttccgccatccgcgcggttgtcacgccatcgcacgcgtagccttcagtttgcgccgccagaatcaatccctgcaataacagcgtatcgtcttcaacaatcagaattttcattcactcactctcctgcaagtttgcagaatatcatccgcagcctggtaatacttcgtctcaacgccagttaatcccaatagcgtggagaataaattgtcttgtgaatagtgttgcgtttgcgcctgtttttgcaggcagttctggtcaacctgataccgtttttgataatcctccgacagccacagcagcatcggcacctgtttttggctatccggggcgatggcataaggcagaccgtgcagatagatgccattttcacctaacgattcaccgtggtcagaaagataaaccaggctggtggtaaatttatcctgatgttctttcagcagattaatcgctttatcaacaatatagtcgacgtaaaccagcgtgttgtcgtaagtgttcaccagttgctctttgctacaggtctggatctcattggtgtcgcaggttggggtaaatttcctgaactgcggcggatagcggttgtaataggtcggaccgtggctgccgatggtgtgtaagacaatcacgccatcaccctgcaggttattgatgtactcttccagcccgtggaacagtacttcgtcatagcattcgccgttgatgcactgaccaggcagattcagcgcggtgacgttctggtgaggcacgcggtcgcaggcacctttacagccgccatcgttgtcattccacagcacgttgatgcccgctcgctgaatgatatccagcacgccttcctggtgctgtgccagctcttctttgtaatgctcacgcggcatatccgagaacatgcacggtactgaaactgccgttgccgtgccgcaagatgcggtattagggaaatagaccacgttatctttcgccagccgcgggttagtttcacgcgggtagccgttgagggagaagttctccgcccgcgaggtttcgccgacaatcaggatggtcaaatttttacgtttttcgttctgcattaacgggttgcggtgggcgtcttcaccaattcgcaccagcggtagatttgccagtcgctgatgggagtaccatgaccagctggcaacaatgctgttagaggggcttaaggatttcaccagctctttgttattgcggaacaacgaggcgtagtctttataaaacagtgcggcgaccagcaaaatcagtagtacagaaaccagaatattggctccacggaaaagaacactgcgcagacgcgaggtggcaggtttgatttttatccagcaggcaatcagcgcagcaagcacgccgctgaatcccagcgttaataacatttgcggtgtcatcagcgcataactttctgccggagtggtatcaataatattggcaatcatcgagcggtcgatgacgatgccgtaagtcattatgaaatattgtgcagccgcgccaaccagaataaacaggcaggccagtggtcgattaagccataagaaagagcttagtgtcaggacaatattaatcacgctgaaagcgacgaccggcatcgacaagaaaaccagtacgttatgcagcgaatccagcggcagcgcctgcaacacctgtttaaaaaaggcaatattcaggcagatagagatataaaaagcggccaacaatagccaggcgagtaaattcaaagagggtctttttagtaggcgcttcaacatcacggtgtttccatcgaacaaagtgcgcatatgctcgcaaagcaaaattaagccaaccttaagttcttaaggttggcttttatgtttgctggattaaggggaattaatctttgcttattggtgcatctaagggatacgggtttttatgtagccggttgtaattcagcgcatacatggcggtgatgaccatcagggtgacaaatgaccacataacctctttcgctccggaccccaccacggcccagatgcagtagaggaaggcaatggtagtaactgccagatatgccgggcgtgctttaccaaagtgaccgtgtccgagcagcagtaacgccgcacaggtgtaaagatatggcaccagtgtaaagatgaccgagacggaagaaaccagaccgaactctttggtcgcgtttggtgaaatgctgctgagctggaagatggtcatcaaaataccgacgataatcagccccgccactggcgtacccgctttatttacacgggcaaaaattggtgggaacagtccgtcatcggcagcggctttcgccgtttgacccgccagcaacgtccagccgcccagtgaacctaagcaacccgcagctgcgcagaaggaaacaatggccccggcggtgtcacccaacgccatccgtgcggcatcaccgaatggcgaagcagaaacgcgcagtgcggcattagggatcatccccataatcgcggtggtagaaagtacatagcaaacggcggcaatcaataccccaccaatggtggcgatagggacattgcgtttcgggtttttcaccacacctgcggcaacggaggcactttccacaccgatgaacgaccacagcgtaacgttaagggtactttgaattgcaccgaaggtgcccaggccgctgacgttccatgccgccatataggtttcaccacggaaccagaaccagccaaatacggcaatcccgacgatggggatcagcgccagcacggtggcaactgcctgcacacgggtgatcattttcggaccgacaatgttcagcaggacgaagatccacagcaccacgacgcaggtgatggttaataccaatggatctttcagaatcgggaagaagtaacttaaatatcctacgccaatgaccaccatggcgatattgccgatccagcaggccagccagtagaggacgttggtttgataaccgagaaacgggccaaagcagcggcgggcgtaagcgtaagaaccaccagggcttgggtcgaggaacgacattttggcgtataccatcgagagccccagtgcaccgataatcgtcaccaaccatccataaatggcaatcccgccagtagaggccaggtttgcaggtaacagaaaaacacctgaccccataatattccccgacaccatcagggtgacggggattaagcccactttgtgagcatcagcatccgaagacataattaaactcctgcgaaggcgagcttcgtgacaataaattacgtcatatcatacgcctgcattcgatagttgaattattatcgaccgggttatcgctgatgccgttattaatatagctcttcgttaaggttaaaaatcaggcgacagtgcgttctctgtgctgactaacataatgcagcggcgtcataccgtagaagtctttaaagacagaaataaagtacgacgtactgttgtagccgcaggactgtgatacctgagagatatttttaccgtccatcattaattcatttacggcataacgcatgcggcaggtggtgattatttggctataactggtgttttcgcttttcaactttttctttaacagacttgggctaagacataaacaactggctaccatactaagattccagtctttgtgaatatcgctttcaataatttgataaacgctgtcacttacacaattacgtaacatatacatcattaatgaaaggaattttttactgtcgagaaaacgggatagcaccgtgaataataatgcgcgtgttcgttccttttctgactcagtttctgcgggcatcatgctgtgttgcgcggcaacgcgaaagacgtctggcgtcaggcatggcagggtgagtatgggcgtagcgctacgttgccatactggtatttgcgagagatctttattcagaaaccggaggtaatctttgatgatgtcgtgactaatatgagcaaccaaagtgttgttaagagaggagacgtcgataatattattttcacaatttaataacgccatatggttagctttaaggctaataggttctttcccattcacccttatccagacatctttttcagtcaataaaacaatacaaggttggtcgctgcaaatcctcatacatgtactcctgagtgcaaataaaagaccagttctcgctaaagcaaagcgataccgggaaatggttatataattgtatgatgaatataaacatgcataaaaataacgagttttactaatattacaaatttttatagtaatttctcatgtacatatttttttacaggataaataacaggcaaaaaaaagcgcggggtggggccgcgcaaaaagtatgacatttttgtttgcagcaatttttatgaaaacgttgccatactcaaaaggcctaaggccaggcggcgtaatgttatttaaacaattacgccttcagcggaatagtggttacgctttcacgcacataacgtggtaaataccgtcaataatttcagtcccttcagtttcgtgttcaaatccagggaaatggtggtcccaggattgcagcgagcgtaaataacttacttgcggactgtttttatcgccgaagttttcaccagacagcagcatcgggattcctggcggatacgggataactgagtttgccgcgatgcgtcctggcagattttcaatggataccagttcgacattgttgtcgacaatcgcgttgtacgcttcacgcggggtgatttccgccatcggcaggccggaataggcttcgttcaaccgtgcgccagggttgttttctttcagccaggcaaacatggtgtcacccagatcgtgaatccccatgttcgcgtaagtgtcaggatattgttcaacaagttccggcatcacctgcgccagcggtgtgttggcgtcatagtggcgtttgaaggagcaaagggtgttaaccagagtcccccatttcccacgggttacgcccatagagaacaggaacataatttggaagtcagtggtgcgggtaggcacaatgccgtggcgaccaagccaggcagtgaccagcgccgccggaacaccggtttcttccagttcaccatcttcacccattcccggagcaaggatgctgactttaatcgggtcgagcatactccagttatccggaatatctttgaagccgtgccagctttcgcccggatgcattacccagcagtcctgaacggtggtcagcagtttggttggtgcgtcagcaaagtcataggttttgccggtttgtgggtcggtgacgacttctttgttccacggtttgaagaaccagctaccgtcagcggtgaactctttatacagccgcgccatcgcctgacggaaatcaaccgcttcgtcgatcacttcctgcgtcagtgacaggccgctgttgccgtccatcatcgacaccgccacgtcgttggatgcgcagatggcatacagcggggaggtggtggcatgcatcatgtaggcctggttaaagcgggagaagttaatcgccccacgaccttcacgtacatgaatataagaagcctgtgaaagcgcattcagcagtttgtgggtggagtgggtggcgaaaacggtaggaccgttgtgatcgccaggttcgccgcgcatggcatagtgatcggcatagatcgggttgaaacgtgcatagccgtaccaggcttcgtcaaagtgcagacgatcggaggttttttccagcagatcctgcgcttctttagcgttataacacacgccgtcataggtgcagttggtcaccacgcagtaagacggtttttgcccagctttgtctttagtcagcgggctttcactgattttcttctgcaaggtttcaggttgcatttcctgcggatagattggcccgataatgccgtagcggttgcggcttggcaccatgtagactggtttcgcgcctgtcagcatcaagccttgttcgatggatttatggcaattacggtcaacgaccacgacatcgttatcggtcatgcaagcctgcatgatggtgcggttagagccggaagtaccgacgactaccgaccaggagcgatcggcaccaaatacgcgtgcggcatatttttcgctttcgccaaatgcgccagtatggtcaagcaaagaaccgagggaagttcgttcgatgcccatatcggtgcggaacagattttctccatagtagtcatggtagaaacgtccggcgggtgttttggtaaaaccaacgccgccctggtggcctggcgctgcccaggaatattcatggatgtcgctatatttcatcagcgcgctgaacagtggcggcaacagctgctggcggtagcgggtcatcgcggcaacagcgcgtccggcgataaagtcggcggtatcttccagaatccaggcgaattcatcgacaagctccagcaggtcgcgatccattgcggcgagggctttttcccgatcgcccaacaggaagaccggcacgttttgttggcgctcatgaagcttaccgatcaattgtctgacgttttgatgttcgtccggatgttccatttgataactgaacatcaggcagtcaatggcttcgtttgaagagagaatggcaaaaccatcatcaaaggaggtggatttaatcacggtaacattttgctggcttaaagcatctgccagacgctcaacggcgttaccgacccaggtgtcttgatggagaaactcgctttcaacaattaatactttcatcattgcttacccggttatgaaggaatcttcgttgcgggcaagtatcttccggccttttcgggctgtaaagcgcgtgaaaaacaaacatttttgaaatatttatttttataaacaatgcgttatgtgattattttaaattattttcactgcttattatcgacggctaaactatttttttggctgatactgatatcgtctttagccgggaaacgtctggcggcgctgttggctaagtttgcggtattgttgcggcgacatgccgacatatttgccgaacgtgctgtaaaaacgactacttgaacgaaagcctgccgtcagggcaatatcgagaatacttttatcggtatcgctcagtaacgcgcgaacgtggttgatgcgcatcgcggtaatgtactgtttcatcgtcaattgcatgacccgctggaatatccccattgcatagttggcgttaagtttgacgtgctcagccacatcgttgatggtcagcgcctgatcatagttttcggcaataaagcccagcatctggctaacataaaattgcgcatggcgcgagacgctgtttttgtgtgtgcgcgaggttttattgaccagaatcggttcccagccagagaggctaaatcgcttgagcatcaggccaatttcatcaatggcgagctggcgaatttgctcgttcggactgtttaattcctgctgccagcggcgcacttcaaacgcgctaagttgctgtgtggccagtgatttgatcaccatgccgtgagtgacgtggttaatcaggtctttatccagcggccaggagagaaacagatgcatcggcagattaaaaatcgccatgctctgacaggttccggtatctgttagttggtgcggtgtacaggcccagaacagcgtgatatgaccctgattgatattcactttttcattgttgatcaggtattccacatcgccatcgaaaggcacattcacttcgacctgaccatgccagtggctggtgggcatgatatgcggtgcgcgaaactcaatctccatccgctggtattccgaatacagcgacagcgggctgcgggtctgtttttcgtcgctgctgcacataaacgtatctgtattcatggatggctctctttcctggaatatcagaattatggcaggagtgagggaggatgactgcgagtgggagcacggttttcaccctcttcccagagaggcgaggggagagtccgagcatcatgaggccgaaaactctgcttttcaggtaacttattaccataaactcagatttactgctgcttcacgcaggatctgagtttatgggaatgctcaacctggaagccggaggttttctgcagattcgcctgccatgatgaagttattcaagcaagccaggagatctgcatgatgactgcacccaaaattacatttatcggcgctggttcgacgattttcgttaaaaatattcttggtgatgtgttccatcgcgaggcgctgaaaacggcgcatattgccctgatggacattgatcctacccgcctggaagagtcgcatattgtggtgcgtaagcttatggattcagcaggggccagcggcaaaatcacctgccacacccaacagaaagaagccttacaggatgccgattttgtcgtggtggcatttcagattggcggttatgaaccttgcacggtgactgatttcgaggtctgtaagcggcatggtctggaacaaaccattgccgatacgttggggccgggcggtattatgcgcgcgctacgtaccattccgcatctgtggcaaatttgcgaggacatgacggaagtctgccccgatgccaccatgctcaactatgttaacccaatggcgatgaatacctgggcgatgtatgcccgctatccgcatatcaaacaggtcgggctgtgccattcggtgcagggaacggcggaagagctggcgcgtgacctcaatatcgacccagctacgctgcgttaccgttgcgcaggtatcaaccatatggcgttttacctggagctggagcgcaaaaccgccgacggcagttatgtgaatctctacccggaactgctggcggcttatgaagcagggcaggcaccgaagccgaatattcatggcaatactcgctgccagaatattgtgcgctatgaaatgttcaaaaagctgggctacttcgtcacggaatcgtcagaacattttgctgagtacacaccgtggtttattaagccaggtcgtgaggatttgattgagcgttataaagtaccgctggatgagtacccgaaacgctgcgtcgagcagctggcgaactggcataaagagctggaggagtataaaaacgcctcccggattgatattaaaccgtcacgggaatatgccagcacaatcatgaacgctatctggactggcgagccgagtgtgatttacggcaacgtccgtaacgatggtttgattgataacctgccacaaggatgttgcgtggaagtagcctgtctggttgatgctaatggcattcagccgaccaaagtcggtacgctaccttcgcatctggccgccctgatgcaaaccaacatcaacgtacagacgctgctgaccgaagccattcttacggaaaatcgcgaccgtgtttaccacgccgcgatgatggacccgcatactgccgccgtgctgggcattgatgaaatatatgctcttgttgacgacctgattgccgcccacggcgactggctgccaggctggttgcaccgttaaaacgcgactaaacgctactgcgccgggggatttattccggcgcacacctctgacgataccaataacagaaggcgggcgttggtaacagcgacccgataccctatgagcatttcaatgactacaaaactcagttatggatttggagcgttcgggaaggattttgcgatcggcattgtgtatatgtacctcatgtattactacaccgatgtcgtcgggctgtctgtgggtttggtcggtactttgtttctggtggcgaggatctgggatgctattaacgatccgattatgggatggattgtaaatgctacgcgatcgcgatggggtaagttcaaaccctggatcctgatcggtacgttggcaaactctgtaatcttatttctcctctttagtgcgcatctgtttgaaggtactactcagattgtctttgtttgcgtgatctacatcctctggggcatgacttacaccattatggatattcccttctggtcgctggttccaaccatcacgctcgataaacgtgagcgcgaacaactggttccttatccgcgttttttgccagtctggcaggctttgttacggcaggtgtgacgctaccatttgttaattatgtcggcggtggcgatcggggatttggctttcagatgttcactctggtactgatcgccttttttattgtttcaaccatcatcactctgcgcaatgtgcatgaagtcttttcgtcagacaatcaaccgtctgctgaaggaagccatctgacacttaaagccatcgttgcgctaatttataaaaacgatcagctttcatgcctcttgggtatggctcttgcttataatgtagccagcaacattattaccggatttgctatctattatttctcatatgttatcggtgatgcggatttgttcccctattatctgtcgtatgcgggagctgctaacctggtgacgttagtattcttcccacgcttagttaaatcattatcccgacgcattttatgggccggagcatctattcttccggtgttaagctgtggtgttctcctgttaatggcattaatgagctatcacaacgtcgtcctcattgtgattgcgggtattttgctgaatgtgggaacggcgcttttctgggtattacaggtcatcatggtggcagataccgttgattacggtgaatataaactgcacgtacgctgtgaaagtatcgcttactccgtgcagactatggtggtgaagggcggttcagcctttgcggcttttttcattgcggttgtgttagggatgattggctatgtaccgaatgttgaacagtctacgcaagccctattaggtatgcagtttattatgattgctctaccaactctgtttttcatggtaacgctgattctctacttccgtttctatcgcctcaatggtgacacgctgcgcaggatccagatccatctgctggataaatatcgcaaagtaccgcccgagcctgttcatgctgatattccggtcggtgcagtgagtgatgtgaaagcctgacgtggacaatagctaacgaaaatggcctgatgcgatatgtttatcaggccacgtcttaatgtaatgctttggatttgcaaattttgtagaccggataaggaattcacgccgcatccggcatcaacaaagcgcaagttgttatccggttatcaagccaaagcgccgtagctggcggcaatgaaagcgagcgaggaatatcaccgtcgttaatgcgccaagcagcgcgcagaacatatcggattgcgtgtcccactggtcgccctgggtgccgagaaaatcatccgctccctgacccattgccagcgctgcccaccactcgattaattcatacatcgcgcttatcgccagcgccacgcagcagaccaggaacgccaccattttacgtccgcgcacgtacatcccgcgaacgagaatttctcgtgccaccagtgcaggcaccagcccctggaaaaagtgccccagcttgtcatacggattacgactcaaccccagccattcctgcacctcaaaaccaacggggactttcgcgtaggtgtattgcccgccgaccatcaggatgatggcgtgaaagaaaatgagcgtatagagcagcggcgttaacggataacgtctggcggtggcaagcagtagcggcacgacaataatcaccggtgtcacttccatcagccaggtgagtttgtcatgggccgaaatgccggtataaatcaggattaacgttagcgccagtgcgccggtgttaagaattaacggcttgagtgtgcgggtcatggtgagttcgcaagtcagggaaaatactgactattcaccagcaagcgtgaaattacaatcgcaaaagaggtggcccagggggatcacctggcagcatgctgccaggcgctgggccgaagaggttacttagtgcagttcgcgcactgtttgttgacgatctgctggaagaagtcgttacctttgtcatcgaccaggataaacgccgggaaatcttctacttcgattttccagatagcttccatacccagctccggataagcgacgcattccagatgcttgatgctctgctgcgccagtaccgccgccggaccgccgatgctaccgaggtagaagccgccgtgtttatgacacgcgtcggtaacctgctgactgcggttacctttcgctagcatgatcatgctgccgccgtgggattgcagcagatccacgtaggagtccatacgacctgcggtggttgggccaagtgaacctgatggataaccggcaggggttttcgccggacccgcgtagtagatcgggtgatctttgatgtactgcggaagttctttaccggcgtcaatcagctctttcagcttggcgtgtgcaatatctcggcccacgataatggtgccggtgagcgacaaacgagtggataccgggtattgcgaaagctgggcgaggatctctttcatcgggcggttaaggtcaactttcaccgcttcgccttcaccggcctggcgcagttcttgtggaatgtactggcctgggttgtgttccagtttttcgatccagataccttcgcggttgattttcgctttaatgttacggtcagcggagcaggagacgcccatgccgaccgggcaggatgcgccgtgacgtggcagacggataacgcgaatgtcgtgcgcgaagtatttaccgccaaactgcgcgccaagaccgagtttctgggcctcttccagcagttcctgttccagctggacatcgcggaacgcctgaccatgttcgttcccttccgtcggcagttcatcgtaatagtgagcgcttgctaacttgacggttttcaggttggtttccgcagacgtaccgccaatcacaaacgcgatatggtacggcgggcaggctgcagtaccgagggtacgcattttctcgacgaggaagtttttcagtttgccgggagtcagcagggctttggtttcctggtagagatacgttttgttggcagagccgccgcctttcgcaacgcaaaggaatttgtactcatcgccatctaccgcgtacaggtcgatttgcgcaggcaggttagtgccggtgttgacctctttgtacatgtccagcgccgcattctgtgaatagcgcaggttatcttcgatataggtgttatagacgcctttcgacagcgcttcttcatcaccgccaccggtccacacgcgctggccttttttaccgacgatgatcgcggtgccggtatcctggcaggtcggcagcacgcctttggcggcgatttcggagtttcttaagaattgcagcgccacgtacttgtcgttttcgctggcttctggatcgtgaagaatagccgcaacctgtttctggtgtgccgggcggagcataaaagaagcgtcgtgaaaggcttgctgcgccagcagggtcagggcttctggttccactttcaggatggtttcgccgtcgaagtcggcaacgctaacgtaatcggaagtgagtagatagtattcggtattgtctttccccatcgggaaaggtgcctggtagataaagggtttgtttgacatagcttccagcctgtaactctgtatttgttattcgaaaatggcgtgccgcgtagtcacgggcggcacgcaaagtgcatttataagaacccgtacatcgcggcgaagatccagccgaagacgcacgatacgctcacaccaatcaaccccggcagaataaagctgtggttgatgacgaagcgaccgatgtgggtggtgccggaacggtcaaactgaatcgctgccagatcgctcggataagtcggcaggatgtaataaccgtagcaagccggtgctgaagccacgatgtatgccggatcaacgccgatcgccagcgcgaccggaacaatcgccgccagcgccgcagcctgagagtttacaaacttggaaaccagcagcagaacaatggcataggcccacggatactctttcaccatttcacccagtacgccctgaatttcagacatatgcgcaccgaacatggtttctgccatccatgcgataccgtacaccgccacgatggcgatcataccggaacggaagacttcgttttttgagatagacgcgggattggttttggtcaggataataatcagcgccccggtcagcagcataaacatctgaataaccagtaccatcgacagcggtttgccgccgaaggatggacgcaggtccgaatcagcaccaagaagggcgactacagcgattgcaccgaggaaaatccacattgccagccagttgcttttcggcagttttttatcgagcagcgtcgcggtatcaccgtaaacatactcacggttttccggtacggagatgaatttctggaactcttcgtctttatccagatctttaccgcggaaccagctgaagataccgatcgccaggataccgattaacgtcgatggaatggtgattgccagcaggtcgaggaactcaagatggcgaccatcaaaggtgacattacccagcattgcaaccagagacacgaccgcaaccgacaccggactggcgataatccccatctgtgcaccgatagaacttgccgccatcggacgttccggacggatgttgttcttaatggcgacgtcgtagatgatcggcagaatggtgtaaaccacatgacccgtaccgcaaagaatggtcagtgtacaggtcacaaacggcgcgacaattgagacatatttcgggttgcggcgcagcagcttctcggcaatttgcagcatgacatcaagaccgcccgaagcttgcaaggtcgccgatgccgccaccaccgcaatgataaccagcatgacatcaaccggtggtttacctggctgaaggtggaagacgaagaccagaatgaccagaccgataccgcctaataaacccagcgcgataccaccctttctggcaccataaaacagacatatcagtattatgataagttggatagtaaataacatgtgtgaaccctcgcgataatcctatttaaatttttgctgaatagatcacagtcacgttctgttttgtatgaactgttttcagagcctgactaaatatccgtttggtcgttaccggctttagcaaatacctcacagtaaatattggctgattgaagcagcggcaaatttatgcactgtgataagcggcttttcagagagaaaaactctctggcgatgggtttatagtttgtactgcgcagatgttaatgttttgtttgctgttatcttattgatatttatcggtctatttttgttctcagggcagatatcattaggtttaaagattaatctgatctacccatttgtgggtaaaaatacacataatgcgggtgacataatagttaattaacttttgttagcgttttgaaattaaaaacaccgttcacctgaagagatattaatttttagcgatgatggagggataattatatttgatctggcacaagttttactgatgaaggatgtaacttgtgccaggggtattttgcattacggtaataattattacttacagataaccagcgatccgttattggcaatattgtttcagtagtgagtagtgttctgcctgaatacggtaacggtaaaccggacgccccgtgacgccataatggatactggtgaacaagatgtggcagttgaccagccagatgaggtattttcggcaggaaacacgcgagatgttaacctcgttagccagctcgtcggttgaaaactcatagtcctgatgcgcgtcaatccactggcacagcgtgcgtaacgtctgcggcgttaagccttttggcaagcgacgaggatcctgttcgttggagctgctgccgtggattagctgatcaagctcggcctggtcataatactgatgtttttccagcgccattttcttttgccgccagccggtgagcgcctcttcaaagcgggaagcctggaagggtttgatcaggtaatccacgacaccgtaatgcagcgaatctttaatggttgccgcatcggctgcggaggagatgacaatcacatcacttttgcaacgcgcgttatgcaggacaggcagtaaatcgagcccgttctctttttgcatatagatatcgagcaatatcaggtcgataggcgtatcgctattgaagataatctctttggctttctccagcgtcgaggctgttccacagcattgaaagcctgggatttgtgctacgtatcggcgattcagctccgcgaccattgcgtcgtcatcgataattaatacattgatcatctgttcgacctctccccgtcccaggtatctggacaaaaaattgtgtgaaaatcccgggttccgattccacggcgatgctgccgccgagattttctacctgttgtttgacaagtgctaaaccgacgcctcgctcgcttccttttgtcgagacacctttgtcaaaaatgtgatcgattttgtcgggtgcgatccccggtccatcatcgttaacttcgcagtgcagccagccgtgacggtagtgcaatgttacgctaatttcgccaccgggttccggccctaatgcttccagcgcgttttctatcagatttcccaatgtggtaatcagcgtcgcgacctggtcctcactgccgctgtctggcagcaggctttcactgtttaaaatcagcgtatggcctaaatcggtcgcgcggttaatcttgctgattaaaaaaccagcgataaccggagatttgatcttacccagcagagagccaatctcttcctgatagttattggctgttttgagaatgtaatcttccaactgcttataactcttcagatgcaataatccgagaatcacatgcaatttattcataaattcgtgggatcgttcacgaagtgcatcagcatagttgaccagaccgtcgagtcgctgcatcagtttacgaacttcagttttgtccctgaaggttgaaatggcaccgatgataacgccattactgcgcaccggaacggtgttgatcagtaatagccggtctttaatcgtaatctcttcgtcgcggcgcggcgtaccgtcgcgtaacacttccgagacatctaccacctgtgaccatgagtggcttagcgtcgacagtttctcatcgtcctgcgacttacggtaattcagcaattcttgtgcggcatcgttgatcagcgtgacctcgccgcgatcgtccacggcaacgacgccttctttgatagactgcaacatggcctggcgctgctcaaacagcgtggagatttcgtagggttccaggccgaaaaggatttttttcagtaccttaaccagaatgcaggtgccaatcagtccgaccagcatgccaaataataccgaccagataatgctccagcgactgtcattgatttgttgggtcacgcggcttaactcaaggccgatcgccaccacgccaatttgtttatgattttcatcgtagatgggggtaaatacgcgtaaagcctgcgccagaaaaccgcgattgatagcgacattttctttgccattcagcgctttaaggatgtcatcacctttaaatggctgaccaatacgctgggcttcaggatgcgagtagcgaagactttgcatatcggtaacgacaataaacagcagatcgttgcgtttgcgcacggcttccgcgatggcctggattccgctctcctgcggttttttctgcaagccctgacggatttccggcgagtcggcgagggtacgcgccactgccagtgccttgttggccagcccgtctcgcgtcatatcactgatttgcgagaagtaaatcagatgcaccaccaatagcaccgagaacagtaccgcgctgaccattaagatcactgtggtactcaatttcatcggacgtttgcgtaacatgcggtagggcaatgaatgtctcatcagcttccttgtgtgacaaatttcttaagcattatctctgatgaggcgggtaattcaaagggagtaagaatgattggctatataggggaagagactctggcaacggaaactgccagtgctgtatgaagattccagggctatgcttatagcgataatcatactgatgagagagggaaagtcatggatcaggcgctactggacgagggttatcgctgttataccggcgaaaagatcgatgtctatttcaacactgcgatatgtcagcattctggcaattgcgtacgtggcaacggcaagttatttaatctcaaacgaaagccgtggatcatgccggatgaagtcgacgtcgtcactgtggttaaagtgattgatacgtgcccgagcggcgcgctgaaataccgtcataaataagcgagggtaaaatggaaatacgcgaaggccacaataaattttacattaatgacgaacaaggcaagcaaatcgctgaaattgtctttgtgccgaccggagagaatttagcgattatcgaacataccgatgtcgatgaaagcctgaaagggcaggggattggtaaacagctggttgcgaaagtcgtggaaaaaatgcgtcgggaaaaacgaaaaattatcccactatgcccatttgcgaaacacgaatttgataaaacgcgggagtatgatgatattcgcagttgatgggagagtacagagtcacgatatttttcatgctctccgcggagtgatgcaggagagcatctgaagggtagggggatgcacaaagaatgggcagagagcgcgtttttttgtcccaagtcatcccctttactgagcaaaaaaaagaatatctcctatatgagaatcatcaatcggggttaataatttttgcgtccccagagcattcaatattgataggagtcatattatggaaggtaaaaacaagttcaatacttatgttgtttcttttgattatccatcatcttattcctcagtgttcttaaggttaagatcattgatgtatgatatgaatttctcttctatcgtggctgatgaatatgggataccacgacaattgaatgaaaattccttcgcaataacgacatcgttagccgcaagtgaaatcgaagatttaatcaggcttaaatgcttagacttaccggatattgattttgacctcaacattatgacagttgatgactatttccgtcagttttacaagtagccaggaaggataagaagaacataaaaaatggcactattctctaaaatattaattttttatgtgattggtgtgaacatatcctttgtcattatctggtttatctcacatgagaaaacacatattcgtttacttagtgcattcctggtcggaataacctggccaatgagtctgcctgtggcattacttttttctctcttttaggagctgtagttgagtggacccgctggttatcgtgaaacgaagcgtctctcctcaaaactggatttgcggaacgacgaacgaagcagtcgcctgactgcttcgttcattaaagtgaaatttatttctgtgggcgcatcgccgggaagagaataacgtcgcgaatagtatgactgtttgtaaacagcataatcattcggtcgataccaatacccagaccagcggttggcggcagaccatattccagcgcagtcacgtaatcttcgtcatagaacatggcttcgtcgtcacctgcagctttagcgttaacctgttcctggaaacgttcagcctgatcttctgcgtcgtttaattcgctaaaaccattaccgatttcacgaccaccgatgaagaattcaaaacggtcggtgatttctgggttaacatcattacggcgtgccagcggtgacacttctgccggatattccgtaataaaggttggctgaatcagatgtgcttctgccacttcatcaaagatctccgtgacaatacgtcccagcccccagcttttctctaccgtaataccgatagattcagctaatgctttagcagcatcaaaattatccaggtcggccatatcggtttctggacgatattttttgattgcttcgcgcatggtgagtttttcaaacggtttgccgaaatcaaacacatgctcgccataagtgactttagtggtacccagaacctcttgtgccagggtgcggaacagggactctgtcagttcaatcaaatcgtggtaatccgcatacgccatgtagagttccatcattgtgaactcaggattatggcgaacagaaataccttcattacggaagttacggttgatttcgaatacccgttcaaaaccgcctacaaccagacgtttcagatacagctccggcgcgatacgcaggtacatatctaaatccagagcgttatgatgggtaataaacgggcgagcagatgccccacctggaattacctgcatcatcggggtttctacttccataaagccgcgcgcgaccatgaactggcggatagcggccagaatttttgaacggacaacaaacgtttgacgggatttatcgttagcgatgaggtccagataacgttgacgataacggacttcctgatcctgcagaccatggaatttatctggtaaaggacgtagtgcttttgtcagcaggcgcaactcagtacagtgaatggaaagctcaccggtttgcgtcttaaacagcgtaccgcgggcaccgataatgtcacccagatcccattttttaaactgatcgttataaacaccttctggcaggctatctcttgcaacgtacagttgaatacggccaccgacatcctgcaacgttacaaaggaggctttccccatgatacgacgggtcatcattcggccagcaaccgagacttcaatgtttaaggattccagttcctggttatccttcgcatcaaactcttcgtgcagctggtcagaggtatggtcgcggcgaaaatcattgggaaacgccacaccttgctgacgtagtgctgccagtttttcgcggcgatttctcagttcatcgttaaaatcaatagcctcattggctccccgtgtttcttgttcagacattttggttcctctaaatccagctttcaatttagcgtagataaagagacagatcggtacactgtattatctgcctcgactattaataactcagtttatcttatcgaaactaacgcttacctcaagttgatatcactaataaataaccatcaaaatggtttaaatgacttattaatctcgatttactagtgtgattaactgaaagttaatttattcataaccaattgtttttacgacagttaatcgttgctctcctgtatcatattcgtcggcgtgctaaacagaaaacgggtagcaaaggccaatacgacgatgatcgcgacacaagccaacgtccactctcccatctgagaaaagaatcgctggtaagctgcaattgccataccgctaatttgcgactctgtcgtctgctgtgccacgacgcctgccagccagttggcgaccgcgcctgttgccagcatataaataccggttaatacgccagacattttcagacgcgtgatttgcgcaatcgccaccgggtcaataaagagttcggcaaagcccattagcgccaacccggatatcatcacgcccattgacgcttgaccgtcagccgctgcatgtcgggcatcaaatgccaacaacataaagccacaagccatcagcagtaagccaaaggcaaacttcagccagacgcgcaatgttgagttgccgcggctttctggcgacgccagccaggccagtacaaccccaacgagcatcaccgcaattgcattcaccgactggaatagtgctgtaggtacttcaatattgaatgcctgacgattcacaaagcgatcgataaacaagctgatggtactgccgccctgttgtgccagtacccagaacaatgtcccgacaaacatcaacaatacaatttgccaaagagcacggcgatgttcggggaatttgatcatcatgcgggcaatgatttgtgcggcaatgaggcaaacgatcgccagcaaatatcccgaccagtcgttctccagcagcagggtaaaaaatactggggctaaacagagcatcaccactaaccagctccatactggtaaggcaaatttcacgctagtgagcgcttttttatccatactacgcgtggactggaaatgacgatgcccgcttaagaaaatcaacaaaccgataaacatgccgccacccgcaagggcaaagccaacatgccatccataccactgagcagccaggccgcaggcgattggggcggcgatagaaccgatattgcccgcagcatacagcagcgaaaaaccgccatcacgtcgatgatcgttctcgtcgtagagctcgccaagcaaacagctgatgtttgatttgaataaaccgtagccacaaataatgattgccagcgccagatacaggctaaaggttgaatttgtatcaatgcccagcaccacatggccaagggtcattaacagcgcgccggcaatcactgcagtgcggttgccgagcaggcggtcggcaagccagccgccgagaataggggtaacgtaaaccagagaagcatatgcgctgaacaggctgatggcatggttatcatcaaaaccaagctgatgggtgagatagagaatgagtaaggcacgcatgccgtaaaaactgaagtactcccagatttggatcgccacgatatagtatatcgcgcgcggctgtgagggtgttttcatgtgttctccttatgagcaaaaaagggaagtggcaagccacttcccttgtacgagctaattattttttgctttcttctttcaataccttaacggtatagcggccatcagcctgacggtatgcaccgtgaatatcggtttcaaagcccggatagtgagcgccgatttcacacagcatctgcaggaactccagaaccggacggctttcttcggtgatcatttcacccggcattaccagaggaactcccggcggatacggaaggatcatattggcgttaatacgacctaccatttcgtcgaggtaaacttcttcggtcataccgtgcagctctttctggaatgcagcatacggagtcattaccatcgtcggcagcacttcaaatgcgcggtacatcagatccggcagattgtggtgaacaatcagtttgtggatattctgagccagttcctgaatacgcatgttttcatagaattcaggatcttcacgatacagagacggcagcatgtttttcacacgcaggttcaggtcgaacgcacgtttgaagtcagtcagagcacgcagcaggctcagtgctttggtcttatcgataccgatgctgaacaggaacagcaggttatacggaccggttttctcaacaacgatgccatgttcgtcgaggtatttcgccacgatgctggccggaataccaaagtcgctcatggtgccgtctttttccatccccggagtcagcagggtgactttgatcgggtcaagatacatgtgctcgttatcgatgtttttgaagccgtgccaggtgctgtcagaacgcagcggccagcattcagtcgtatcgatatgatccggctgccatacatcaaagaaccagccatcagattccgttctcagacgtttgatctctttacggaatttgatcgcacgttcaatggaaccgttgatcagacgtttacctgcattgcctttcatcatcgccgcagcggtttcagtggacgccacgataccgtagtgcggagaagtggtggtgtgcatcatgtaggcttcgttaaaggtttcttcgtttacgtcacctttaacgtggatcatggaagcctgagagaacgccgccagcagtttgtgagtggactgggtttcgtaaatcactttcccttctacacggccaccgctcataccgcatttaccttcgtaaatcggtgagaagttggtgtaaggcacccacgcggagtcaaagtggatggatttcacatccagtgttttcttgatgaagtcggtgttgtacagcagaccatcataggtagagttagtaattacagcatgtaccggccaggttgcgtttggtgtttctttcacgcgcttagcaatggtagcgtgctggaattcactctgtgggataccaccaagaataccgtaagcgttacgggtcgggcggaaatagattggcgtaacatcgctcatcatcatcaggtgggtcagcgatttgtggcagttacggtcaatcagaatggtgctgcctgccggagcagagtacatgccaacaattttgttcgcagtggaagtaccgttggtcaccatgtagctgcggtctgcgttaaagacgcgagcgatatactgttctgcttctttgtgtggaccactgtgatccagcagagaacccagttcagatactgaaatggaaatatcagatttcatggtattcggaccaaagaaatcatagaacaggctacctaccgggcttttctggaatgcagtaccgcccatgtgaccaggagtacagaaagtatatttaccttcacgaacatatttaaacagtgctttagtcagcggaggcagaatagtgttgatatattcgtcagtggtctgcttgatcttattagcaatatcttcagcagcacccagcgcatattcaaagaagctaatctgtaaacgcaggtcattcaggcttacatcgagagtggaatacgtattagcgaacgcgtacaacggcaggttctcgttcattttgctaatttcttcgcacagctcgagattatatttatcccagtcaaaaataacgccgcacagacgcgcattgttttcgatcagttttaataagtcgtcacggtcgttcgggtaaacaatctggaagttcagacgttcaagcgcgcgatgaagttcacggatgggttcttctttaaaataaacccccatgtgattcaatattgcaataacgttcatagtcatatctccaggtaaaaaaggcccctcccaacacatgggacaaaatgaaaggaggagcctcggaaaatacttttaattaatgtgcgttagacgcggtgtggttatccattgagtggctctggcgctcgtgcattttgcgagcgtagaacatcaggataatcaggctgacgatgaaggtacctgccagctcgaaggagcttgcgcccatcagcgcgatgaagcagaacacgcaacccagtacagagcagatcaggctgacaaagttgcggatgttaacgccttcaaaacgaatcaggtcaacgcaagagtagaagtacggcagcatagtcagcagtactgcgataccggtcagttcaccgaacaggtcagatgctttaccaccggcagagttcatcagagtgatgaggatcatcagggcagtcattttcactgcagccagcagcagaccttttttcggaataccgttgctgtcgacttcaccataaactttcgggaagttaccgtcgttagcggcacgtacacctgcctggcctaccaacatcatccaggagcccagagaagtcaggcacgcaaaggcggtgaatgcagaaaccagcggcgcagcccagttaccgaggatagttgaagcactgattgcaaacggagcaccggaagccgccattacagaagacggatacataccggaaagcacctgagtcgcagcgatataaacaatacctgctaaaccagtacccagcatggttgccagcggaacggtacgtttcgggtttttaaccataccagtacttactgctgcggattcaacacccacgaaggcccacaggcagagcagaatacttttaatgatcgcatgaccatcagtggtatccgcagtattccagttagctgcataagttgccgcatcaaaccaatgccagccaacaatagcagtcatcaccacaggaataagaaccagcaccagaccaatagtggttaaacggcttacccaggtaccgccgagcatatttacaaaggtaaatacccagacgatagcaatacaggcgatacccgccggaacaggatcatttaatactgggaagaaggtggaaagataagatacagcggtaataccaatcgccaggttaccaatccagttagcatggtaataaagaacacctgtctgaaaaccaaatgcaggggaaatttctccggcataagcaattgggccaccttgttgcgggttttttgttgccagtcgggcatatacatacgccagcgacattgcaccaataatagagataatccaaccccagatagcaataccaccgatacttgctaggttcgcaggtaataatgcaataccgctccccatcatattaccggcaacaacaccggtacaggcaaatagcccgatcttcttggcagaactcatgctcttctcctaatttcatttttgaatttggagtccgggtcatgatgtataactatttcctgaccagaccaaactggcgctaagaatactcacgaaaaaaggattaatcctaaagattaggtgaaataacacaaaagtttctgtaagtgagaacttgaggttttttattaacacatcaggatcgcaagttgatatcatgaaaagataaacattcaatttttacaatggattgcgggatattctctggttaaatttatgtaataaaaattatgcggcaaataaattgccgcaacatattataccaacagaaacatacaaaaactcaacaacaaatattcccgagcataaatcaacccgggagttacttattctgaagcgagaaatttgtcgagataaggtacaacataaggaacagaagtctggaatataccattttcaatccagtaaagggtgtttgcccctgggcgtaaattaaaggcggtgagatatgcatcagccgcttcccggttcatccccttcatttcataaaccttgccaagcaacacataatttagccaggacatttcaagatcaatgccagtatttatcgcctggtaagactcatctgttttaccttttaccagagcactgaccgcttttatttgatatataatggacaggttattcaattccggcagtgtaacaatgttgtctatttctgtgttcagtgctgctaattgtttttcatctaaaggatgttgagaatggcgcacgatatcaactaatgctttttctgctctcgcgtaggtaaattctggggatgattgaacaatctcacctaataattcactggcacgattcaatgatttatcatcgccatgcagtaaataatcatgtgcctgataaaaattagttaataacgcaccgcgatgaggcaatatttgctggagcgtctcctgcattcgttgtggccacggttggtttaacgcttttgataaactctccagtaaatcattttgaatcgccagctgattaccgttagtgatgacataacgtttatccagcatggttgaaccatctgcattgtctaccaattttatcgacataaagcattgttgagcacggtattggcgctgattaacaaacgcaatagataatgttttaccggaactgctcggttcatcaatgttgtagttgattttgtcatgcaccataaaggtggagaaggtgttaagtgatgtcgccaccaaatcacccacgcctatcgcgtaagagagctgatacggggaactccagctgttacaacttttatttaccatattaatgtcaatatcgcgtggattgagcaaaatacgcgatttgctcataggaagacgtgtatcaagagttgaaaacgctaccagtgctacacagatacctaacgacaacaggaaaaaaaaccatacccaaaaggtagtgaatcgtttgcttttaactggggattgttcaggtggcgttgcggtgttttgaatgttaagactgtgggagggagaatctgtggcaggaaccgcctctggtatagggggaggcgaagatagcattatttcctctccctcttcttcgctgtaccagataaccggcaccattaatttatagccgcgctttggtacagtagcgatatagacaggactatcttcatcattatcttttaatgacttacgtagttctgagatactctgcgtcacaacatgattggtgacaatacttctcttccagacattatcgataagttcatccctgctaagtacttcgccactgtgttgagcaaagaaaaccagaagatcgattaatctcggctcaagggtaagttgacgcccattgcggctaatttggtttatggacggagtaacaagccattcgccaacgcgaactacaggttgttgcataatagaaactcattcgaaaagggaatgatgcaatgataattgccacaacctatttttaccatctatagatgggtttatttacatattattggtgaatgcaagacgttatttttaccagtcataaacttcttgattacatagtattacgaaaggattttactgagaaccagaagtaatattccttaccatcaaaattcatcatctttgccaaagaaaaatgttcagaaaataatccatggaaaattgtccggagcgcttactattttaatggattgttagtctttgcatgagcaagcggactgatacatttctctttgttctcattcagaaaatctcatcagtcggcgttcagaccggtgttgtgctttatggatgcgttacgctcctgatgacgtcatttgacgttcaacaacatcacggggccgcacgacatttcacgtcagttagtgctatcgctcaggaacaaattttcccgaattgggatatgcccgcaaattgctggtgatgtggggagaatctggttgagttcggtagaattgatttggaggcagaacgcttaaattgtggcgtccagaaacgaaaaacggacctccgtggaggtccgttgatatgaatttggtgccggactcggaatcgaaaatttcttttatcatattgatattaatgcaatttgtttggtttgattaaaaatgtaccctcaattatacccgcagtcccttttgatatcgaaagggaatcactctcgggatcaggctgagagcacagaaggaaagtacctggctattatatcgttaattctgtcaatcagttccagccttttgaaagtgatgtgtgcagatcccttcttaaagtatttaatgatgaacatctcgtcttcatagcgctctttaccctgaacggactggatgtgaccatccagacgaatagtgatgttttcccggttgtcggggatcggtttgccgctgaacagatgtagcattctttccaggtcgacgagtcggtcagtctgttgcccggtgwtaagatgaaatccccaccggtcccacctcaccagattgttgacgataattttactgccaaatttacagggtgagttggttttgtaattccagctcagcactctgaagacgttgatcactccccgttcaaacacttcatctttgttctggtgcagttgttcaaatgtgctcagaatgttcgcttcgctgatttccggaaaattatcatattccagtgacctgtaccatgtgtcccgggtctgcgcatccatcagactcagcatcccggaacgttgcatcagatcacgccagagttcgcgatcaagattgcgtgtgatggctttcattgcggtttccggtttctccatcagccagcaaccgcagcgaaaatcctgtttcatggcccagtccagagccgttttacctctaatactttctgtcattgctgatacttcagccagttgtcggataagtgtgtcgatttgcagcaatgtactctttcgtacagccagaatgtggcggatactggttgagcagataacgtccgtatgcccgttgaccacttccggacgagaggctgtgatttcagacataatcgatattcctttttgcagataaacgaaaacgccagccgtattcaggctggcgtcagtggaatgaagtctggtgagtaagactcaccggttctgttgcagaaactgcagctgacgcagggtacggatatcttccctggcctgttcaatacagggcagcagtgctgccgaatccgttttatcctcatcgttgtcgaagataatccctgattcgcagtcaatattgtcctgcagccacgcaatcagaatatccagcgccgtttctgtggttaataatttcatccagtgtcttttgtcctgattaccagtcgaaagtggggaaccccggcagacattctgcgccggcgtccagatgaatgagactgacgccataacgccgggtgagagtgacgaccagacgacggaacgttctggacaggcccaggcgtttaagccgcagaaccgggtacgaccatgcatcggtacgtaacagatagccgctgcctgtaaaatgaatccattctgtttcgccgtcgtcattagtctggtgtgacagcgagtacagccaggcgttgtccgtttccgtgatatgtgcggtgctgcaacgtatgcaggtaagggttgttaacggtggtggtgtactggttgcgtgttggtcggatttatcgaccacgcggagtgaataaccgttttcagagaccttgttaatcagttcactgagattaacaccatcgacgtcaacgacaatgcgccccatgttcagtgcctgcacgttaacgctgtcggcttccagcgtcagggccagtttcattgtttcgcttccggatgcttcccccgggtaatgttatttaccgttctgtagttatcgcgggtcatcaggccggttgcccggcgtgcccggagaatatcaatgctgttgattaactgcgacggggctcctgcgctgaatcccggctggtcggtacgtaccagcgcgtatttttcaacgagaaagttcaccgcgtcacacagtgaaattcctgcctcaatatgctgctcaatcacacgttcatcagcgaacggtgtgtcattcagcgtgaggccatagtgctggtccagcagtcgggtgagcagtgtctgccagatggtgatgggagacgggcagcccgatgcctcccgtacgtgagtgtcgggtaatgtattcatcttaaattctctgtaacaggtggttataaaggggagatatccggtgttatacggtggttgcgggcgctgccggtgtcggataaacagccagataaacgtaaccacaggagccgagggtgtcggcttcgcaggtcagccctttcgcatacagcgtggcggtatgctgatgtcggggattcagttcaccgccggtgagcatgagttccagttgtttcatcagcagcggaaaggcctggtccaggtggtacgcatctacgtcgctgaacctgcctctgataccggcgcggtctgcaaggtaatgcaggcggttaccctcctgtaccagtcgggccccgaaacagggcgtcacggtgcagggcagcccccaccaggggcggtcgtgattgtcgtcgggaggcgttgtcccggggagtgtgtctgacacgataaagtcctcacagaaaatcggttaagaatggtccggtagtggcgataattctgctcatcagaattcccttccagactcagttcagggtgacgctcatcagccggacatacggaccaaaactgtccttacggcgttctgcaaacacagccagtacaccgggaatatcctgcacttcacggccggtatatgtatccgtgctaccgtgccagcggtatttaccggtacagaacggaaaaagacgggatgcaggatgctgacggtgaatacgcatggcttcaccacgggtgatgattttcatgagaatagtcctcctgaatgtgaaagtaagaaacagctgagaaagagaaactgaagtgatatgaaggtgattgtgacggtgacgggttaaagcagaccgtgttccgcaaaggagaaaacctggctgccaccgactatcagatggtccggtacccggatatcaaccagggccagtgcctgtaccagacgctcagtgataaggcggtctgccttgctgggggggacttcaccggacgggtgattgtgcgccagcaccacggcagcggcattgtggtacagggcgcgtttaatcacttcccggggatggacttccgtacggttgatggtgccggtgaagagggtttcaccggcaatcagctgattctggttgttcagatacagcacccggaactcttcacgctccagtcccgccatgttcagaatcagccattcccgtgccgcatgcgtggaggtgaaggccacgccgggttcatgaagatggcggtccagggttttcagggcccgcagaatgaggctgcgctctctggttgtcatttctccgggcagaaaggaaagctgctgcattgtccctgccaccattcagtcgatgatgcgcataatggcgctgcattccggatgctgcagggcgtaatcccgcagccggtaataatggaccgtcatggcataacactccgtacgacaggcatgatgactgtacgtcatcagacaggcagcaatgccggcagcttccggactcatttcagcgcggttaccgttcatggcattgaacagtacccatgtttcgtcatcatcgtcatccggttcgggtgctataaatgccccgccgttgttcagggtgtacagattccagataccaccgcagtagtcttcgcacagacggtccatccagccgaagacacggggctccagggtcacccactgtggaatgaggccaaagtgctgcggccagaagctgatgcgctgttcatcagggacgagggtggcaaccagttgttgcaggtcagtctccggtgcacaggccgaagaggtggtgttctgagacaatgttttcatgtatgaaatccttgtaatgtgaataaatgagagggagtaaaggtcgggagctggcaacatcacgttcatcactgaccgtgatgacccggtaatatcagggatgaatgatattcggctgaaattccggacagccgtacgcgtaaccgttccggtcacagacggatggccagatgccattgcctgtatactcagtctgcacagactgatttctccgggacggtaaagcagacgggtacaccaggcgcacaggtcatcatcagaaatggaacgacaccccggcagcgcctccggggcgtcgggtgattctggtgcctgaatcacgccttcagggacatgctgcatcagcgcaggctctccagcagcgtttctgccatcacccacaatgcgcggttgagcttaatatcggtgtcgatgttgtgaatggcacgggtgtggatacgttttccttttgcactgcggccggaaatcctgaaccgccccgggaatcctggagactaaacttcctgagaaagaggtaaacaggatgactaaaaatactcgtttttcccccgaagtccgtcaacgggcagtccgtatggttctggaaagtcagagcgaatatgactcacaatgggcgacaatttgttccattgctccaaagattggctgtacgccggagactctgcgtgtctgggttcgccagcatgagcgggataccgggggcggtgatggagggctcaccaccgctgaacgtcagcgtctgaaagagctggaacgtgaaaatcgtgaactgcgccgcagtaacgatatccttcgccaggcttccgcttattttgcgaaggcggagttcgaccgcctctggaaaaagtgatgccactgctggataagctgcgtaagctgtacggggtcggaccggtatgcagtgaactacatattgccccgtcaacgtattaccactgtcagcaacagcgacatcatccggataaacgcagtgcccgtgcgcagcgcgatgactggctgaagaaagagatacagcgcgtatacgatgaaaatcacaaggtatacggtgtgcgtaaagtctggcgtcagttgttacgggaaggtatcagagtggccagatgcactgtggcacgtctcatggcggttatgggacttgccggtgttctccggggtaaaaaggtccgtacgaccatcagccggaaagccgttgccgcaggcgaccgcgtaaaccgtcagttcgtggcagaacgacctgaccagctgtgggtggctgattttacttacggtgtgcccggagttcagggcgggcatggatgcttaaatgaaccgcgagtctgtctggaatattgaaccggtaactcacgatgagaaacccaacaatcccaccgggtgtgacggtggagaacctgagcggcagtgacctgcggcatgcccgcagggtgatgtaacccgctgacaacggggattgaggcgagatcactaagccgagatgatcctcaaggttaagtactgaaaggctgaagaacatgaacccgttaatccgcctctgtgggttgaaaacgtcaccacggcctacgtgatctgacaggccgtgcaggaggaactggcagtgatacgtaagcactgccggtcgaaggtgttttgacatgtatgcgaaacaccggggcagcagcgtctatcacacttgcgttgctgacttctgccaacttgcggcaagcaaggataaagagtgcgacgggcagcctcctcagtatgcctgagtccaggcaggtaaaccggggaaggtcagcgacggatgttaagggggcatggctccgatgacgcgctggctggcggagcttccgtagtagtccgcgatggggaaagcccattacatggcgaagggaagcagtttgaatgtgtttgcgacgtgaattaactgacctaacgaggtgaagacctttgataatcagcgaaatgcaacgcaagcttgccacatgggcagtcaccgatccgtccctacggattcaacggctgctgcgtctgataacacaaccagaatggctggctgaagcggcgcggatcacgctttcatcaaagggggcccatacccccggcgttgatggcgtgaacaaaacaatgctacaggccagactggctgttgagctgcaaatcctcagggatgaattactctcaggccactaccagcccttgcccgccagacgggtttacatccctaaaagcaacggcaaactgcgaccactgggtatccccgcgttgcgggatcgtattgttcagcgggccatgctgatggcgatggagccgatatgggagagtgattttcatacgctctcatatggcttccggcctgagcgcagtgtccaccacgcgatccgcacggtgaaattacagctcacagactgtggtgaaacccggggacgctgggtgattgaaggcgacctgtccagttacttcgacaccgtacatcatcgactgctgatgaaggttgtacgccgcaggatcagtgacgcacgtttcatgactctgctgtggaaaaccatcaaggcgggacatatcgatgtcggtctctttcgggcggccagtgaaggtgtgccacagggcggtgttatatcgccgctattatcgaacatcatgctgaatgagttcgatcaatacctgcatgagcgctacctgagcgggaaagccagaaaagatcggtggtactggaataacagtatccaacggggccgaagtacggcggtcagagaaaactggcagtggaaacccgcggtggcgtactgccgctatgccgatgattttgtcctcatcgtcaaaggcaccaaagcacaggcggaagccatcagggaggagtgtcggggtgtgctcgaaggcagtctgaaactcaggctgaacatggataagactaaaatcacccatgttaatgacggctttatctttctggggcacaggatcattcgcaaacgcagtcgttatggcgagatgcgagtggtctcaacgatcccgcaggagaaagccagaaacttcgccgcatcgctgacagcactgttatcaggcaactacagtgaaagcaaagtcgatatggctgaacaactcaaccgaaaactgaaaggctgggccatgttctatcagttcgttgattttaaggccaaagtcttcagttatatcgaccgtgtcgtgttctggaagctggctcactggctggcccgcaaataccgtacaggtatcgcttccctgatgaggtggtggtgtaaatcaccgaaaccgggtcagagcaaaacgtgggttttatttggtaaaaccaatcacggcaagctcagcggcgaaatactgtaccggttggtggggcaaggcaagaagctgttccgctggcggctacccgaaggtaatccctatctgaggacggagaccagaaacacgtatacatcgcgctttacagaagtggcaatggcgttcgccagcatttaaatggagagccggatgcgctgaaaggtgcacgtccggttcggggaggagaggcagggaaatagtccgactacgccctgcctcttactctactcagcacatggcggggcttcgtctatgtggcgttcatcattgatgtgtttgccggatacatcgtggggtggcgggtctcatcgtccatggaaacgacattcgtgctggatgcactggagcaggcgttatgggcccgtcgaccgtccggcacggtccatcacagtgataaaggttctcagtatgtatcgctggcctacacacagcggcttaaggaagccggattactggcatcaacaggaagtacaggcgactcgtatgacaacgcgatggcggagagcatcaatggtctttacaaagcggaggtaatacaccgtaagagctggaaaaaccgtgcagaagtggaactggccacactcacgtgggtggactggtataacaatcgacgattgctggaaaggctgggccatactcctccggcagaagcagaaaaagcttattatgcttccatcggaaacgatgatctggcagcctgagttcacagataaaacactctccaggaaacccggggcggttcatactctataacatactcccccatttttcgttggccttcattgcagcaaagttccggctcaggatattgggcgcagatcatcctctcaggaatttcaggatctgccagacggtgctgagacgacgcttacttgtaaggttagttttcagacggacaatgaaatgaggatatgcgataaatttcagtcaaagatccataaaacagaaataatgttattcagtggtgaacagtccattccggagacggaatatcttgttaaggctgtatattatactggctgtaaacaatactggctgtaaacaacatggccaccaaggaccatgttgtttacagcatacccttgttgcaaaagcatccccgtcagaacagcactgagtagttcagaccaaaggttcggccccggcctttgtagtcgtacagtgaagcagggccgtaacccgggctgtagtacagaggtgcacgctgtccccagacagtggtatagtcacggtcgaagaggttctcaacgctgaagctgagtgttcccaccggaagctgccaactactgataaaatcgacggtagtgtaaccattaatatcgttaccctctgcatcgcttacgtcgaaagaagtggtgctctgtacacgcagactccacggttccggcgcccagttaatgtaagctgtcgctttcgatggacttgattccttcacgtcatatttttgccattgaccgttcactttcgactcggttttcagcacattgaagttcacaccggtactccagtcagtatccgggatcaggtagtccaccgcaccttccacgccgtaaatacggcgcctgtcgtccttcacactgatggtcagatctttattcctttccacgctcttattggaaagtgagtaatatgccgcgatttgagtccgcaggttgtcaccggtaaagcgccagcccagttcataagaatcgactttcacgccttccagcttactgtcgctgacgttcacgctctttgtcagggaaagatggccgttcactgctgcaccatagatgccgcgaccataatatttccccggatccggcaatgccaccccctgggaaaaattgaaccatgcctgctgacgttcggtgatgtgcatcagcagaccagcattgaacagaaagttatcgtaatctaccgaaccaccaggaatggcgtcggcagatatcgccttcccggcagcaatcttctgttgctgcgtgtagtcgatgaaatcatctaccctgttctcagtatactgatagcgtacgccaccgctaacggtaaaaatatcattaatgtcatagctggattgcaggaaggccgccagattggtgatgtcatatgacggatagcgcccggtggtgtaaatcttatggttgttcagccctccggaagcacttgcctgagccagatcgaagaacatctggttggaggtaaagcgctcatgctcagcatccagcccccaggtgatttgccagccgtccatcagttggctgttcagagtcagtttcatgccgtactggtcggtatcctgctgtgacgaggagaaagccgtcgcctgtttattcgcatttaccgtcgggaacgggtagtaccgcaacgactcatcgcggtagtaaacctgaccgaccagttcctgtcccaggaaatcactgtcagagtactgcaggctgatcaaatgccgctcagtgccgggaatgcggtcagaattcagccccttactgacgtatggtgtgctgctcccgctgatggcggaaaagcctttcccgagattaagcccgtaattgtcgtctccctgacttttatagtactgcgttatcagttgaagctgccgggattcatcgatgttcagcgtaccggttcccatgatgtccagccgattggagtgctgcaggccggtctgggtgttatcaagcagggtggcatcgccgttaccgtcaaaccagccgccaaatttctgatatgccacggaaagacgtccggagatatggtcatttccgccggagacagcaccggcaatgcgctcatcgtgatctttactgctgttaaagccactttttgtgccagcctcaaactccatcatggtttccggctgaccttttttggtcacgatgttgatcaaccctccggtactcccgccaccgtacagggccgtcgcgccggagatcacttcaatatggtcgatattaaaaggatcgacagagtccagttgtcggctgtcggaacgtgaagagttgaggcgcacaccgtcaatcaggacaaccagtggacggccacgcatgttcataccgtagttggttcgactctggctgctgacatcaaggccggggattaactgagccagtgcgtctttcagctctttaccgccctgaatctgctgctccagttcggcattttcgataacccaggtggtttgcgccatctccgctacagttcgattgctgcggctggcagacactatgatctcattatcatcgttttgctgggcgacagctggtgacagcacgacaagaagcagcggaccaagagcccggggcatatactttttgcgcatcatcgttattcctgaatatttgctgtatagtgagttaaagaagcagcctccggctgcggttttttccggctgccgctgcgccactgaatcagtgcgggcggcatactgagatcgaataaatcacgccccagtacgcgattaagaatacgtgcagatcgccaggccatcaggctgagctggggttcggcgatgccatgagtttgcatgctggcgttgaccgcaaagatgttattttctttcgggccactccattccagagtgaagtcatcacgcactttaaaggtgttcttatcgtgcatggtgatcaagggcatcagtgagggaagtatttgtggcaatgcagaacggtaacctgtggcgaaaatcaccacatcactttccaggctctctctgccctgatccagatgatgttccatcaataacctccagcccggaccactactttccagagttgttaccgagcgactgggtagcagacggatatttcttggttttctcagaacttcaaaacggtggtacaactcacgataaatggtcagtaaagaatcggcagtgatgccatccgatgtcattttctgctcatccagtaactgatggcgaatatcttccttcagtccggagaagcctgaaatatattcaggtgtaaaatactcatcagcaaaagcagcctcatccagtgcgttaaaattattacgccgtgagacccagtttatttccgccgcttctccccattccccgcgtaatgcattaaggaacaggtctgcaccactctgtcctccaccaaccacggttatccgttttccactcaggtccggccgacgaagattcatttcactggcatggaaacaggattgtgtcacatgcttcacacagggtggtaaataaggttgttttcctgtaccaaggcagatattgcgggcaaaatattctccccgactggtctgaaccagaaacaatcgactttttttgtcgaaatcaatattttcaacggtatgactgaaatacaggttattcatatcttcagcagcccagcggagatagtcagaaaactcttcacgggatactgtacgtagcctgcttgtaaggaagcgatagaactttttgtgcttcaccagatagttaacaaagctgtagggatttgtaggtgcaactgcactgaccagatctttcagaaagacggtctgcatatgacaatccggtaccagcatacccggatgccaggaaaaatgaggatgttcgtcaaagaagagacagttcagttcttcgatctgatgtgacaatgcagcaatgctgagattaaatggccctgtcccgacaccaataaaatcgacactttttttcatgattcatattcctgagttaccagccacagcggattttgcagattctcaaggtaattcggcagcatgcgactgccgccatccagatccggccaggtcagttttaccgggttcagcaccacgcgaatgatttgtggcctgaagagtgagaaaagcgcaaaacgctctgccatttgtggatgtttgttcatgtaatcactcaacactgctgccagcagttgataaaatcgcctttcaggtacgccaagacgaaccatcagtggcgaaataaaacgcagtactgtcacgaagtgacccgtctgcaaatcatggattaagtagtccgcactcagacgggatgtgacatcacgcacctcctgaggcaaagagtccatttcgggaaacgcttctttcaccagccgcatatcgccctggaagtctttcagcagaacacgctgtggtaccccctctttcatggcgagcgttatattttgtccgtgtgcaataagcgcgacaccgtagcggcaaagcaggtgatacagcggaaccacaaccacccggaacaattgcgtaagccaggtttcagcgtccagtccggagcggtcgatatatgcgcctgccagcggctgattgttttcgtcgcactccatcagtgttgccatcagaacaggactttcatccggtttcagccagcggcacggattctcccgccagataacaccaagcatttcctggtagcgatagggagcccgggcaagcgcggcatagccttcatgggacacatagcctgcagccggttcaccaaggatcactgcgccgctttgcaccagggtggcgtcggtcgcaaaaacctgttgcagccagcgtgaagccagtggtccggcagcgatatatctgccagggatcccccggtagcatgaggtgttgtagatggtcagcggcagcttgatatccagccctccccggcggctggcgttggtcagggtacgcagcgactgctgggcgagccactggtcgccaaactcgccgagagacaccatcctgccttcggcaaaatcagcgatgaagtctgtggcgattttttgctgccactgccacggatgtaccggcagcggcagccagttgtgatccagcccgttttcctgccagacctgactgaagcgtgtaaactcctgcggatccattgcggcagtcaacaactgctgaatatccagatcgttatcgcagcgccagatcatatgttcacgttttatcgccagccagtgcagtctgaaggtgttggtatactctggcgcatatcgttccagcgcctctttgccccagccacggcgacctttattaaaaacgaatttaggatgaccgctcagcaggcattgcagacgatcggcatcaagattaatcaggtcactggcactcagtccgcgacgggccttcagcagttgcaggtcgcccagtagcgtggcatacaaatcctgcatatgctctgcaacagtggcatcactcattgacagcaccggctttagctgcatcagcagcgtctgcgccagtactggttcgtccgtgcagcgcaacgtttgggcatcaatccacagccagccccagataccacgttcagcgatgaagcgccattgtgctcccggcaggttaatgcagtagtggtcatcgccctgagattccgcatggaaaacctgctcatactccatctcagacaacatttttgccaccagccgacggttaacaaaatcccagtccttgtgattcattacagaccgacctccgtgaagaagtgatgacgatccgccatcaccatgcgcgagcgcttatgtgggaagtcgaactctttaattgtccggtatcccgcaggctcaagatggcggaacaggcgctggttatcggtgcgtggctccagtactgtgcgctgcgtacggggctcatccagcagcaggtaatgtgtcagcccgcgcagccagctttgcacatagtgggccccgcgccattgctgttcaccaaccagcagatgcaggccacggtcaaagggctgccacgaatagtgacgaccaatgcggtcttccgccgcccagtagatttcaaaatagctgaatggccgatcgtcgaagcacccaatcagcgggaatgcatgtttaccggtgagctggcgctccagataggcggtctgtacctccagtgagccactttgctcccagaaatactcaacgcgcggatcattcatccagcgggtgaaacgttctgcatcagaaacgggatcggcaatgcggaaactcagcatcctgcgaatacgtggatcgtaacggcggtaaacctcaccctgcggacggggtgggcgctgcgggaaataaatctcacgctctgcatcaaaaaccatttcaccggaggcccggtttgccggtgaactcaaccataacggtaactgccagaaggcggtacgatggataatgtcgctttttacctgcccaaaaagcgtcagcgcctgtggctcctcacaccattcggcccaggggagagccactgctgacagttgtggtgcggcgataaatatctgatccagcgcatcgcacagccaccctgtcggcagctccccgggacagtgcaacaccgcgctattgtccagtccccagccaagattcaggggcttgtcgagtttttcacagcgcagtccatatctgctgtgaataatgtttgcctcagacattcagacctcctgagcctgcagcgggttagcgaaatcgaaatagatcaccgaagggtcaacaatggtgttctcgttatgatcgttcagataacagaaaaagttaccttttacgttccagtacggactttccagcacgtagttgagacaggttttatgagtcacctgatcacgcacttcagccagcgatgctcgtacacgagccatcagattcgattcgctgtccagcccggcagcccccagcgcagcggtcacagcaaaagtggagttaaccagcaggtaataagggaaatagcgcagcaactgctcatgggtgaaaatattttccgcctgcgcctcgccaatagaatcgagccagtctgtcgcgtgaggcataaaagcgctgccctgacagtcacggtaaataaatccgaccggcagatccccaagcatctggacaagaatattttgctgatgcgccagcagcaccaggccgtaatccgcttcagccgtaaacagcggctttagcacttgctgacagtatgcatcgaccatgcatgggcggcctgttgcacagtgataccgaggcgatcgctcaggcgttttaccgccgaaaccagcagcgaatcaccgccatcaggtgcggcctgagtcagggagaccagtacgttggtctggcttttcggctgatccaccagcagattttcacgcagggcaaacagactttcctgcatgatgttgccgttaagatcgagcagcccggcccagccatcctcctgcattacccggaaagtcgggaagcggacctgtagcatctgccagccgtcggtttgagccaggcgtgccaggcgcatcccacgcttcacttctttcacggacagagtacggatggagttggtcagccgtacgctcagggagaacttgatcatatcgcggctggtggcacagtagagggaacgggaagaggtggtcggcagccacgacgtgccggcctcacctaagtctttaatcagccctttagcaacaagtgcctggcaccacccctgctgcaaaagatattccccctgccacgggtgcaacgggaacagccattggttgtcacttaattcgttgagtaactgaggcgcattctctgcggcaaatcgcgtcagccgctgttgaaggttgagatgcaaactttcaccggcgatttgcgttttatccaccgaaaaccaccgcagtgggaagtggggtgccatatcaggcaggtagcgttcagcctcccgccggttaaacggttcatgagacttaggcgcagggtggaaagcgtgtcctgtcagcagcgcctgctcagcttcgccaaaattcaacgctttttcacgcagggcggtccagtcatgacgggcatcaattgtctgttgcgtatgggcgtggctttccagcacgcgctggtggaaagtttcgcagaggggaacgggcagaaacagttgatgccgtagcttatcaataataagccgggagagagtggtaaagtcgacaggataactgcctgatgccgtgaccagacgtgcaggaaatgcaaagcggtgatgctgggttggggagaaataagccactctgaaatggagcgatttctgctcatccagcgggatgatcaattcgtctggcgggtattctgtcagtttccagtctgtggtttcacgaatcagtgcattcaggaagcactgcgcagccacatctgtggctggtttttcagagggcagggtcatagtcaaacagctcccacacagtaaaataataacaattatgtcaataatgattctcattatcaataagaaatgttattgtcagataaattaattttacaaataaacacaattaatacatggagttgaaacattaaaatgtcccctgggatcgaagatacgccccaaaaaccactgtcctgctggccacttgcgttcagtgccgggcttctcggtatcgggcagaacggtctgctggttgtgctccctgttctggtcatacagacaaatctgagtctgtctgtatgggctgccctgctgatgcttggctcaatgctgtttctgccatcgtccccgtggtggggaaagcaaatttcccgtactggcagtaaacctgtggtgttgtgggctctgggaggatatggcataagctttaccctgctagggctgggaagcgtgctgatggctaccagcgccataacaacagcggtgggactgggaatattaatcatcgcccggatcgcctacgggctgaccgtgtcggcaatggtgccagcctgtcaggtctgggcattgcagagagctggagaagggaatcgcatggccgctctggcaaccatcagctccggcctgagttgcggcaggctattcgggccgctgtgcgcggcagcaatgctggccattcatcctctggcgccactggggctactgatggcagccccagtgctggcgctgctgatgctgctgcggttgcccggcacaccaccacagcccacaccggagtgcaagagcgtcagtctgaagcgggattgtctgccttatctgctttgcgcaatattactggctgcggcggtgagcatgatgcagcttggactttcgcctgcccttactcgccagttcgtcacggataccaccgccattagccaacaggtggcctggctgttgggtctgtccgcagtagctgcgcttatcgcgcagttcggggtactccgtccgcagcgcctgactccggtggccctgctcctgagtgccggagtgttgatgagtggtggtctggctatcatgctctccgaacagctatggttgttttacccgggctgtgcagtgctgtcatttggagcagctctggcaacacccgcttatcaacttctactgaatgataagctggctgatggcgcaggcgcgggctggctcgctaccagtcacacacttggctatggactgtgcgctttgctggtgccgctggtatcgaaaacaggtgtcgcaatcgcgctgattatggcagcattatttgcaactatattatttaccattgtgtctgtatttatctggcattaccgtactatcaaataaagatatgatcatcaccttactggagtaaatcagaggatatgagagaggacctgcgtctgatgaaagcatgtcaggcagtgttctggcttgctgcccccgcccatcaggtatagtgaattcaaccagttgctgcggtgtaatctccatgattctttcgtgcaacaacctatgatcccgtttaccattaatattcagcgttgctctgttattaaatttcattctgacaagccagtcagcttttattccgggagtctgctctgcgcgttcaaacaggtcataaaaatcgccttcacgatcagaaattgacaatacatgggtatcagggcattggcgagccagttctgttgctttattatatccttcaacccaacgccaggtttctttttcactgacatgttttttatgaagtaaatcattgcagatttcttgtcgggtatttttactggtttttaattcatccctgaaccactgatagtcatcataaacaccgaggcaaacacctgactcactgatgacgagttgaggatgaagaaataagtttctttcatctttatgttttttgtgaccaactccttgtttttctttctgaccagaataattaagttctgttgtatcctgtaaaactaaaactcttttaaactgctgagctctttcagtgatattttctttgtgaggagccataattttattagcagagactttatcgtttgaaaaacaaagataagctgcctttgtttcactccaggtacggcaggaaacaggaatactttcttctggtgaacgactgaggctattgaggatatgttttactcttttatcaagtcttgagtcccctatatccagtgattttagctcctgaataacccagttttccataacacctctgaaataatctctgtcttttcaatataatactattatttcaacttgtgggtaagggtatgagatgcgaagtgatgatcgatagtgatgcgaataagtgttcgattcagatgcgattatgcaatatgattttatgtgtgttgcttaattatcatatttcttgcccgttccccgccgcgcagatccggtttccggctgaagtggatacagacctgatttgttgctgagtatcggtaaaagtgcggcttataagctattctgaaacatggcaagtgaatctgggcggtataattccggcaaatgtcatctgtatttaaaggacgtgtgagtatgaaatttctggaatgtgctgtccgggatgtgatttatgggatcaatgtccgtattgtcaaaccggtcaacatttatgaatgtgaactcagggacaacgtgtttgtcggccccttcgttgagagtaagcgtcaacggagcaccgtattgacgcttatttattggtgagtactacgttccatggcaggagttcgccaactcggttggaaggccattccggcagtacgctcagaatatggcgcagatacgcttccggatcgataccgttcagacggcaggtgccgatcagcccgtacagcagtgcaccacgctcgccgccgtgatcgctaccgaagaacacgtagatggtatgacctttatatactcactatagcattggtgggatattccagaggaggtcattatgcattcggaaaatattgcagcttacatcgggctggatgtacataaagaaacgttggcggttgctattgctgcacctgaacggcttggcgaagttcgttattatggtacgattaacaacgaagcccaggctgtacgtcgattatttcagaaattgcagggactttacggaaacattctttcctgctatgaggctggcccctgtggttttgggctatatcatcaactcacagcgatgaatataaaatgccaggttattgccccttcccggataccaaaatcaccgacagacagaatcaaaaatgatcatcgggacgcaatttctcttgccaggttactgcgggctggtgaacttacccctgtctggatccctgacctgactcatgaagctatgcgggatctaatcagagcccgtgcagcagctaaacgagacagcagagttgcccgacagcgaattctgagcatgctattgcgaacagacaaacgttatgcagggaagcactggaccggcaaacatcgaacctggttagctaatcaatcatttagtcagccatctcagcagattgcttttcaacactattgtcaaagtctggagcagattgaagatcgcatacttcaactcgaccagaaaatatctcgcctgttacctgagtggtctctgtgcaatctggtctgccagttgcaggctctaaaaggtgttggtcagctaattgcaataaccctggttgctgaactgggtgatttttcgcgattttccaatcccaaacagctcatggcttttctgggactggtgccaggtgaatattccagtggaaacagtattcgtcccagaggaataacaaaagttggaaacagcgaactgagacgtctgctttacgaagccgcctggtcttatcgtacacctgcaaaagttggtgcatggcttatatattaccgaccggactctgtaacacaatattccaaagatattgcatggaaagctcaacaacgattgtgttctcgttaccgaactctgacagcaaaagggaaaaaatcacaagtagccattacggcggtggctcgtgagttgactggatttatgtgggatattgcacttgctgcccaatcatcattcagtcagcagaagcaaaattaaaccctgtgaaccgccccgggtttcctggagagtgttttatctgtgaactcaggctgccagatcatcgtttccgatggaagcataataagctttttctgcttctgccggaggagtatggcccagcctttccagcaatcgtcgattgttataccagtccacccacgtgagtgtggccagttccacttctgcacggtttttccagctcttacggtgtattacctccgctttgtaaagaccattgatgctctccgccatcgcgttgtcatacgagtcgcctgtacttcctgttgatgccagtaatccggcttccttaagccgctgtgtgtaggccagcgatacatactgagaacctttatcactgtgatggaccgtgccggacggtcgacgggcccataacgcctgctccagtgcatccagcacgaatgtcgtttccatggacgatgagacccgccaccccacgatgtatccggcaaacacatcaatgatgaacgccacatagacgaagccccgccatgtgctgagtagagtaagaggcagggcgtagtcggactatttccctgcctctcctccccgaaccggacgtgcacctttcagcgcatccggctctccatttaaatgctggcgaacgccattgccacttctgtaaagcgcgatgtatacgtgtttctggtctccgtcctcagatagggattaccttcgggtagccgccagcggaacagcttcttgccttgccccaccaaccggtacagtatttcgccgctgagcttgccgtgattggttttaccaaataaaacccacgttttgctctgacccggtttcggtgatttacaccaccacctcatcagggaagcgatacctgtacggtatttgcgggccagccagtgagccagcttccagaacacgacacggtcgatataactgaagactttggccttaaaatcaacgaactgatagaacatggcccagcctttcagttttcggttgagttgttcagccatatcgactttgctttcactgtagttgcctgataacagtgctgtcagcgatgcggcgaagtttctggctttctcctgcgggatcgttgagaccactcgcatctcgccataacgactgcgtttgcgaatgatcctgtgccccagaaagataaagccgtcattaacatgggtgattttagtcttatccatgttcagcctgagtttcagactgccttcgagcacaccccgacactcctccctgatggcttccgcctgtgctttggtgcctttgacgatgaggacaaaatcatcggcatagcggcagtacgccaccgcgggtttccactgccagttttctctgaccgccgtacttcggccccgttggatactgttattccagtaccaccgatcttttctggctttcccgctcaggtagcgctcatgcaggtattgatcgaactcattcagcatgatgttcgataatagcggcgatataacaccgccctgtggcacaccttcactggccgcccgaaagagaccgacatcgatatgtcccgccttgatggttttccacagcagagtcatgaaacgtgcgtcactgatcctgcggcgtacaaccttcatcagcagtcgatgatgtacggtgtcgaagtaactggacaggtcgccttcaatcacccagcgtccccgggtttcaccacagtctgtgagctgtaatttcaccgtgcggatcgcgtggtggacactgcgctcaggccggaagccatatgagagcgtatgaaaatcactctcccatatcggctccatcgccatcagcatggcccgctgaacaatacgatcccgcaacgcggggatacccagtggtcgcagtttgccgttgcttttagggatgtaaacccgtctggcgggcaagggctggtagtggcctgagagtaattcatccctgaggatttgcagctcaacagccagtctggcctgtagcattgttttgttcacgccatcaacgccgggggtatgggccccctttgatgaaagcgtgatccgcgccgcttcagccagccattctggttgtgttatcagacgcagcagccgttgaatccgtagggacggatcggtggctgcccatgtggcaagcttgcgttgcatttcgctgattatcaaaggtcttcacctcgttaggtcagttaattcacgtcgcaaacacattcaaactgcttcccttcgccatgtaatgggctttccccatcgcggactactacggaagctccgccagccagcgcgtcatcggagccatgcccccttaacatccgtcgctgaccttccccggtttacctgcctggactcaggcatactgaggaggctgcccgtcgcactctttatccttgcttgccgcaagttggcagaagtcagcaacgcaagtgtgatagacgctgctgccccggtgtttcgcatacatgtcaaaacaccttcgaccggcagtgcttacgtatcactgccagttcctcctgcacggcctgtcagatcacgtaggccgtggtgacgttttcaacccacagaggcggattaacgggttcatgttcttcagcctttcagtacttaaccttgaggatcatctcgcttagtgatctcgcctcaatccccgttgtcagcgggttacatcaccctgcgggcatgccgcaggtcactgccgctcaggttctccaccgtcacacccggtgggattgttgggtttctcatcgtgagttaccggttcaatattccagacagactcgcggttcatttaagcatccatgcccgccctgaactccgggcacaccgtaagtaaaatcagccacccacagctggtcaggtcgttctgccacgaactgacggtttacgcggtcgcctgcggcaacggctttccggctgatggtcgtacggacctttttaccccggagaacaccggcaagtcccataaccgccatgagacgtgccacagtgcatctggccactctgataccttcccgtaacaactgacgccagactttacgcacaccgtataccttgtgattttcatcgtatacgcgctgtatctctttcttcagccagtcatcgcgctgcgcacgggcactgcgtttatccggatgatgtcgctgttgctgacagtggtaatacgttgacggggcaatatgcagttcactgcataccggtccgaccccgtacagcttacgcagcttatccagcagtggcatcactttttccagaggcggtcgaactccgccttcgcaaaataagcggaagcctggcgaaggatatcgttactgcggcgcagttcacgattttcacgttccagctctttcagacgctgacgttcagcggtggtgagccctccatcaccgccccggtatcccgctcatgctggcgaacccagacacgcagagtctccggcgtacagccaatctttggagcaatggaacaaattgtcgcccattgtgagtcatattcgctctgactttccagaaccatacggactgcccgttgacggacttcgggggaaaaacgagtatttttagtcatcctgtttacctctttctcaggaagtttagtctccaggattcccggggcggttcactgaagcagtcagacacggaatgagtgatcctcgaaaaagaattcagggaagccagaatgcgctaatacctgcacgtagaaagaggccagctcactgcgtaaatcgtcatggggctaaaatccccgaataagagtttgtaaaatccaagatacagtctgactgtttcaggttctttaatccgcgatataacgaagctcccggagctgcgtaggtctttttgggcttaatatttgacaaaggtcataagaatttttctttccgagacagactgcacgaagcgctctttccgctgtgttattgtccgcctccgccagaccgtcatcacagaagttgcacaacgtaacccagtgcttcctgatataccggaacgcatctctcagacggcattttttcgataacgtgtgttctttctcctgcatcagcttatacagggaagtcagtagcggtttactctgcatttgcctgaccgccaggcgttcagacaccggcaacccgcgtatttcgtgctcaatggcgtacagttcaccgattagtttcagtgcttcttccgccgtcgcgcttttggtactgatatatacatcgtggattttgcgccgtgcatgagcccagcatcctgcttccgtcaacgcgccgccttctgcagaatgagtcgtagatggagagtggatgatgcagggggtgtttgtcgaagttcaccagattttcatcaagatgcacgtcatactctttttctccggaggcagtgccagcatggactgctgctcttcgagccagcgatcgcagggacgtgcctggattgtttcatgctttcgttggttagcgacatcgtgcagccagcgcagaccgtggcggttggctgtttcaacatcgacagtgatccccatcgggcgcaggcgagtcattagtgggatgtaaaaactgttacgggtgtactgcaccatccgttccaccttacctttagtctgtgccctgaaggggcgacacagtcggggagagaagcccatctccttgccgaactgccacagcgaaggatggaaccggtgctgaccggtctgatatgcgtcacgttgcagaaccacagttttcatattgtcatacaacacttcgcgcggcacaccaccaaagaagcggaacgcattacgatggcaggtctccagcgtgtcataacgcatattgtcagtgaattcgatgtacagcattcggctgtatccgagaacagcaacgaacacgtgaagcggtgagcgaccattacgcatagtgccccagtcaacctgcatctgtcgtccgggttcagtttcgaaccgaacggcaggctcctgctcctgaggaaccgagagagaacgaatgaatgccctgagaatggtcattccaccacgatatccctggtctctgatctcgcgagcgattaccgttgccgggattttgtaaggatgagcatcggcgatgcgttgacgaatataatcccggtattcatccaggagtgaagcaacagcaggtcgcggcgtatattttggcggctcagattttgcctgcaaataacgtttaacggtattgcgggagatccccagttctctggcaatcgcccggctactcattccctgcttgtgcaggattttaatttccataactgtctcaaaagtgagcataaactctcctgaatcaggagagcagattaccccctggatctgatttcaggcgttgggtgtggatcactattgcaccgttcgtgacaccatccgcagactcatcttgcttgcttcagcggtgtgctgcaagcggatgcgtacgccgggttcaacgagctgtatcgcaatgatgggataacggaagctgcctgctgggttcatgcccgccgaaagatccacgatgtgcacgtccgcactgacggaagaagccctggagcagatcggtcagttgtacgccatagaggcggatataaggggaatgccggcagagcagcggcttgctgaacgtcagcgaaaaacgaaaccgctgttgaaatccctggaaagctggttgcgtgaaaagatgaagaccctgtcgcgacactcagagttggcgaaggcgttcgcgtacgcacttaaccagtggccggcactgacgtactatgcgaacgatggctgggtggaaatcgacaacaacatcgctgaaaatgccctgcgggcggtcagtctgggtcgtaaaaacttcctgttcttcggctctgaccatggtggtgagcggggcgcgctactgtacagcctgatcgggacgtgcaaactgaatgacgtggatccagaaagctaccttcgccatgtgcttggcgtcatagcagactggccggtcaaccgggtcagcgaactgcttccgtggcgcatagcactgccagctgaataacacatccccgtcaatacggccctcgctgtacgcttaccgcttatccaacggacatccgcaaagtgatctatacgacgaatgccatcgagtcgctaaacagcgtgatccgccatgcgatcaaaaagcgtaaagtgttcccgacagacgactcggtgaaaaaagtggtgtggctggcaatccagtctgcgtcccagaaatggacgatgccgttgaaggactggcgaatggcaatgagccgctttattatcgagttcggtgaccgcctggacggtcacttctgagaaaggcatttacacagaatcttaaacaggctcgcgccagtcggcaaaactagttgacgtctaatacactcccccttaccgaagaccttcagttttatattttaagagtctctgagaaaggctgccttccggcagccctttacccccacatcagaacatataccggaaattcgcgtttaccgcattatccacgttatatttaccaaaggctgacttctcaaactccagaccaaagcgcatattgtcctttatctgcgcattcataccaacattaaacagcatccggctgtccttctctccttttatccgtttctccccggacgcatcacgcagtacggtctctccattattcagcaggtcaaactgccagctggttccggcacgggccgtcacactccagtccttaccactgaaggtcttgcccagttcaacccctgttcttccaaccagcggactgaagtccctgttcttcatgctcaggtccatatcaccgtctttccagcggaatgttttcccggacacggcgccgtaaaccagttcagcctgcggctcaatgaacgtgtcctctgtcaggtgatagcggtaacccgtttcagcaccggcataccaggaatgggtgttgtagtgtttcgttcccaggctagcaaagttacctgtgtaatcattgtcatggtgaatatatttaccaatcaaatcgatataggcaccggactcaaacaatgctgaagcatacagaccgccccccaccgatttcgtctttccgctgaatgcatggctgtctgcactgctgtcggtataggtcatcgtgacaccggtaaacaggtccacaccgtccagttcatgttttttgtcaaagccgacctgaacatgggtgtaattatcactgtaaccaccgtctgcagaaccggcaccactcatgatgcgcgcccaggcaccggcatcaccgtttgtgtcacgcaggtcacccatacgtttgttcagattgttaacttccgtcatgaagtttttatacccggcattcatgaaactgtcagccttcgcggcagcggctttatcagcctccgctttaaaaccatccagtatccacttcgtattgccaccactggtatcaacatgcagggttggggtcacccgactgaaacctgtcacccgggtgccggccttaaacatctctgctgaagttcccgccggtgccgtgaccagaggaatattcagggcctgtccctgagcaggattattcataaagctgacgttcaggctgttatctgaaccagtggctttttcagtcacattaattttatcggcatttttcaggtccgtacgcaaaacaaaatcactgcctgttgcatccagtttattcaccgtcagggtacggaatgtacggtctccttcagaactaatacggctgtttctgacggtaagactgtggatggcagagtccccacccagagtccacagtgcattatgcatactgacatcagccctgccaccggttatggcaccattgaatgctgcgttatagccctcaagaagactgccggcaaacgccgatgcagccgtttccgcagaagccagttctgccggcgtgtcagacccgatggtaactgttgatgccgcagaggcatgaatatcaccggaagcatgtgctccacgggtaatttccagtgctgcgttatcgccggtcaggtcatatccgtccgtcagatatacagcaggggcatactgattagccgtatctttaaccggtgtaccgctcagggtgattttgccgttcttaccggcctgaatatgcccgtcgctgaaaagaccgttcagtgctgtaagatgaccgccatcatgcactgtcagtgaactgccggcaaaagcacccggggctgtcaacaggacgtccggagaggtgatgctgacggcactgtcataagcgtcaatccccccggtgaacctgctgccgatatccagggctgagttatggttcagcgtaatattcccttcatactggctcctgtcattcacggtgtccgggacagaggtaccttcctccggaatgacataatttcctgttccgtcatttttatccacaaatgccctgtcacttcccagtgtgatatggctgttatccgacttaatgtcactgttcagcgaggcgttacgtgaaagatggaagtcagcgtctttcagcgacagtgttttcattgtaaactgacggttttcccagtctttctggttcaggctgaccggtgcactgccactgatggaggcatggataaccggatgtccctggaatatcagggtgccactgtcctgactcagggtaccttccggcaggttcacgctaccatcaaagatgacctttcttccccccggcacctgtggaatggcgacatccatattcccggtcagctgaccatgaaagataacgggttgttttgcccgcccggccaggatcctatcttttactgtctgaactgctttgtttttgtccatgccaacaaactcccactgagccggatcattcaggctgttcccccacagagtgttaccatagctggcagatttcagaatatagaagcgggtctggctgttgagtatcatgctgtacaggtttcctggagtgccggtaccaccaaagggggatatatttccaatcgtcggttcactgacatttgtatcctgagccttaagatccagtaaaagctgggatttttgctgtgcattatttgtaatcaccgccccgtaatcagcagcctgcagtcgggtgaaggtaacggcattaccattaaggtcaagcttacctccccggtatccccatgaaatgttatccggattgacctgacgggcatccccgagcaccacggtcggacgtccgctggcgaggttcactgaactgaaggcctggatattacctgcagtgtctgcctgctggttaagtacaacgataccgtctcccgttttcagtcctcccgggtttacacctgttccgtttatggtcagggttccttcccccagcttatgcaagttgtcaccggcaacgccgttgaccttccaggttacattcgtccccttgtcagtaataatgccggcacccgtccatgtttttccggattcagcagatacggtgtaactgtctttaaattcgagataaccggcaccctgagtcacactgtctttcaggataattgcaccattctgcccgctgaataccagatttttaccggcattgaggtcattgtctttctgcccgtgcatggtccagtttttactgccctggctcagggtacctgtgcctgatgttttgtcgtatgtccagttcagggggcccagtccggaaacaaagtctacgggggcatcgaaatcgtcctgcataacctggttcagataatctgttggtatgacattccaccagttcgtagcaccattaatacctgcatatgctcttaatacagcaacaataacccattttttttgttgtttatcataagcaaacaaaggagaaccactatccccaggggctccatagtcaggtaaagggccgtttacaggattataagtttgcccgggattagagactattgttgcatcagatatcagaggaactcctgtggttcctcctgttttaaaagcatatccaccggcaaccttaactaaatttccgtccttgtccttagtgtactgcgtaccactacccacccgataaaaagcggtgtaacgttcagtgtatttataagcattggctttggttccttctgatgttaccgctgagggaataacttctgtaaccagtttattcagacgtggagcatggaagtcaatagaagggtggttattacggtcaacaagggaatatgtatttttcccattaccaaagctcacactccgatatcctccgttatgctttacgctgacgatatactgaggcgatacaagcgtagcaacgccatttgagctcacactgctgaaatcggccattggggctttacccagtcttcccacaagttttccgtccttatcatataccggaatatcattggcaccaggtacaaaaagccctttgttttcggcgaaatcacgataaatctgataggcaatatcggaacggacaatacccgcctgggatatctgagagtaacacagacagattgctggaatgccagccagaagaatatgcgttaatcttcggcatgtcttttttattaccctgcgggcaagttcagagacagcaataagccccccggtgacggggcaatatttaagagaataaactttattcactatggattctccatgatgtttacaagggatataaaagtaaaatagctgaagaagctaataataacccgacgttatcaccagaaaggaaaatatagttactgcattaatgtgtttttgtgaactgaaccgccccgggtttcctggagagtgttttatctgtgaactcaggctgccagatcatcatttccgatggaagcataataagctttttctgcttctgccggtgggatatggcccagcctttccagcaatcgtcgattgttataccagtccacccacgtgagtgtggccagctccacttctgtccggtttttccagctcttacggtgtattacctccgctttgtaaaggcccttgatgatctctgccatcgcgttgtcatacgagtcaccagtactccctgttgatgccagcagttttgcttcttttagtcgcgccttataggccagtgacacatactgagagcctttatcgctgtgatggatggtgccagacggacgacgggcccacaacgcctgctccagtgcatccagcacgaatgtcgtttccatagacgatgagactcgtcaccacacgatgtatccggcaaacacatcaatgatgaacgccacatagacgaagccctgccatgtgctgagtagagtaagaggcaggggcgtagtcggactatttccctgcctctcctccccgaaccggacgtgcacctttcagcgcatccggctctccatttaaatgctggcgaacgccattgccacttctgtaaagcgcgatgtatacgtgtttctggtctccgtcctcagatagggattaccttcgggtagccgccagcggaacagcttcttgccttgccccaccaaccggtacagtatttcgccgctgagcttgccgtgattggttttaccaaataaaacccacgttttgctctgacccggtttcggtgatttacaccaccacctcatcagggaagcgatacctgtacggtatttgcgggccagccagtgagccagcttccagaacacgacacggtcgatataactgaagactttggccttaaaatcaacgaactgatagaacatggcccagcctttcagttttcggttgagttgttcagccatatcgactttgctttcactgtagttgcctgataacagtgctgtcagcgatgcggcgaagtttctggctttctcctgcgggatcgttgagaccactcgcatctcgccataacgactgcgtttgcgaatgatcctgtgccccagaaagataaagccgtcattaacatgggtgattttagtcttatccatgttcagcctgagtttcagactgccttcgagcacaccccgacactcctccctgatggcttccgcctgtgctttggtgcctttgacgatgaggacaaaatcatcggcatagcggcagtacgccaccgcgggtttccactgccagttttctctgaccgccgtacttcggccccgttggatactgttattccagtaccaccgatcttttctggctttcccgctcaggtagcgctcatgcaggtattgatcgaactcattcagcatgatgttcgataatagcggcgatataacaccgccctgtggcacaccttcactggccgcccgaaagagaccgacatcgatatgtcccgccttgatggttttccacagcagagtcatgaaacgtgcgtcactgatcctgcggcgtacaaccttcatcagcagtcgatgatgtacggtgtcgaagtaactggacaggtcgccttcaatcacccagcgtccccgggtttcaccacagtctgtgagctgtaatttcaccgtgcggatagcgtggtggacactgcgctcaggccggaagccatatgagagcgtatgaaaatcactctcccatatcggctccatcgccatcagcatggcccgctgaacaatacgatcccgcaacgcggggatacccagtggtcgcagtttgccgttgcttttagggatgtaaacccgtctggcgggcaagggctggtagtggcctgagagtaattcatccctgaggatttgcagctcaacagccagtctggcctgtagcattgtttgttcacgccatcaacgccgggggtatgggccccctttgatgaaagcgtgatccgcgccgcttcagccagccattctggttgtgttatcagacgcagcagccgttgaatccgtagggacggatcggtggctgcccatgtggcaagcttgcgttgcatttcgctgattatcaaaggtcttcacctcgttaggtcagttaattcacgtcgcaaacacattcaaactgcttcccttcgccatgtaatgggctttccccatcgcggactactacggaagctccgccagccagcgcgtcatcggagccatgcccccttaacatccgtcgctgaccttccccggtttacctgcctggactcaggcatactgaggaggctgcccgtcgcactctttatccttgcttgccgcaagttggcagaagtcagcaacgcaagtgtgatagacgctgctgccccggtgtttcgcatacatgtcaaaacaccttcgaccggcagtgcttacgtatcactgccagttcctcctgcacggcctgtcagatcacgtaggccgtggtgacgttttcaacccacagaggcggattaacgggttcatgttcttcagcctttcagtacttaaccttgaggatcatctcggcttagtgatctcgcctcaatccccgttgtcagcgggttacatcaccctgcgggcatgccgcaggtcactgccgctcaggttctccaccgtcacacccggtgggattgttgggtttctcatcgtgagttaccggttcaatattccagacagactcgcggttcatttaagcatccatgcccgccctgaactccgggcacaccgtaagtaaaatcagccacccacagctggtcaggtcgttctgccacgaactgacggtttacgcggtcgcctgcggcaacggctttccggctgatggtcgtacggacctttttaccccggagaacaccggcaagtcccataaccgccatgagacgtgccacagtgcatctggccactctgataccttcccgtaacaactgacgccagactttacgcacaccgtataccttgtgattttcatcgtatacgcgctgtatctctttcttcagccagtcatcgcgctgcgcacgggcactgcgtttatccggatgatgtcgctgttgctgacagtggtaatacgttgacggggcaatatgtagttcactgcataccggtccgaccccgtacagcttacgcagcttatccagcagtggcatcactttttccagaggcggtcgaactccgccttcgcaaaataagcggaagcctggcgaaggatatcgttactgcggcgcagttcacgattttcacgttccagctctttcagacgctgacgttcagcggtggtgagccctccatcaccgcccccggtatcccgctcatgctggcgaacccagacacgcagagtctccggcgtacagccaatctttggagcaatggaacaaattgtcgcccattgtgagtcatattcgctctgactttccagaaccatacggactgcccgttgacggacttcgggggaaaaacgagtattttagtcatcctgtttacctctttctcaggaagtttagtctccaggattcccggggcggttcagtacttgctmcagcgcatccagcacgaatgtcgtttccatggacgat

SEQ ID NO: 604 - DNA, 6452 bp, Escherichia coli
gttaatacgatgctatacgatgcattcacagtgcccggccagaggatgccccgtcgctgcatatggatcagggttggcaatatcgaatcgcaggctataggcaaagttaaagccccatggagtagcaaaaaatatgccgcacaaaggaaacggtctgaataacgcagtgatgaagaacttcttcagcacacggctaaaacgcatagtgatcgagcgctgattctagcgaacaactgaactaatacatcagaatctgcattatgttaaataaatataaaaagatggtttaaataccccgttacttttgacttacactatacggtatcgcatcgtttaatattcgcaccggccagatttttatttctattagttgtcacaatactgaatgcgtacgaccacagtattctggctcctgtgtggttatgctttaattctgcgttccgggcagataagcagttgcttgcaggaatccttcttgtgttaatgtcagttcccctttttaccagtgctgatttccacattccgtccaacagagcttatagcctttccctggattatagcattgtccggctgaagttctttttgaataataatagaagcactgctggcagatccagtccgtttttcataacccactgtactgataaccataatctaatcagtagaaattgagtcgaaaataagcactactccatacaggataattagaggtcagtttgattattcacaattcatcatcagcattttctatttctgacgaaatcaatatgaaaataaccatatatgataattattataataacggctttaattggaatacatatattacaacgtattatatataattggtattctgggaactatattctcaaaatacagtagaaacgaggtatgtttctggtggaaaggacagtgggattaaaaagtaagaattgataaaaaaaacgccagcaacacatagtgccggcggagggaataccccatggagaaaatgtgatgcctagagcatcatgaatatataattaaaaatagttagcgttgtcaatactttcacaaaaataattttcgtagtttcgtagtatagaaagatatttttatgcatgacctacctgaatttgctccgggtagaggttataaataaaaattgaatcacgacaaacacaatattcatagtatggcgatgcctacgccagcaagaatagcgccaataatattgggaatataatagacaccagacgcacaggcatctcactccttaacaaacaacaatcaggatatttacttttatcaagctaactgtttacacccaaagtgcacacaattaaccattcaataacaaatggcaatatccatagccatacgactttaccttgtaatgttcggtatttctttataattattctgggaaatctatcatttatttttaaaatcaaattatcttgttgtttaaaaataagttcacatactttatcatcttcttccgccatcaacatctctgcatacttaaacatttcagaacgttcctttagcacagaagagtaattatatgtccagttcccaggcaataatgcttatggatatttaattcataatttagagaatattttgcaataatatttggcagtattcagaaatacctgaaaaatcatactatacagccccagggaatggataaagattctaacaaagcatttcaacaatatatacttgttaaaaatccatatcgaaatgccgttgcagcattaatatatgcctcattcataaaatgtaaaagagcaagctcgtaccagtaggggggaaattcattgacatgtcctgtcaatacgtacagagccctgccatgcttgccagcacgtaacaattccgcccccagtaaccagcgtgtcccctgattattctcagggttatatgttagtattttatcaatgagtataacggcatcctgatgacgctgtaaatgaacattcgccagaattgcagcataaagagcgcaaatgcatatgccagatgagcgtgaatatcaatgatgtcaggagcatgtcaggcaagacgcctgagtttgttgacgtaatttgtttcgtttatttcatcactatcgtatgcgtcaagagttttttcaaactcatcccgaaatgggctaagcctggtttcaggaaataagaaatacccctggttattgttcacttaaaagtataatttgtaattcaaatcctgagcctgtaaagcggggagtaacatattctattctgaagagaataaaagtcgtgatgcgatgtatcaagcccggattgtaatcccagattaacatagatcacaaaacaacttattcttcactaacgtcaagataaatatcgttgtatgccttatcacgactacgaataccagcaagatacaactgacatacggaaagataccacgttttttactcccgaaaataacgctaaaaagctacttccccatcgtttgtccttagtattgtcagcgccaacaatgtgggctgacatgataaagctgtctaggaaattgttcgcctcctcagcggacaatccaaatggtgattgtctctgttaaacgtttattttgaaggtcgactgaataaggtgatgacgctgtagaatttttcacgtgccacagaattttgaacgctttctcttacaatatttcaatgtttctatcagtattcgccggaagaagtcatcgaccaaatcatcccagtcgtctcgcaccactgaccattcatggttgacatgtggtggaaatccgcttctacagtaaccattttttattcgcaaaaccgaacacgacatacggatagctgttaactggcatgcgaggcagtcgttatttatatttagttttgtcaataatctttattttttgtaaaaggtaaatataaattattctcattattgtttgtatttgtgtattgtcttgccggttaacatgatcggagattagtaatatgcgaataaccactctggcttccgtagtcattccctgtctcggattttcagccagcagcatagctgctgcagaggatgtgatgattgtctcggcatccggctatgagaaaaagctgactaacgcagccgccagtgtttctgtgattagccaggaggaattgcagtccagccagtaccacgatctggcggaggctctgagatcagtagagggtgtggatgttgaaagtggtacgggtaaaaccggagggctggaaatcagcatccgaggaatgccagccagttacacgctgatactgattgatggtgttcgtcagggcggaggcagtgacgtgactcccaacggtttttctgccatgaataccgggttcatgccccctctggccgccattgagcgtattgaggttatcagggggccgatgtccacactgtatggctctgatgcgatgggcggtgtggtgaatatcattaccagaaagaatgcagacaaatggctctcttccgtcaatgcagggctgaatctgcaggaaagcaacaaatggggtaacagcagccagtttaatttctggagcagtggtccccttgtggatgattctgtcagcctgcaggtacgcggtagcacacaacagcgtcagggttcatcggtcacatcactgagcgatacagcagccacgcgtattccttatcccacggagtcacagaattataatcttggtgcacgtcttgactggaaggcgtcggagcaggatgtgctctggtttgatatggataccacccggcagcgttatgataaccgggatgggcaactggggagtctgacggggggatatgaccggaccctgcgctatgagcgaaacaaaatttcagctggctatgatcatactttcaccttcggaacatggaaatcgtatctgaactggaacgagacagaaaataaaggtcgtgagcttgtacgcagtgtactgaagcgcgacaaatgggggcttgccggtcagccgcgggagcttaaggaatcgaaccttatcctgaattcattactgcttacccctctgggagaatctcatctggttacggtggggggcgagtttcagagctcgtccatgaaagacggagttgtccttgccagcacaggtgaaactttccggcagaaaagctggtcggtatttgctgaggatgagtggcatctcacggatgcacttgcgctgactgcgggcagccgctatgaacatcatgagcaattcgggggacacttcagtccgcgtgcatatctggtctgggatgtggcagatgcctggacgctgaaaggcggtgtgaccacgggatataaggcacccagaatggggcagctacataaagggattagtggtgtgtccgggcagggaaaaacaaatctacttggtaaccccgacctgaagccggaagagagcgtcagttatgaggctggggtgtattacgataaccccgccggtctgaatgccaatgtcacaggttttatgactgacttctccaacaagattgtctcttattccataaatgataacaccaatagctatgtaaacagcggaaaggcccggttgcacggtgtggaatttgccggcacattgccgctgtggtcagaggatgtcacgctgtcactgaattacacctggacccgaagtgaacaacgtgatggtgataacaaaggtgcgccgctgagttatacccctgaacacatggtgaatgcgaaactgaactggcagatcaccgaagaggtggcatcatggctgggtgcccgttatcgcgggaaaacaccacgtttcacccagaattattcgtcactgagcgctgtacagaagaaagtgtatgatgagaaaggagaatacctgaaagcctggacggtggtggatgcaggtctgtcgtggaagatgacggatgccctgacgctgaatgctgcggtgaataacctgctcaacaaggattacagtgacgtgagcctgtacagtgccggtaagagtacgctgtatgccggtgattacttccagacgggatcatcaacaacaggatatgtgatacctgagcgaaattactggatgtcgctgaactatcagttctgataataacaaaacgctatcactgacggtagaatacgttgccactgcaactcctggcggaacagtggcaacgtattaggttaagtgcatttccgatccgctaatgagatttcgttaccaacaactaatatcgtcacaggaaatgcacggattatttttaacttatcatttacatacttgtccagagtgtaagcgcaccgtgaaggacgtggggtaaaaattagtttacagagagagtgacgttccaaggcaacaactctttcatgcggttggcaggccaggtgttgattacactgatcacgtggcgtagccacgtttccggctcgattccgttaagttttgcagctaccgatcaggctgtacatcactgccgcactatcgctcgtcatctcaaagtccggtctcgtcagcaggaaggtatcattctctcccgccatttttccaggggcccggtcagataagtccctttgtctatcgctgactcctgactcataacccggttagcagaatgcagggtcaccacctcgccacgaccgaatccgaataagtcaattgcaccttctcaatcgccattttgtcacaattaagtytgagacaccgtattgacgcttatttattggtgagtactacgttccatggcaggagttcgccaactcggttggaaggccattccggcagtacgctcagaatatggcgcagatacgcttccggatcgataccgttcagacggcaggtgccgatcagcccgtacagcagtgcaccacgctcgccgccgtgatcgctaccgaagaacacgtagatttttctttccgagacagactgcacgaagcgctctttccgctgtgttattgtccgcctccgccagaccgtcatcacagaagttgcacaacgcaacccagtgcttcctgatataccggaacgcatctctcagacggcattttttcgataacgtgtgttctttctcctgcatcagcttatacagggaagtcagtagcggtttactctgcatttgcctgaccgccaggcgttcagacaccggcaacccgcgtatttcgtgctcaatggcgtacagttcaccgattagtttcagtgcttcttccgccgtcgcgcttttggtactgatatatacatcgtggattttgcgccgtgcatgagcccagcatcctgcttccgtcaacgcgccgccttcacgttcggcactgaacagccgatcgtaacctgcgaacgcatctgcctgcaggataccccggaagggacgaaggtgttgctccggatgtttaccctgatggtccggtgagtaggcgaaccagaccgccggaggttctggcgaaccggcatttcggtcatcccggacatacgtccagatatatcctgttttcgccttctttctgcccggtgccag

SEQ ID NO: 605 - DNA, 59 bp, Escherichia coli
  modified_base (3)..(3): a, c, t, g, unknown or other
  modified_base (8)..(8): a, c, t, g, unknown or other
  modified_base (15)..(18): a, c, t, g, unknown or other
  modified_base (25)..(25): a, c, t, g, unknown or other
  modified_base (28)..(28): a, c, t, g, unknown or other
  modified_base (32)..(39): a, c, t, g, unknown or other
  modified_base (41)..(44): a, c, t, g, unknown or other
  modified_base (48)..(54): a, c, t, g, unknown or other
  modified_base (57)..(59): a, c, t, g, unknown or other
ctnccccnagataannnngctcacngcnacannnnnnnnannnncttnnnnnnngcnnn

SEQ ID NO: 606 - DNA, 261 bp, Escherichia coli
cttcccgcccactgtaacgatcgctgtcctgttcacgttgtttcagcagagcctcagccagttcaacttcacgacgcagtttttcagaacgggtaccgaacagcatccggcgcagtttttctatctgagcccgcagatgttctatttcccgttcatcttcttcgatcttttcttcggcacgtgtcagtgcagagcgcaggaaggcttccgtctcttcaaccagactcagttgctggtcttctgacggagggcttcagcctg

SEQ ID NO: 607 - DNA, 37 bp, Escherichia coli
  modified_base (1)..(15): a, c, t, g, unknown or other
  modified_base (21)..(29): a, c, t, g, unknown or other
  modified_base (36)..(37): a, c, t, g, unknown or other
nnnnnnnnnnnnnnncgtctnnnnnnnnngactcann

SEQ ID NO: 608 - DNA, 155468 bp, Escherichia coli
ttctgatctgaaatacgccctttctgatttcaagaaacgattttgaataggagtagtgaaccgccccggaaatcctggagactaaacttcctgagaaagaggtaaacaggatgactaaaaatactcgtttttcccccgaagtccgtcaacgggcagtccgtatggttctggaaagtcagagcgaatatgactcacaatgggcgacaatttgttccattgctccaaagattggctgtacgccggagactctgcgtgtctgggttcgccagcatgagcgggataccgggggcggtgatggagggctcaccaccgctgaacgtcagcgtctgaaagagctggaacgtgaaaatcgtgaactgcgccgcagtaacgatatccttcgccaggcttccgcttattttgcgaaggcggagttcgaccgcctctggaaaaagtgatgccactgctggataagctgcgtaagctgtacggggtcggaccggtatgcagtgaactacatattgccccgtcaacgtattaccactgtcagcaacagcgacatcatccggataaacgcagtgcccgtgcgcagcgcgatgactggctgaagaaagagatacagcgcgtatacgatgaaaatcacaaggtatacggtgtgcgtaaagtctggcgtcagttgttacgggaaggtatcagagtggccagatgcactgtggcacgtctcatggcggttatgggacttgccggtgttctccggggtaaaaaggtccgtacgaccatcagccggaaagccgttgccgcaggcgaccgcgtaaaccgtcagttcgtggcagaacgacctgaccagctgtgggtggctgattttacttacggtgtgcccggagttcagggcgggcatggatgcttaaatgaaccgcgagtctgtctggaatattgaaccggtaactcacgatgagaaacccaacaatcccaccgggtgtgacggtggagaacctgagcggcagtgacctgcggcatgcccgcagggtgatgtaacccgctgacaacggggattgaggcgagatcactaagccgagatgatcctcaaggttaagtactgaaaggctgaagaacatgaacccgttaatccgcctctgtgggttgaaaacgtcaccacggcctacgtgatctgacaggccgtgcaggaggaactggcagtgatacgtaagcactgccggtcgaaggtgttttgacatgtatgcgaaacaccggggcagcagcgtctatcacgcttgcgttgctgacttctgccaacttgcggcaagcaaggataaagagtgcgacgggcagcctcctcagtatgcctgagtccaggcaggtaaaccggggaaggtcagcgacggatgttaagggggcatggctccgatgacgcgctggctggcggagcttccgtagtagtccgcgatggggaaagcccattacatggcgaagggaagcagtttgaatgtgtttgcgacgtgaattaactgacctaacgaggtgaagacctttgataatcagcgaaatgcaacgcaagcttgccacatgggcagccaccgatccgtccctacggattcaacggctgctgcgtctgataacacaaccagaatggctggctgaagcggcgcggatcacgctttcatcaaagggggcccatacccccggcgttgatggcgtgaacaaaacaatgctacaggccagactggctgttgagctgcaaatcctcagggatgaattactctcaggccactaccagcccttgcccgccagacgggtttacatccctaaaagcaacggcaaactgcgaccactgggtatccccgcgttgcgggatcgtattgttcagcgggccatgctgatggcgatggagccgatatgggagagtgattttcatacgctctcatatggcttccggcctgagcgcagtgtccaccacgcgatccgcacggtgaaattacagctcacagactgcggtgaaacccggggacgctgggtgattgaaggcgacctgtccagttacttcgacaccgtacatcatcgactgctgatgaaggctgtacgccgcaggatcagtgacgcacgtttcatgactctgctgtggaaaaccatcaaggcgggacatatcgatgtcggtctctttcgggcggccagtgaaggtgtgccacagggcggtgttatatcgccgctattatcgaacatcatgctgaatgagttcgatcaatacctgcatgagcgctacctgagcgggaaagccagaaaagatcggtggtactggaataacagtatccaacggggccgaagtacggcggtcagagaaaactggcagtggaaacccgcggtggcgtactgccgctatgccgatgattttgtcctcatcgtcaaaggcaccaaagcacaggcggaagccatcagggaggagtgtcggggtgtgctcgaaggcagtctgaaactcaggctgaacatggataagactaaaatcacccatgttaatgacggctttatctttctggggcacaggatcattcgcaaacgcagtcgttatggcgagatgcgagtggtctcaacgatcccgcaggagaaagccagaaacttcgccgcatcgctgacagcactgttatcaggcaactacagtgaaagcaaagtcgatatggctgaacaactcaaccgaaaactgaaaggctgggccatgttctatcagttcgttgattttaaggccaaagtcttcagttatatcgaccgtgtcgtgttctggaagctggctcactggctggcccgcaaataccgtacaggcatcgcttccctgatgaggtggtggtgtaaatcaccgaaaccgggtcagagcaaaacgtgggttttatttggtaaaaccaatcacggcaagctcagcggcgaaatactgtaccggttggtggggcaaggcaagaagctgttccgctggcggctacccgaaggtaatccctatctgaggacggagaccagaaacacgtatacatcgcgctttacagaagtggcaatggcgttcgccagcatttaaatggagagccggatgcgctgaaaggtgcacgtccggttcggggaggagaggcagggaaatagtccgactacgccctgcctcttactctactcagcacatggcggggcttcgtctatgtggcgttcatcattgatgtgtttgccggatacatcgtggggtggcgggtctcatcgtccatggaaacgacattcgtgctggatgcactggagcaggcgttatgggcccgtcgaccgtccggcacggtccatcacagtgataaaggttctcagtatgtatcgctggcctacacacagcggcttaaggaagccggattactggcatcaacaggaagtacaggcgactcgtatgacaacgcgatggcggagagcatcaatggtctttacaaagcggaggtaatacaccgtaagagctggaaaaaccgtgcagaagtggaactggccacactcacgtgggtggactggtataacaatcgacgattgctggaaaggctgggccatactcctccggcagaagcagaaaaagcttattatgcttccatcggaaacgatgatctggcagcctgagttcacagataaaacactctccaggaaacccggggcggattcccggggcgktcaggccttcctccaggcgtttggtgaacaggcacagaccatcagcatcagcccaaagaattttaacggtgtcaccccgtcggccacggaagataaacaggtggccggagaagggattatcattcagcacatgttgtacctgttctcccagtccgttgaaggatttacgcatatcggtaacgccggcaacgagccagatacgggtacctgatgggagtgaaatcatcttcccctcccgctcagttcgcggatcaacaccgtgagcagctctggcgatggattttccagcgtcatgttaccgtgacggaactccaccttgcaggaactggcactgactctggtctgagtggaagtggataaagacggcgcaatggccgccacaggttttttctgctcatccggcgttatttctacaggtaataattcaacgccagtgtcagaagaggtcgttaccggaagacgccgcgaaacacgcccttcgttctgccagagcctgagccatttgaaaataacattatcattgacgccattttcacgtgcaatctgtgcaacacaagctccaggttgtgatgccagttccaccatacgaagtttgaattcattcgaatagtttttacgaggttcttttcgccagtcctgtaattccatacttagatgtccgtctatatcagatgggcgtctaagttaccaattttcgtctgatggctacatacggcggtcagtttacgcttacccattttgtcacaattaagtttgataaagcaggtcacctctgcactgaatctgctccagtgcctcattggtctccgtcctcccctttaaactgccggataagactgctgcacgtaagcggctcgccagaaccgtattgatatttactgagaggtcagatcaactttccagggcaacagatcgcgtacccggtttgccggccagtcctggagatgctcaataacgtaacgcagccatttttctggctctacattgttcagacggcatgtgccgatcagcgagtacaacaccaccgcatgttcgccaccgctgtcggaacccgcgaagagccagtttttccggcctacggccactccccgtaaggcgttctctgcgatgttgttgtcgatttccacccagccattactgcagtacacgttcagggccttccactgtttcagtaggtatgcgaacgcttttgccgtatccgagtgacgcgacagtgttttcatctgttgctgtatccggtcatacagtgactgcatcagtggcgcggctcttgcttttcttgccgccagacgctgttctgctgaacatccccggacttctgcctcgatggtatacagttcaccgatacgctgcagggcttccgtggtgatgtcggttggcactcttgcatgcacatcgtggatttttctccgggcatgggccatacacgcagcttccgttattctgccggattcgtataacgcccggtaaccaccgtaagcatctgcctgaagcacaccgctgtaaccggctaggtgattctgtggatggatacctttccggtccgggctgtacgcgaaccagaccgccgggggcatctgtgaaccggcgttacggtcatcacggacatagacccacagccgggcagttcttgttttaccactgcccggctcctggaccggaacggggatatcatccgcatgaactttaccgggcatcagtacatactggcgcaggacgtcatacagcggctccagcagttcagcaacggcaccggtccagcgacccagtgtggcacggctcagctccacgccctgacgacggtatatttctgactggcggtataactgtcaacgacggatgaaaagtggctcttccgcaacctgggtggagattttcatgccagtggactcattaccctctgcctgagtagttcaaatcctgctcgaccatacatctggcgtttcagcatcttcttcaggcgatttacatgaccttcgacaacaccattactccagcgactactgattgcctcacatatagctgcagcatcagcttccatccccgccgccacgcgccgaaattctgctgaaccgctttcgtggactcgagtgaaccaactgcttagctgtgatttattttgggttttcagaatacggtagaactcgagtgccagttgctgcgctattttcagctcaggttctttttcacacatcagactaataaatcgggaagcataattttcttcatccctggttattctccagggcatcaaccagcggcttacccgggagactgaaggaagtctgacggcagtagtaaccggtgggttccagcctttacgccatttggcaaccgcatccctgacgatggtttcactgcctgtaaatccccgggccaccatttcccgccatatccggctggcgttataattaccactttctcgttgctcttttaaccactccctccatggtgtcagcgaaaaacgaaaccgctgttgaaatccctggaaagctggttgcggaaaagatgaagacccagtcgcgacactcagagttggcgaaggcgttcgcgtacgcacttaaccagtggccggcactgacgtactatgcgaacgatggctgggtggaaatcgacaacaacatcgctgaaaatgccttgcgggcggtcagtctgggtcgtaaaaacttcctgttcttcggctctgaccatggtggtgagcggggagcgctactgtacagcctgatcgggacgtgcaaactgaatgacgtggatccagaaagctaccttcgccatgtgcttggcgtcatagcagactggccggtcaaccgggtcagcgaactgcttccgtggcgcatagcactgccagctgaataacacatccccgtcaatacggccctcgctgtacgcttactcatcacctgctattaatccccgagtcagtacttcgcggcctgacgcgatcaccctactcagtacttcagagcccgcctccggtacctgcctggcgatcgcccctgtgcaacaaaataaatcaaccgttatcaaaccacgatcgttcgtatgcgccgccgatgacgcgcgcctgaaaaacgcgtcaatatgagttccccggaagcttacgataatacgcttatgaacattacaacacgctcatgcggaacctggatgggggaaggaacggtgaagctgttagcgaatgaccggcgtttatacaaacgccggtcatgatgaatgatatttcagaatatacctcgggctaaaataccgggacagagatcaggcgtgattaatctgcagcatttttaataacagaagtactgagcttactttacctttgatgatgtaatagttatttccgtcggtactcatttttccctgaaataatgtcacggatgtttcttcctgctgatcctgcaggcgcagtcgtaaggtcatatttttaatgagctgagatccgggtggcaaggggtatttgctgtcagatactgggcgactgagtctgatgtggcgcgtatacagcccgttttcgtacagggtggcctctgttatggtgtcagtgaccagcatgtgggagacaatgctgtattcttttttaaagcacccaccagaaacggtgattgtaatgataatggtcttctcgatcgagatgtaaatacccgtttcgttatactgtccgtatcggaaccatgagaactcagttgcattccagccatgctccagaatatgtgcattttttgcctgatagtttctttttttattcgctcatgtttaaggcataacaggcagataaataatgtcagaaaaagaaagctaataatgagagcaagagcgatatagtctgtcacagggtaatacatattctctccggtagaagaagggccgcaaacgcggcccgggctgttatcagaaagagtaacggaagttggcgttgatcgcgttatccacgttgtatttaccaaatgccgatttctcaaactcaagaccgaagcgaagattatcgcgaatttcggcgttgagaccaacattcatgagaatacgaccgtctttttcacctttgatacgtttctcaccggacgcatcacgcagtacggtttcaccgttggcaaacaggtcaaactggtagccaaggccggcgcgggctgtgactttccagtccttaccggagaaggatttacccacatcaacaccggtacgcccaatcagcggattaaagtccttatccttcatggtcacgctcattccgcgatcctgccagtcgaaccgtttacctgatacggccccataaaccagttctgcctgcggctcaatccaggagtcttctgttacatgatagcggtagcctgcttcagcacccacatacaaggaatgagaactgtagtcttttgttccgagtccagcaaaggtcgccgagtactcattatcatggtgaacatacttactaatcaggtcgatataggcaccagagtcaaatatagcggaagcatacagacctgccccgacggacttcgtcttgccactgaatgcattactgctggcatgactgtcggtatacgtcatagtcagaccagtgaaaaggtcaagtccatccagctcatgttttttatccacaccaatctgcacatgggtgtagttgtcactgtatccaccagaagctgaacctgctccgctcatgatgcgggcccatgcaccggcctcgccattggtgtcacgcagatcccccattcgtttattcaggttgttgacttctgtcaggaaggctttgtaattaccggacatatacgattttgctgcaccggaagatgctgtattttcagccaccttatatccggtcagggtccacgtggtatgttcctgatcctctttcgtgctgatcacaggagatatgttgctgaaacctatggcctgagtactggctttaaatatctctttattgcttccttttggggctgttatcaggtcaacgtttaatcctgagttattatttcccactttctgtatatcgaccgacagactgttattgcttccggttaactgatttttaacaatgagtttatccgattgatttacagactggctcagatcagcccgcataatcacagcagtattagtggcatccagtgtgtttactgtcacagtatggaaacccgaattctctatgttactaaacaacaaaagactgtcgcgggtttttaatgattgcagggctgactgtccgtttactctccataaggtgttatacatgctggctgaggctgcaggagcatcaatacctccggtataagaagtatcaaagccacccagcaaacctgtagccagcggtgtgtgtgtggttttgtccaggttatcttctttatactggtcaacaccaaacagaatagatgcttttttgtctgattttatattaccattgacccaggcataattttgagcctttaacgtggcaccatcttctgtcatattatatccatctgacatatagattgccgggctgtatttattattttctgtaggggtgcctgttaatgtcagggttccggccagttcaatagctttatctacatacatttttccctgggcggtaacagtagctcctttgttgataatcaggtctgtattaattaaggataatgcaccagtcatagtaacagttgatttatcaccaacagttattttgctgttttgagcactcagactgccgttgaaactactttcgcctgctgaatccccggagcgaagctgttgtctgaatccaaaaccttcgccagtaatgtttcttcctgagaacatgtcaatgtatgcagttttatttcccagaacaatttgagagtttttagcctctatgtgtccttttacattagcatcccggcctatactcagggttgcgttttctaaatttaatttccggaaattaaatttacgactttcccagtcgggctgggaaaaagaggctatctgattgttggacttatattccgtattgtaacgtttatttacagtgctttcctggtcctttatggcagcagaatagtctttttgacataaaaaaggaattggacagttgttattgccttctttaaatatggcatgttctgtcgcatgtccttgtaatgttaactgtgcattccggacagagatatcgtttttgatatcgactgagccatcaaagatcagattggcattattgttatgttgctgggtagtattgataatatgatttatgcttatattacctgatacattcccatggtacatatatgcatcagtattagtaagtgataatgttgattgcttcacgtttgagttcgttacggttgttcccgcatctgttgctgcgattttctgaaatgactggtcatagccgtttagatccagtgttccgccatttctggtaaaatagatttcgccattaccgctttcgcttaaagcgtctttggcatttatttttaccgtacctttacctccggccatgtaaattttattgaaggctttttcagcactaaggatgacagtcccattacctattttaaggttatttccctgtgctatttttacatccagagtaccactacctattttatgcagattatctccggcaacgcccttaacattccattcaacggtggtattattatcaatatctatcccggcacctttataagacttatcttttccgtacactttatatgtctggttcttatcgaatataagcccgccaatgccaagatcggtatcctgcttgagcgttaatacccctcctcctgagacagacaggtccttatcttttataatcgatgataactcttgtttttaccatccagctgcatagtgtttgtgaaattcttttttaaattgtttaccagaatattattaaataacgagtagtttgtccaggctatattggtactactgataaaaccaactgtactggtaacaccatggaaaacccatttttgttgttctttatcatatagataagaaccagaaccactatcgccaaaaattggtgagtttttaaaaggggttctgttggtataaatgtaactcttgtttttccagtccagattaaaaagacttgcgcttaacaagtcgggattatagttttgtccaaacagatattgtttgccgtttaatatcgttgaggttgttccggcacctgctctgaagccaattatttgttccttaccgttgtagtttacgccatatcttttcatcgcatcttcgggagaaagtgagaagtcggcactctccgtaacccctgttgtttccacgacgaatttattcagacgatgaaccgaaaagtcgccagatgatactctgttacttgctttatatgctgtctgatcccatgactgtgttgttattgcatgatgctgtgtaccgttatgagtcgcagtaacactgtacgcacctccaattgatgttgttgcacctttgttggaaacagcagaaaaatcaggtacaggtagttctggaaaatgaaatatctttccatctttcatcattaattgaacatttgttgcacccggtctgaactctcctctgttttgagcaaggtcaagataatcgcgggtccatatattatttatatccagcattgctgcaaatgctgtttcgccataacttccatatattgaggataaaataataccgaggataactttctttcttgatgtaccgacactaactttccgggtcagttcagaaacagcaactaatccacctgtaatatgactatatttcagtgaataaattttattcatacgtgaactccgatatttctgagttgtggttatgggatagcatttaattacaacggggaactatcagtcatggtacgtaactgataagggtataatgataatcactgtcagttatatttgtatgacagatgtaacaaaatgaaaaaaaagataagcacaagtgattgattggttagatattgatcacttggtgtttgtattttgaattttgcgatcaaaatttgatctttgttgtttccggtcaatcctttacaggttttctgtattatccgggggagttaagtctgtcgatgtccgacagacttttgatgatggaaacaacatgcagcgataatgtgcatgctgttttgcaggtggaactcagaaggtgaactggaactgtgcgaccgcaccgtaagtgttgtccgtgccgatcaggcctgcaacatcaaggtgaaccacatcaaacggtgagatcccmaycccggcmgtgaatgcactgccgtygttrcyggccagattctgrcggtaaccggyrcgyagcatgtgcccatttccaggcattaaattctgcgccaatggcggcaaactgacggttgctgtcggaggtgaaaccgctggccggggtcagatccacatcaaatgcagtggtgaacatcgcgttgtgccaggagacaccggccgtcacctgcgggcggatcctgaaggtttccgtgataccgttcacttcttttgtctcaatactacgggagatcaggttctgtgcgaccagtcccagcgtccagttgtcatccaggtccgtactggcaccgatgtcggcgttgatgccatttttcgtgttgtggtagcggtcgcctttgaaggcgctgctgtcataatttctgaccagcacgttgtagttgaacaggtcgacgcgctggaatttgggggggaagcccagagaccatttctgcccggccgtttccagttccgtagccagagcaatacccacatcagtgatcagtgccgtgcgggcacaggcctgtgatgtcaggcggcttttgtccacctcctgcccggtgctgtttgccacctcttccaggtaagtgaggtcagcatcagagactttaccgtcgacactgacggtgccgtgtgatttaaccatcagtgcggcagagaggcgatcaccgggaagggccgccacagcagaaacgcccagctgtgcggcggcatgtgtgttacggaagtcccggaggtgttctttcaggcgtgcggcagcctcaggaacaccgtggttactttcgatggcgcggtcgaaggccttccactcatcactgatccggtcggcgttgtcggtgatattatccggattggagagctgcgcgccgacggacggaagcaggatgctgggctcatgcgcgacgcaaaatccacgatgtatatatcagtactaaaagcgcgacggcggaagaagctctgaaactaatcggtgaactgtacgccatagagcacgatatacgcgggttaccggtgtctgaacgcctggcggtcaggcaaatgcagagtagaccgctcctgacttccctgtataagctgatgcaggagaaagaacacacgttatcgaagaaatgtcgtctgggagatgcgttccggtatatcaggaagcactgggctgcgttgtgcaacttctgtgatgatggcctggctgaggtagataataatgcagcagaaagagcgcttcgtgcagtctgtctcgggaagaaaactttttcgaggatcactcattccgtgtctgactgcttcagggtttaattttgcttctgctgactgaatgatgattgggcagcaagtgcaatatcccacataaatccagtcaactcacgagccaccgccgtaatggctacttgtgattttttcccttttgctgtcagagttcggtaacgagaacacaatcgttgttgagctttccatgcaatatctttggaatattgtgttacagagtccggtcggtaatatataagccatgcaccaacttttgcaggtgtacgataagaccaggcggcttcgtaaagcagacgtctcagttcgctgtttccaacttttgttattcctctgggacgaatactgtttccactggaatattcacctggcaccagtctgaggtgtactggcaatagcggacactaccatttgttcttttttaagcagccatctgatgatatttttccctgaaggctgccggggagatattccccagacgagagtgacgacgctgacgattgtagaaaatctcaatgtattcccgtattactgagatggcttcatcccggttattaaaacgatagtggctcaggctctcatttttcagcgttctgagcctctgattcttccggacagaagataatcatgtcggtatgaatgttataattaaggactgtgcaataatagccattccattcagccatcttacgctcgaaaacgatcggtaagctggctactcaccattcctgctctaaacctgacgcctctcaagactattataaatagcctcaatctcacccttcaggttatcaccgcaataaaccattgatgtatcgtatcgttcatatcgcgcttcccgtgtcgcactaaaccagttgaacgatcccacacacagcaaaccatcatcaccaataacaattttgctatgaacacggtttaccagctttgtagcaatacccagcgcattcagtttctccagcgccgctttaaagttctgctgcttctcttttcgcttctcaaaatcattatgttcagtgttgtagcttctgtcagtgactatcgtgacgttaattccacgtgaacacgccgcaatcatggaatcaagaaaaccggtttgctccagcctttgccaggtcagccatggagaaattatcgtgatgtgtttactggtattttcaaatgtctgattcaggaaattatcatgttgctccacaccatgaagtgtgtagattttggtcccggcggtttttaaatccttacgctctttataatcaaaagagagcgcattcttctctgactcaaaagaggtattttgccagtaatccccgtggcgatgaggctggctggacctcaaacaggtccatatcgccgaagaccagaaaactgtccttcgcacgggagactgcaacattcagcatgctgttatcgctatcaataaacccgccgtcttcatgttttgaatagactggcgagaatatcacaatcgctctttccgctccctgaagagagtgcacggtgcccactgtgagcgacttttcattcgtgcctgtactgatatcttgtttgcccagcacctgtttgatagtggatacctgagcgctaaaaggcgtcacaataccgacaacttcatgaagcgatttaccgtaatgcgcttcaatattttgctggttctctgccaaccagaccgctatcgtttcagcctcaagcaaattatatcgacttccactacttgccagctctcctttaccatcaatatggagataccccattgcgggcattaaattgctctcttcacgccctcttttaggcaacaacttaccgtgatagcagagcgtattacagtatccaataatattgtcgtagcaccggcggtgttcatataggtacataccacgagccagttcgggatcatattgatagcgcgaagcaaactgcgctattttcataacgctgccagatgcggcacttttaccaaggtctgcgattgccgtatatttctcggtaatctcttcttgcgtactgccagacagaattttttccgccagcatgttaccgacatcaatcgcaggagcaatactccatattggcgggatctgctccgtatcgccaatcactaatgccttcttagctaatgcaaacgaggcagcagccacttcaggaagcacctgcccggcttcatcgacaatgagtaaatcggcaaaatcatacaaataacttttctcgaatttacgttgtcctttgtgctcacttatctgcatattaccgggcagcatatagcatgtcatcaccacacatggcgtgagtttcattcgacgttgccaacgggcggttacccctttagcaccttttttcttcttctcgtcctgcagatcatcaatgctggccatatccatcagccaacgaccttcccagtagtgagtcgtcagtaaaaatgcagggaagcgaatctgcgtatcagccagttcatcggcctgtgagaagctcagttcctcgtcgccctcataccctaaatcaaatgccagcctctgccactcctgaaccgcctgctgttctttaagaacgatttcatgggcggagtcaatctgctgccggtatgttgtttgctcgcgctcagcggaattgagcagcccatcaatattacgttcgatagtttcaggatcagaccactgatttcctgcaatcagcgcgcctaatttatcttcgagaaacagctgtatttggtactgtcgcttattgcgaaccgccgggagccaggaaaataatgaatagatcagtgattcaccggcgcgatattttttccattccgttttagcactcttcagtagagtgactttttgttcttgtccggaaagtaatttatttaaattatcgagatattgctcaatatcattagcaataagctcacgcgcagcccgaatctggcttaacgtttgccatgttgcgttcagtcttatcagttgctcagattttgctgccaactgaccatgcaagagttcaatgaccttttcaggggatgaacactcttttccaggaaaggctgccttagccttttccagataaaacagcagtgcatcctctacatactcttttgactcaacctggttgaagaaatcttcagtttgatattttttggctgcctcagctttacgactgcttgagggaaaataagcaccgaagcttttcagctctggcaaccatcgcccggccatcgcacctgaaccttgcgaaaagtctttcccgaatgcctcaataatgttcgttacagcctggttattcgttgaagtcgcgataataaccggaggctcagatttttcgagagccgctctggcccactgcgtggcgatgatagaaagcaccagcgtggtttttccggttcccggagggccattaacagcaaggatatcgccatgtcttgcatccagaaaatggcttaaggcatcgcgctgagcctttgccagcggaaacttatctccggagtgtccaagcctgtcgctgaattttgctcctggggccagcaaagactctgcagcatgaacctctcgcgaggcgaagcgattgaagagcggcacatccttattgcaaacaagcaggtgatcataaagagaaaggatatgggaactggcaccgccagattgagccgttttaacaatataaccgtgctcagcgagttcatattgctcaggtttttcaatccagtcgccggcaacgctcttcagtagcctctctgagtcatacagatattgacgccactcctgctgcaaggcggcatatcgtgcttcccgttcttcatccgtttcggcagtcttatcaacgctgtcatcaaagttgatagagaacgtggtatgggtcgtcttgtatttgtcatactgcccaatctcaccaatcgaaaatgctccttttggcaaaggttcaagcaggtctctgggaatggaggtcgctggcgtcggatataaaaaaccctcacggcttagcaaggctggcgtcactatcggggtaacaatatcagacgcgcctgcggaacggtccttaccatgctgcagtaaccggaaataaacttttgggcgcaagatgacatcgaccgtttcgacatcgtctttttctccctcaaaaaatttactgacaatcgcttcgtcaagacgtcccgccgctatcccatgccagtgagtgaaattttgggcgtctttccgtttaaaactgccctttcctgactcagcatccgcaagcgagttgcgccagtatgaggcaaaccctaaagcattttcatccattaccagtcctgtgactcaatgaaatccattgatttatcgaatataaaatcaccgtatggacagctattgtccatattgaaaaagttggatgcaatgttttgtttataattcgatatcaaatgaactggttgtacaaggttcagaacacaagctcattaaacagtacgtcaggactattgatttcataacagtgaatacattttttaccgtttataataactacctgtgttggacggggataccagagcagccgaaaacaccgggggttattacctgctctcatggaaaccatatattcctggtgctaatcacagtcataaatagcctgaagaacgtgacgaagggactttaatggaagccggagtaacttgtcagaaacatcaatcttcgtcatcatttacaaagaaaaataattagttaaagcagtccgggctgattgcccggactgcttactattttaatggattgttaatctttgcatattcaaacgggctgatacccttctcccggttcgcatctagaaaatcggcccaccattgcaacatcagtcgccgttcttccagatgttctgctttatggatatacgcagcacgtacaccattacgctcctgatggctcatctgacgttccacagcatcgcgggaccacaaacctgattcaatcaatgcactgcacgccatcgcccggaatccatggccacagacttcctgggttgtgtcataccccatcaccctcagggctttatttacagtattttcactgattggtttacgcgggtcatgtgcacccgtaaagatcagaccattttcaccagcccatgtctgaagttctgccagtatggctacaacctgtttgctgagtggcacaagatgtggtgttcgcatcttggatccccggtgtgagaattttacgcctggcagaggttcgcgttcggctggaatagtccacatggaattgtcaatatcaatttccgaccagcgggcatatctgagttcactggaacgaataaaaaccagtaaattcagcataactgccagtcgggtgacaggctggcctttataaccgtcaatacgcgacagaagttcaggcaggcgtgaaagctccagagcagggcgatgctggcgttttaccgtggtcaatgcaccagccatatccagagccgggttatatctgatgatgccagactgtacggcgtaacgcattacagcagatattctttgctgcagacgactggcgatttcataaatttgttttgcttctgcagcacgaacagggataagcaggtccggggtattgagtgttgtgatatcccggttgccgataaaggggaaaacgtgtgtctcgaggcttttgagtactttatcgctgtgtgattgtgcccattgtttattactggcatgccagcgtcgtgcaatatgttcaaaagagagctgtaaatcagggacaacttttttaactcttttctgttcgcaagggtcaatcccctctgaaatcagttttcgggcctcatcccgttttgtacgagcttcggagagagaaacttctggatacacaccaagtgccagagtcttctccttacccagaatacgataacggagacgccagtaacgggaaccattaggatgaaccagcaggaacatgccggccccgtcagtgagtttataagccttgtcagtgggctttgcagcccggatttttgcgtcagtcagtgccatagttcagccttctgaatgcgttaaagagggtacaaattctgtcgaactggggtatacccgcaattatacccacacaatggggttgatgtggggggaatctggttgagttcggtagaattgatttggaggaagaacacttaaatcatggtgttctgaaacgaaaaacggacctccgtggaggtccgttgatatgaatttggtgcccggactcggaatcgaaccaaggacacggggattttcaatcccctgctctaccgactgagctatccgggcaacggggcgcattaaaccgtaatctgcacatctcgtcaacctaatttcagtaaaagcgattcaactgcttaagattgcggcaaatcgcttcttttctgtgtttctgtcaggtcaatgcaccaccctggcggcagcgggcgaagcgcaggatatcttccgccagccgatgtgcagtgtcgacatccgcctggctacgattcaccagcattcggcttaaacagccttccagcatcagttccatctgctttgctaccatcgccggatcgtcaacttccagcgtggttaacagttcgtgggtgaaatcgtaggccgcgcttttttgctgatcggccagttgatgaatagggtggccaggatcgggataaaacgtacaggcagcgataaatagacagcccggatagcggttgtttttaacgcactccgataacgcctgataacgtgccagcagcttttgttcggcggtttgcgtttcgtccagcatcagctgacgacgccagacatctatctgttggctaagataacgcagcgcatcgtagaggattgcctctttgtctggccagaagcggcgtagctcgtccagtggataatccacacgttcagcaaccatctccagcgtggtgttggcaatcccttgtaattctaataatttcagggcttctcccagtacatcttcacgttgcacgctattttcctccgtctttcccactgcaagtgtcgttcacggttggcgatcgcgcaaatgtgcgctgaaggtttcagcatccataaagcccgtgacgcgtgcttgtggatgctcctggccttgtccgtcaaaaaagagaattgtcggtaggccaaggacattaagatgctttaacagcgccacatcttgtgcgtcgttggccgtgacgttggcctgaagtaagaccgtgtctgctaacgctttttgcacctgcgggtcgctgaaggtgtatttctcaaactctttacaggcgacgcaccagtcggcataaagatctaacatcaccggtttgcctttggcttcaacgagcgcctgatttaactcatctaccgttttgatttgtgtaaagttgagatgcgtctgagtttgcgcggtatgcgtcgcaccaaatgcccaatcctgaagtgggcgcacgctaaccaatgccgctgccagcaggattatttgcaccacgcgcatccagccgcgtttagcctgtaggctggtgataaaggcccagccaaagaatgcgacacccagcgccgaccacaagcgtaatccccatacatcaccaatcactcgctccagcaggaagaccggcagtgcgaggatcacaaaaccaaacgcggttttgacttgttccatccacgggccgcttttcggcagcaagcggttaccaaagacggtaattagcatcagcggcaggcccatgcccaacgcatagagataaagcgtgccgccgcccagccacatgttcccgctttgggcgatatacagcagaatcgcgctaagcggtgcggtggtgcatggtgaacagatcagtccggcaatcgcccccataacaaacacaccgccaggtgagccgccctgttggcgattgctcatcaacgtgagacgtgtttgcagcgaagaggggagttgtagagtaaacaagccaaacattgacatcgccagcaaggtaaagacgatggcgaggccaatgagcacgtatgggtgctgtagcgccgcctggaactgtaaccctgcggcggcaactaccagacccagcgccgtgtaagtcagtgccatcccctgcacataaataaaggtcagcaacaatgctctggcagtggagagccgctgtttaccacccagcacgatgccagaaatcagtgggtacattggcagcacgcatggcgtaaaggcgataccaataccgatcaacaacgcccagagcgcggaaaagggcaattgcgcggtgtgctgctcttgctgcgaaacagacacaggctgtgacgctgcgttgttggcgaccacttcgcttaacggaacggttttggtttctggcggataacagaaaccggcatcagcgcagccctggtaggtgacagttaacgtcgctcccgcactcgcctggttgatggttacgggaagcgtcagccgatcgcggtaaatctcgcttttgccgtaaaactcatcttcatgccagacgccttgcggcagctgcacgtcggcaattttcgcgtgttccggcgtaatgcggatctgtttacggtagaggtagtaaccgtctttgatctgccaggtcagattaaggtcatgttggttttgctgaaaatcaaaagtaaaggcttgatccgcggggacaaattgtgaacgtcccggcgcgtcgaataatccggcaaaaacggaagtgctgcaaagtagcaggatcagcgtaaagatgcgttgagccatgagaggtaatctgtgtctccgtgtgtaacaggtaaaaccagaagttccggggtttgatatggatgatgagacttcaggcattccagcagtgcctgctggtgagatacggtagtttttaaaatcatctgcacttcgtattcttgctccagcttaccttcccagtaatagagagaggtagcgccggggatcaaggtcgcgcaggccgccagtttttccgccagcactttggcggctaaatcctgggctgtcgcttcatccggtgcggtacatagcaccacgacagacgcggtattcgaacttttttcatcaagcataaacacctcgcaagaacagatggaaccgcaagagagaggtcactatacaacggacgggggaaggatgttagtcggcgggaaagaaagcggggcgtgaacgccccgcgattggtcattacagcatgaagctacccagcaagaagccgaagcaaacggccagggcaacacccagagtacccgggatgaagaacggatggttgaagacgaatttaccgatacgggtagtacccgtgtcatccatctgtaccgcagcaaccagcgtcgggtaggtcggcagaatgaacagaccagacaccgcagcgaaagaagcaacagcggtcagcggtgaaacgttcagtgccagagccatcggcattagtgcttttgcggttgcagcctgagagtacagcaaagcagaagcaaagaagaagatgacggccagcagccacggatgaccctgaatcacttcaccagcggtatctttgatccagtcgatgttgttggaaacgaaagtatcgcccagccacgcaacacccaggatacaaatacaggcgctcatacctgctttgaaggtgctggagttgaggatgttgtcggtatcgactttacagataacggtggtcagagttgcaacgctgagcatgatgatcaggattgcgttggtggtgttcatcagcggtttttcaaccagacccatgcttgggctgttgatgattgcatagataaccacgccaactacgcccagcaggaacagccagacggacgtttttgcaccggatttgatttcaatctgcttttcaccgcgcagttcaaccaggccctcttccagacgcttgcgataaatcggatcgtcagagagtttggagttgaacagcatagtgaccagaaaggacatcaccagaaccgccagcagggtggacgggatgaccacggagagcagatggaggtagctgatgccatgaccttccatcacggaagacatgtaaaccactgccgctgagattggcgatgcggtgatcgcaatctgcgcggataccactgcagtagacagcggacggcaaggtttgacgccttgttccttcgcaacttcagcgataactggcagtgtcgccagagatatgttgccagtaccagcaaagatagtcaggaaataggtcacgatcggtgcgaggatcgtgatgtatttcgggttacggcgcagcagcttttctgtctgatgaaccagatagtccagaccgccagcaacctgcatggcagaaatagcggcgataaccgccatgataatggaaatgacatcgaacgggatgttaccgggtttaacgccaatagcggcaagaaccagcacccccaatccgcctgcaaaaccaatacctattccccccaatctggcgcccaagaagatcgccagcaaaactatgatgagttctacaactagcatattagccttccttgttttttaacaagttgatattaggttgttatttttaagttactgctcacaagaaaaaaggcacgtcatctgacgtgccttctttatttgtactaccctgtacgattactgttcgctttcatcagtatagcgttttgctttgtaagccgggtgcatcagattctgtacggagaaaatatcgtcaagttccgcttcagtcaacagaccgcgttccagaacgacttcacgtacactcttaccggtttcggcacagattttacccacgatgtcaccgttgtggtgaccgatgaacgggttcaggtaagtaacgataccgatagagttgtaaacgtaaccttcgcacacttctttgttagcagtgatgccgttaatgcatttttccagcaggttgtagcaagcgttggtcagaatgtgaacggattcgaacatggcctggccaatgaccggctccataacgttcaactgcagctgacctgcttctgctgccatggtaacagtggtgtcgttaccgatgactttgaagcatacctggttaaccacttccggaacaaccgggtttactttagctggcatgatggaagagcccgcctgcagttccggcaggttgatctcgttcaggccggcacgtggaccagaagagagcaagcgcaggtcgttacagattttggacatcttcacagccaggcgtttcagcgcgccgtgaaccataacataagcgccgcagtcagaggtcgcttcgatcaggtcttcagccggtacgcatgggaagccagtgacttcagccagttttttcactgccagcggagagtactctttcggcgtgttcagaccagtaccgattgctgttgcgccaaggttaacttccagcagcagttcagcggtacgttggatatttttcacttcttctttcagcaggatgctgaaagcgcggaattcctgaccgagggtcatcggtactgcgtcctgcagctgggtacgacccattttcaggatgtcctggaattcgacagctttacgttcaaagccttcacgcagttggttaatcgcatctaccagcttaatcagggaagagtaaactgcgatacggaaaccggtcgggtaggcgtcgttagtggactgacatttgttaacatggtcgttcgggttcaggtactgatattcacctttctggtgacccatcagttccagaccgatattggccagcacttcgttggtgttcatgtttacggaagtacctgcgccgccctggtagacgtctaccgggaactgatccatgcattttccgttgttcaggacttcatcacatgcggcaatgatggcattcgctacacttttaggaatggtttgcagctctttgtttgccatagctgcggcttttttaaccattaccataccgcgaacaaattcaggaatatcactgattttgttgttgctgatatagaagttttcaatcgctctcagagtgtgaacaccatagtaggcatcagctggaacttccctggtacccaacagatcttcttcgatacgaatgttgtttgacatgtgaaccttctttttcaagctgccaatgatttgctttaaacacacagaatatatgtggtttcgaatgtttttcgaccgacgattatcccctgcatcgaccgaatacccgagatcatatgctgcttgaggatttctaccgtaatctggatcactttaagtgtcggtttttaccccttaattattaatttgtgaaatagatcaccgctttgggattactaccaaaaatagttgcgcaaacatcttgaaattttgctaatgaccacaatataagctgaacgcgattcgcaacccattcaggtagccgggttttaccggctgctattacaggagaaacctttgcgctggttaccttttattgccattttcctttatgtctatattgagatttcaatctttattcaggttgcccatgtattgggggtattgctgaccctcgtgctggttatattcacgtcagttatcgggatgtcactggtacgtaaccagggctttaagaatttcgtgctgatgcagcaaaaaatggcggcgggtgaaaacccagcggcggagatgattaaaagtgtttcgctgatcattgccggtttgctgcttttattaccgggctttttcaccgacttcctcggtcttctgcttttattaccgccggtgcaaaagcatctgacagtgaagttgatgccgcatttgcgcttttctcgtatgccaggcggcggttttagcgccgggaccggtggcggtaatacttttgatggtgagtaccagcgaaaggatgatgagcgcgaccgccttgatcataaagacgatcgccaggattaatgtcgaaacgccggattatgtggttatgccattttccggcgtttttcgttttggcagcaacagccataaccccgccagcatgatcagcgcatagagacttttccagccgaccattgccagtaacagaacgcataacagcccgccaaccaccgccagtagtcgataacgtccttgcaataatttacagcctgccagcatgcataacagataaatcataataaagatgccattggcataaataataagagcgtccagattgatctctaaagcatgaatcaccaacgtgctcaccacacagcagccgagcaccgcattgagggcattattcgggatatggcgagaagagaggcgtgccaggtagtggtcaggattatgttgcgcctgcgaccagaccaggcgggcgaagctctgtatataaatgttgagactggcaaagcaggccagatagccaatcacgcaggcaatccataacgctcctacaccgaacaactgcactacaatttttggaagcgatgctgccgccgccattttttcaccataggcgtcgaagtgtaagacgactaccgtacagccccagtagactaatcctgccagcagcagaccaatcatcaatgcgcgaggaaaatcacgctctggatttttaaattccgaggcaagatgggcaaatgcttccagaccgacaaaacaccagaacatcactgataacgcagcaaataacccggtaagttcgatattaccaggtgccgggaaggggatattcgcaggtttgatatcgcccgcccaccagatagcgacaatcagcgcgacgataagtccggcaataacggtttgtagattagcactggaactggcaccgcgagtaccgatataccacaccagcgccagcgtaccgagttctgccaacaacagttgccagctatgccagccaaacattgcctggccgaacccggcggcaatttgtagcgcggcaggcaaacccacgggaatgaccgataaaaacaaccagccggtgactcgctcaagtcgcgaaccaaacgccataccgacgaagtgcgcgacaccgcctgcgctgggatagtggcgacccagaatcgcaaacacaatcgcaatcgggaacactaagataatcaaaacgggccacgcccacaggctgttattgcccgctaccagcgcagctaacgcaggaacggcaaacacgccagtgcctaataatgacgtcgatagcaggccaatgccctgggccagccccagttcttgtttgagtccactcatgggttgatatccgattgcgcccaaattttgggcaactgcgtagattttcgatggtagcacaatcagattcgcttatgacggcgatgaagaaattgcgatgaaatgtgaggtgaatcagggttttcacccgattttgtgctgatcagaattttttttctttttcccccttgaaggggcgaatcctcatccccatttctctggtcaccagccgggaaaccacgtaagctccggcgtcacccataacagatacggactttctcaaaggagagttatcaatgaatattcgtccattgcatgatcgcgtgatcgtcaagcgtaaagaagttgaaactaaatctgctggcggcatcgttctgaccggctctgcagcggctaaatccacccgcggcgaagtgctggctgtcggcaatggccgtatccttgaaaatggcgaagtgaagccgctggatgtgaaagttggcgacatcgttattttcaacgatggctacggtgtgaaatctgagaagatcgacaatgaagaagtgttgatcatgtccgaaagcgacattctggcaattgttgaagcgtaatcctcgcacgacactgaacatacgaatttaaggaataaagataatggcagctaaagacgtaaaattcggtaacgacgctcgtgtgaaaatgctgcgcggcgtaaacgtactggcagatgcagtgaaagttaccctcggtccgaaaggccgtaacgtagttctggataaatctttcggtgcaccgaccatcaccaaagatggtgtttccgttgctcgtgaaatcgaactggaagacaagttcgaaaatatgggtgcgcagatggtgaaagaagttgcctctaaagcgaacgacgctgcaggcgacggtaccaccactgcaactgtactggctcaggctatcatcactgagggtctgaaagctgttgctgcgggcatgaacccgatggacctgaaacgtggtatcgacaaagccgttaccgctgcagttgaagaactgaaagcgctgtccgtaccgtgctctgactctaaagcgattgctcaggttggtaccatctccgctaactccgacgaaaccgtaggtaaactgatcgctgaagcgatggacaaagtcggtaaagaaggcgttatcaccgttgaagacggtaccggtctgcaggacgaactggacgtggttgaaggtatgcagttcgaccgtggctacctgtctccttacttcatcaacaagccggaaactggcgcagtagaactggaaagcccgttcatcctgctggctgacaagaaaatctctaacatccgcgaaatgctgccggttctggaagctgttgccaaagcaggcaaaccgctgctgatcatcgctgaagatgttgaaggcgaagcgctggcaactctggttgttaacaccatgcgtggcatcgtgaaagttgctgcggttaaagctccgggcttcggcgatcgtcgtaaagctatgctgcaggatatcgcaaccctgactggcggtaccgtaatctctgaagagatcggtatggagctggaaaaagcaaccctggaagacctgggtcaggctaaacgtgttgtgatcaacaaagacaccaccactatcatcgatggcgtgggtgaagaagctgcaatccagggccgtgttgctcagatccgtcagcagattgaagaagcaacttctgactacgaccgtgaaaaactgcaggaacgcgtagcgaaactggcaggcggcgttgcagttatcaaagtaggtgctgctaccgaagttgaaatgaaagagaaaaaagcacgcgttgaagacgccctgcacgcgacccgtgctgcggtagaagaaggcgtggttgctggtggtggtgttgcgctgatccgcgtagcgtctaaactggctgacctgcgtggtcagaacgaagaccagaacgtgggtatcaaagttgcactgcgtgcaatggaagctccgctgcgtcagatcgtcctgaactgcggcgaagaaccgtctgttgttgctaacaccgttaaaggcggcgacggcaactacggttacaacgcagcaaccgaagaatacggcaacatgatcgacatgggtatcctggaccctaccaaagtaacccgttctgctctgcagtacgcggcttctgtggctggcctgatgatcaccaccgagtgcatggttaccgacctgccgaaaaatgatgcagctgacttaggcgctgctggcggtatgggcggcatgggtggcatgggcggcatgatgtaattgccctgcacctcgcagaaataaacaaacccccgggcagaaatgtctgggggtttttcttttggtcatctttctagtataagattcagacacggacgacgcgagtggcgtccagctcattgattatggggaataacatgcacgtaaaatacttagcagggattgtcggtgccgcgctactgatggcgggttgtagctccagcaacgaattgagtgctgccggtcagagtgtacgcattgtggacgagcagccaggcgcagagtgccagctgattggtactgcgacaggtaagcaaagcaactggctttccgggcaacacggagaagagggcggttctatgcgcggcgcagcaaacgatctgcgcaaccaggcggctgcaatgggcggtaacgtgatttatggcatcagcagcccgtcgcagggaatgttgtccagttttgtcccgacggatagccagattatcggtcaggtttataagtgcccgaactgatgtgatccagaggctgggtgacaaacgtatcattgcctgatgcgcttcgcttatcaggcctacagcaggcattgcaactgattgaatgcttgagaatttgtaggccggataaggcgtttacgccgcatccggcatgaccaacgatcacgttatcagtcatttcaggctggatggctccagcctcgcattagcaaagatgagattatttcgcctgtggtgcagttttgctggtggattgaacacgtaagtgatgcagcgcgcgtaagcattgatcctgggttagcggttgggcgttattcgccgctacggtgcgaacatagacctgacatggcacacccgcgagttttttcagtcgttggctgaaatcaagcattcggcgagtgatcgcctctatttctttacccggcgttgcttcacgcgttttcaccactgcgccgctaaattgttctttgccactttcatctttaaagcggtaaagcaccgccagataatggtcgaacaggttatgtttccattccggttgggaataggtgtcatattccagattgccattttcctggcagtcaacgtcatataacggcaggaaatctaacagtgaggtaatacgtaatgccagttcacgcatttccgcattattaattgcatgaatgattgctcgcgccagcatttcaatctgcaactcattgacgactaactcacatttgctaccgtcatgtagcgttaatacgaaggtaagattttcgccttgattatcggtaagttccagcgtgttaacccgacgattaatatcggcatttttaagctcatcaaccagaatttctgggatgttttctgccattttcttaatgactttatcgcgagcttgctcatactgaaggcgtgcagcagcatccagtttatgcttttgatgcatacgactttccagcgcaatcagcaggtcgcgcagttccatgacagacataaagaacaacgattctttattgcgaggttctttaattttcagcgccagtgcaatgaaattattactcttgcgaataacaccggtattaacacccttgatgcttatggccatgtaggttctccctaaccatttctcaattaaataattaattttaatttataagccagataaatgggcttggtagtaatagttgttaaaataacataaatagccgtactcactctatataaacagaaaagaaaggttaattattggtgttggctatataaagagtaacaacagcaatgtatatgaataattaaaggttatgcaacgggcaaagattaaatttcccagtttaatgacaggttgctgtacttgcgtttgttgctcttgccggatgcggcgtaaacgccttatccggcctacagttcattgcaaatccattcaatttcaatgcacaatgtaggcctgataagcgtagcgcatcaggctaatgtttaacttccctgtttaatcagttactgctggcgtagctggagatccagcggcgtttgctgggttcgccgccgatttctcgcgccagtttcggcaccagataacccgacaccagtgtcagcaactcacgcataatctgccgtgcttcgtcatcactcaccataaaatgcgccgcgccctgtactttatctagcacatgcaggtaatacggcatcacgccggcatcgaacaacgcattactcaggtttgccaacgtttgtgcgttatcgttcacaccacgtaacagaacgctctggttaagcagggtgacaccgacacggcgcaatttagccatcgcctgacggaacgtttcatctacctcattggcatgattgatgtgattcaccagcaagatttgcagcgtagaacgggcaaagcgttcaaccagcgcctcggtgatacgtgccgggatcacaatcggcagacggctgtgaatccgcagacgtttgatatgcgggatggcttccagttgtgtgagcaaccagtccagctcgtgatctttcgccatcagcggatcgccgccggagaaaatcatctcgtccagttccggatgcgcagcaacatactcaagagcagtctgccagttacgcttgttgccctgattttcggcataggggaagtggcgacggaagcaatagcggcaatttaccgcgcagccgcctttgaccagcaaaagcgcccggttgtggtatttatgcaacaaaccaggcactacgctgtgctgttcttccagcgggtcggtggagaatccggaagcgacgacaaactcatcttgcgaggtaagtacctgacgcaaaagaggatcgtccggattgcctttctccatgcgatcgataaatgagcggggcacacgcagggcaaacagctttttggcgctgcgtccggccaacagtttttcgtccgcgtctatattcaaaagacgcagaagttcatcaggatcggtcacaacatcggcaagttgcgttaaccaatcttctctggatggggtatttagggttacaatatgcgccattttgtggcttagctaccaattaacaaatttcagagggccttatggcaacgtactatagcaacgattttcgtgctggtcttaaaatcatgttagacggcgaaccttacgcggttgaagcgagtgaattcgtaaaaccgggtaaaggccaggcatttgctcgcgttaaactgcgtcgtctgctgaccggtactcgcgtagaaaaaaccttcaaatctactgattccgctgaaggcgctgatgttgtcgatatgaacctgacttacctgtacaacgacggtgagttctggcacttcatgaacaacgaaactttcgagcagctgtctgctgatgcaaaagcaattggcgacaacgctaaatggctgctggatcaggcagagtgtatcgtaactctgtggaatggtcagccgatctccgttactccgccgaacttcgttgaactggaaatcgttgataccgatccgggcctgaaaggtgataccgcaggtactggcggcaaaccggctaccctgtctactggcgctgtggttaaagttccgctgttcgtacaaatcggcgaagtcatcaaagtggatacccgctctggtgaatacgtctctcgcgtgaagtaatgcggttgtggtgcggcctgcaggctgcaccatcacttattcaggtcagagatgatgaaacgccttatcgttcttgttttgcttgccagcacgctgctcacgggctgtaacaccgctcgcggtttcggcgaagacatcaaacatctcggcaactccatctctcgcgctgccagctaatttttcttctcttccgaaaaatcatcagatttccatcatttttggcgatgttgtctattattaatttgctataggcaaacataaataacattacctaaaaggaagacgttatggtgaagaagacaattgcagcgatcttttctgttctggtgctttcaacagtattaactgcctgcaacaccacgcgtggcgttggtgaagacatttctgatggcggtaacgcgatttctggtgcagcaacgaaagcgcagcaataagcaataacggtacgacagttatgtcgtgccgtttgtttttttgcgatagtcacaaaggtaatagttgaaattcccctgccacctggcaaaatatccgttcaaccatcagctttgcaggacgacctgcaaacgcctcttttcaccggggacggccccaattctccggagcctgatatgtcctggattatcttagttattgctggtctgctggaagtggtatgggccgttggcctgaaatatacccacggctttagtcgtttgacgccaagtgttattactgtgacggcgatgatagtcagtatggcgctacttgcctgggcgatgaaatcgttaccggtagggacggcttatgccgtgtggacgggtattggcgcagtcggcgcggccatcaccggcattgtgctgctcggtgagtccgctaacccgatgcgcctggcgagtctggcgttaatcgtattggggattattggtctgaaactcagcactcactaactaccgggctgctgtacccaaataaacttactgacatcaaacccttcccgggtcgcgactgccagcatctcctgtttcacttcgtcagaaatggttggcgtgcgggagagtatccacaggtagtcgcggtccgggccgcaaaccagcgcatggcggtattcccgatcgagtgcaataacgttataaccgccatagaaaggaccaaagaatgacactttcagcgcagcgcgagttggtgcgccggtaaagtacgctttcccttcactctgctgccacattcctctgtcagggttatagcctttattaatgacattcaggccgccgtcatcacgcaggctgtatgttgcggtgactttttccagtccacgttcaaaacggtgatcaaaacgggcaatctcataccaggtaccgagataacgtttggcgtcgaaattattcactactgttacgccacgcggcggcgtaggagaactgcaggcaacgaccagaaatgcagctgtcgctgcggcaacgagagggagcaggcgcataaatgtttccttactggttttttctaagtgtagatgacagcaaggaaaagcgcagaaaaggtccgaaaattcggacccgatgaaattttactgtagagcgttgagaatctgccaggcggcggcgactctcgctggattgggatagtttttgttagccagcatcacgatacccagctctttttctggaataaacgcgacatagctaccaaatccgccggtcgcccccgttttatgcacccatgatgcgcgtactgcaggagttgggggcgtaatcgcttttacggggcgtgctgccagtgcaattttattgtcactgccgttaacgatgatgtcaggatttaccggccagtccagcatttcccagcccagaccctgatacatatcgccggtttgccagtagcgagattgtgccagttgtatcccttgttgaagtgttttgtcgttgatatcacggggattcatattgcttcgtacccagcaggccatatcttcaatggtcgacttcacaccataagtttcagcatctaacgcccctggcgaaacatgaactgccttgccttcgcgatatccccaggcgtaattcttttcttctgcgggcggtacattaatccacgtatggttgagtttgagtggctggaagacacgtgtttgcatcgcctgctcaaaactcaaaccagacggcttcacagccagtgcgccgaacaaaccgatactggagttggcatacagacgttgtgttcctggcgcccatgcaggctgccagttttgatagaagcgcagcaagtcgcttgaggatttcacctcatccggcacctgcaatggcaggccgccagcagtgtaggttgcgagatgtaatagtgtgatcccattccactgtttagcggtaagttcaggccagtattttgttgtgggatcgcttaacttgatttcccctcgagcaatagcctcgccaccaagcacgcccgtaaatgttttgctgaccgaacctaactcaaacaacgtttgctgtgtgacgggctgctttttggcgatgtccgcatagccccaggtaaagtaataaggtttaccctgataaattaccgccaccgccataccggggatcttttgttgctctataagcggggtaattgtgcgatgcacaatatcgttgatttgttgaggggcagcaaatgtggagcaagaggcggtaattaataaggcgcagagcgtcgttttgaacataaggtctggtttccatacaaaacggcccgccataggcgggccggatttacattggcgatacgttagattgtaacgataccaatcagcgtgacaactgtcaggatagcagccagaccgtagaaaacccatttgcccgcaggcacgtgaattttcagatcgtgcatcgcgtggtgcatacggtgtaaaccacaccacagcggcagaacgatcatcaggaacaggaatacgcgaccaatgaagctctgcgcgaacgccagaacgcgctcgtagctcagcgcatcacccggaaacagccccagtggcagcagaatacccaccagcaggatcatcaccggcgcaataattgcgctccacataccaccggccccgaagaggccccagaataccggttcgtcagaacgctttggatttggattaatcatctcaggctccttaccagtacagggcaacaaacaggattacgatggtggcaaccacagttaccgcccagagacttttgataattggctctggtcccatttttcgtcttttacaatgatattggccgctttcggtgccagttcaaaccaggttttggtatgcagcagagctgccgccagagtgatcaggttaatgatcacgataaccgggttttgtaaaaagtcgacgaatcccgcccaggcttccgggccatttttcagggcaaacagcccgaaaatcagttcaatgctgaaccacacagccggaaccgccgtgccttcgcgcagcatgtaaaagcgataaaacggcaattttttccaccaggtggacgtcattggccgtacatacggtttacgtttagtcgtcatgttgcactccttagcgtggtttcagggtcgcgataagaaagtctttcgaactttctactttgccctgctgaatggccgcagccggatcgacgtgtttcgggcagacttcggagcaatagcccacgaaagtacagctccatacgccgttctggctgttcaactgcgccatacgctccttcttaccgtggtcgcggctatcttcgttataacgatgcgccagcgtaatggcagccggaccgatgaactctgggttcaggccaaactgcgggcacgcggcgtagcacagaccacagttgatgcaaccggagaactggtgatactttgccatctgcgccggggtctggatgttagtaccctgatccgcggtgcgggagttgccgatgatgtacggtttgatcgcttccagactttcgatgaagtgggtcatatcgaccaccagatcgcgttcaatcgggaagttagctaacgcttcaaccttcataccgtcggtgtaatcacgcaggaaggttttacatgccagttttggcacgttgttaaccatcatgccgcaggaaccacaaatcgccatacggcaggaccagcggtaactcaggtccggtgccaggttgtctttgatgtagcccagcgcatccagtaatgaggtagttgcgtcataaggcacttcatagaatgcgctatgcggtgcggtatcgacttccgggttatagcgcaccacctcaattttcaggtttttcatctcagccattcgccttctccttcttattggctgcttccgccttatcggctgcatccgcttcgccaccgtaaacgcgtttagctggcggcagcgtagtaatcttcacgtcgctgtactccaggcgagtcgtgccatcagcatcgcggaaggcgagggtgtgtttgaggaagttgacgtcgtcacgctcggtgcaaccttcgtccagacgctggtgtgcgccgcgggactctttacgtgccattgcggagtgcgccatacattcagcaacgttcagaccgtggcccagttcaatggtgtagagcaggtcggtgttgaacacgctggaggtgtcggtgatgcgcacgcgcttgaagcgttcctgcagctctgccagcttgtcgatggttttctgcatcagttccggcgtacggtagataccgcaaccttcttccattgccaggcccatttcgtcgcggatcttcgcccagttttcgccgccatcctggttaaccagatctttcagacgttgttcaacgccagctgcctgcgcttcaattgccgcttcgttgccattaccggcagttgctgcacgctctgtcgcttgttcaccggccagacggccgaagaccaccagttccgccagggagttggagcccagacggtttgcaccgtgcagaccaacagaggaacattcacccacggcgaacagacctttaatgcgggtttcacagttctgatcggtttcgataccgcccatggtgtagtgtgcggtcggacgtaccggaatcggttctttaaccggatcgacgccaacgtacgctttcgccagttcgcagatgaacggcagacgttcatgcagttttttctcgccgaggtgacgcaggtcgagataaaccacatcgccacgcggcgtggagatggtgttgcctttacgccattcgtgccagaaggcctgagaaactttgtcgcgtggacccagttccatatatttgtttttcggctcgcccagcggagtttccgggcccatgccgtaatcttgcagataacggtagccatttttgttgaccagaataccgccttcaccgcggcagccttcggtcatcaggataccggaacctggcagaccggttgggtgatactgaacgaattccatgtcacgcagcggaacgccgtggcttagcgccatacccataccgtcaccggtaacgatgccgccgttggtgttgtaacgataaacgcgacccgcaccgccagtagccataacgaccgcgttagcacggatctgcaccagcgtgccttccatcatgttcattgctaccaggccgcgaacatgaccatcatcaaccagaatatccagcacgaaatgttcgtcaaaacgctggatctgcgggaattgcagagaggtctggaacagcgtgtgcagcatatggaagccggtcttatcggcggcgaaccaggtgcgctcgattttcatgccgccgaagcgacgtacgttgacgctaccatccgggcgacggctccatgggcacccccacagttccagttgggtcatttcggttgggcagtggtggacgaaataatccacgacatcctgctcacacaaccagtcgccacccgctactgtatcgtgaaagtgatattcgaagctgtcatgatcctgcgcgacagcggcggagcccccttctgcagcaacggtatggctacgcatcgggtatacttttgagattagtgcgatttttgcatttggatttgcctgcgcggcagcaattgcagcacgtaatcccgcgccaccggcgcctacaatggcaagatcggcttgaaaggtttgcacgacattcctccagattgtttttatcccacagccccgtacttcagggtaagtgcctgaaagttacggtctgcgaacgctattccactgctcctttataggtacaacagtatagtctgatggataagtctgaaatttgacgagatcgatttttttagtgcgcaagagggctaaattatcactgaagatgattaatttaattactaaaccatcagatcgtgctttttttagtcactgcccaccgctgtttgattcctgcgtaaaatttgtctcgccgtcgcgttgcgagtagacttcgtgcccttgtcaaaaactggagatttaactatgagcgaaacggcatcctggcagccgagcgcatccattcctaacttattaaaacgcgcggcgattatggcggagatccgtcgtttctttgccgatcgtggagtgctggaggtggagacgccttgtatgagccaggcgacggtaaccgatattcatttggtcccgtttgagacacgtttcgttggccccgggcattcgcaggggatgaatctctggttaatgaccagcccggaataccatatgaaacgcctgctggttgccggttgtgggccggtattccagctgtgccgcagcttccgtaatgaagagatggggcgttatcacaaccctgagttcactatgctggagtggtatcgaccgcactatgatatgtaccggttgatgaacgaggtggacgatctcttacaacaggtgctggactgcccggcagcagaaagcctttcttatcaacaagctttcttgcgttatctggaaattgacccgctctctgccgacaaaacgcaactgcgggaagtcgcagcgaaactggatttgagcaatgttgctgataccgaagaagaccgcgacacgctgctacaattgctgtttacctttggcgtagagccaaatattggcaaagaaaaaccgacctttgtgtaccactttccagccagccaggcatcactggcgcaaatcagtaccgaagatcatcgggtcgctgaacgctttgaggtttattataaaggtattgagctggcgaatggtttccatgaattgacggatgcccgtgagcagcaacaacgctttgaacaagataaccgtaagcgcgcggcgcgcggtttgccgcagcaccccattgaccagaatctgattgaagccttgaaagtcggtatgcctgactgttccggcgtggcattaggtgttgatcgtctggtgatgttggcgctgggcgcggagacactggctgaagtcatcgcctttagcgttgaccgggcataattctgaaaaattactgaattaacagcgaagaatggcgtgataagcgccattctgtagcatatgttttcatttttccgttaaaggccacaatttaagactggatatttgatatcatccaggtatcaattctgtattggtttttacgctgcctgctcaatgttgcgcagtgcagttcagtgggcacgtgttatacacgcgctgaaatgaaggatggtttcatgcctcacacgataaaaaagatgagtctgataggactcatattgatgatctttacttccgtatttggatttgccaatagcccatcggcttattacttaatgggttatagtgcgattcccttttatatattttctgcattgttattctttattccattcgccttaatgatggctgaaatgggagctgcttatcgcaaagaagaaggcggtatctattcctggatgaataatagtgtcggaccacgttttgccttcattggtacgtttatgtggttttcctcttatatcatctggatggtgagtacctccgcgaaagtttgggtaccgttctcaacattcctctatggtagcgacatgacccagcactggcgtattgctggactggagcctacgcaggtggttggtctgctggcagtggcatggatgattctggtcaccgtcgttgcttcaaaggggattaataaaattgcccgcattactgcggtgggcggtattgcagtaatgtgtctgaatttagtattgctgttagtaagcattactattttgttattaaatggtgggcatttcgcgcaggatattaatttccttgcatcaccgaacccaggttatcagtccggtctggcaatgctatcgtttgtggtatttgctatttttgcctatggcggaattgaagcggttggtggtctggtcgataaaacggaaaatccagaaaagaactttgccaaaggtattgtttttgccgctattgttatttcaatcggttattcgctggcaatatttttatggggtgtcagcacaaactggcagcaggtattaagtaatggttccgttaaccttggcaatattacctatgtgctgatgaagagcctcggggtgacgctgggtaacgcactgcatttgtcacctgaagcgtcattgtcgctgggcgtatggtttgcgcgtattaccggactttcgatgttcctcgcttataccggtgcgttctttacgctttgctattcaccgctgaaagccatcatccaggggacgccgaaagcgttgtggccggaaccgatgacgcgcctgaatgcgatggggatgccgtctatcgccatgtggatgcagtgcgggttggttactgtcttcatcctgctggtttcgtttggtggcggtaccgcatccgcgttctttaacaagctgacgctgatggcgaacgtgtctatgacgcttccttacctgttcctcgcgctggctttcccattttttaaagcacgtcaggatctcgacagaccatttgtgattttcaaaacgcatatgtcggcaatgattgcaacagtggttgtcgtactggtggtgacatttgcgaacgtcttcaccattattcagcctgtggttgaagccggagactgggacagcacattgtggatgattggcggccctgtcttcttctcgctgttagcgatggcgatttaccagaactattgcagcagagtggcaaaaaacccgcagtgggcggtggaataacccgatgccctatcgtctgcctgacgatagggcgtaaagacaggaaatgttatggatgacaccagccgggacccggcaataaccgaagatgaaatcagggcgctgcaattttctgccggggatgtagcggaaatagagcagacgattctctcttttgtcgatgcctgccacacccgtaaagtggcgatggtggtgggtagcaccattaacaccctcaaagatcgcgatggtaaacggtggggaaacctgccggatatttattgcgcttatcttatccgatgtctggtttttcgcggggaattagtgggatacggcgatttgtttcgtatgcgctatagcgaaattaagcgaccggttaccttatgagtgcgcgcatgtttgtcttgtgctgcatctggtttattgtggcgttcctctggataaccatcacttccgcgctggacaaagagtggatgattgatggacgcgggattaacaacgtctgcgatgtgttgatgtatctcgaagaagacgatacccgtgatgttggtgtgataatgacgttaccgctctttttcccttttctctggttcgctttgtggcgaaaaaaacgcggctggtttatgtacgccaccgcgctggctattttcggctactggctgtggcagttttttctgcgctatcagttttgtttgtgagccggattggttcatccggcacacaaacttacaaacttcccgcctgacgacctttgcccgcagacgtcagcgttctccccgtttgtttaccgttgaggctttccagacgcatctggaagggcgggaatggcatatcgataccgtgggcgtggaagcctgccagaatcagctggtggatctcatggcgtagcggcatacggtgacccatctcagcggcgtaaatacgcagctcgaaaatctgaatcccctgttgcagatccaccaggaagacttccggtgccgggttgtcgatcaccagcgagcagcgacgcgctgcggtgagcaggatttccgtcacttcttcgctattggcatcggcaggggccggtatcgtcaacaccacgcgcgtgaccgagtcagagagcgaccagttgataaactgctcggtaataaacgccttgttcggcacgattatctctttacggtcccagtcgctgatggtggtggcgcgggtgttaattttcgtcacgctaccggtaagatcgcggatcgttaccgtatcgccaatgcgaatcggtttttcgaacaggataatcaggccagagataaagttggcgaaaatctcctgcaaaccaaaaccgagaccaacaccgagcgcggcaaccagccactgcaatttcgaccactcaataccaatcatcgagaagccgaccagcccgccaatcagcatcagcagatatttggtgatggtggtgatggcgtagcccgtacccggcgttaaatccaggtgctgcaaaatcgccagttccagcagcgcgggcaggttgcgcaccagctgcgtggtgatgataaacaccagaatggcaatcagcaccgcaccgagggtaattggctccagactttctacgccctgtaccgtggaggtgacatcccacagcgaaatattttcgaggaagccgaaagcggaatggatttctgaccacagcacaatgacagaaagcagggcgatcaacatcaaaattgagcgcaccagccgcaaggattgcgcactgatggcatcgagatcgacttcgctttcatcgacttcaattgccccttccgggctactgtgatgatgcgcttcctcttcgccacgcgcgcgttgcgctaacatctctgcccggcgatgcttcgcccggtcaaacgccagcctgcgacgctggatcagcatccagcggcggataacgtgataaaccaccagtagcaggaaccagatggcaaccgaggtttcaagcctcgctaacagtgcctgcgccgttgccagataacccaccgctgacgccagaatggcaaccagtggtgcgccaatcatcatgttccacagcatatggttggtaatgttgtcgccgctgccctctttgttgaggtacagcgggatcccggcctttttcaggctgagggtgaccaccgccagcgcaccgcaaatgaggataaagcaaagccgtcccagcgaaccggagaattcacggtcgtcgaggttatcgaacatcatcagcgccataatcagcggcacaataagcccgatgctcatcaggtagtagcgcatcccacgggaaacacgttcgcgcggccagccaaaatgagcgataaacaagccgttcgggcgggcaaaggtggcgcaaatcatcactacccacagcagcggcacggtggccgttacgccatcgccaatcgcgaccgccagcggataaggccacgcctcgcgcaagccgtaacccagcgtcatccacagcaccggcagcggtgacgcgacgagaatcgaccagaaaagagtgcgcaacgtcagccagaagtgatcctgagtcactttgccgactttcgccgccgaacgttcaagaaaacgggtgaaatagcggcgcgagtaaatactgcaaccgaccagaatcaacgcgccaaacagcggcaaaatcgtctctttgctggtcagcatcatcacactggctttgcccaactgactgaaggtgtccagcgaaatgagacgacgcagatcctgggcgatttccagcggccaggcgatggtcatcgggcgcacgtcagaggtccagaacagatagcggtgcgttgcttcgttcacctctttcagcgcatcctccagttgcccgttggagactttcagcttggtcagttccagtagtagcgtgtcgccaccctgcaacaatgagttcagcaactcacgctgagtgcgcagttgtgcttccagaatacggttttgctcggcggtcagcggctgaccgtcggcctgatggatttgccgtagcagcggctgtttattaagcagatcctcataacgtaaccgttgcacacgcaactgcgccatttcggtatcaagctgttgtggttttggcatttctggtagccgtgccacctgcgcccgcagcgcttcaccgagcaggttggacgatcccagccattgcgactgttcacgcagcgtattcaacgcctgccggacctgtaacgtctggctggcagcctgacgctgttgcgaggcaacgagatccatccgctgcgcctgttgattcagtgccgccgatagttcgcggttaattttgaattgcgcgacgatatctttcggcaaatcggcactgttttctgccagtaattcggtactttccagcgcccgctccgcctcaagctgacgttggctattcaactgattacgtaaggcctgcaaatacgcatccagttgctggctctctttttccgccagctctgagcgcaagcgcgctaattcctgacggttattggcagacagctgcgccagttccagttcatcaacgagcgctttcaggcgtgcggagtcagactgcaacgcgaaattttgtgcctgattgagcggagtattgccggtaagcgttcccaggcggcgctcgatctcatttaactgacggcgggcatcggtttgctgttgcggcagttgattcagtgaatcggcaatctcgcgggcgcgctcctgctcttgctgggcctgacggctcttatccagcaactgactgctgacctggagaatttcctgattcagcgcatcggtagacattcccggcgacacgctgcgcggctcgtcacgcatgttgtttaattgtgcgcgcagagtagcggagagtttcgggtaattatcgataacttgctgatattgtttgatgcgctcaagggaaccttttcgttcctcaagcgcatttaaggcagactggagtgcctctatgacttccggctgcgcgggtttcgccgcttttgcctgctccagttcctgggtgatttgtttgctatcgggggccgtcgcggcgtacgccccccaactgaggcaccaggccatcagaaaagtgataatcaggcgcacgtcagcgtttcctttgatggattagacctggtcttttttgtcgtcaaccaatgggctggcgtcgtgttctgcttcgatctcttcagcaggaagcggggcaggttcagcgtctggcgtaacaaaggtttcggtagatactgccagcggctggccaattttcgtgacagacaggctttccagttgctcaaccagattcactttacccggtgcaaacaggttgataacggtggaaccgagtttaaagcgacccatttcctggcctttaagcagtgccacagaaccgtcgttttccccggcaggccaggtccagcgcttgatgataccttcgcgcggcggcgtaatggtgcccgcccagaccgtctcaatgctgccaacaatcgtcgctccgaccagaatctgcgccattgggccaaattcggtatcgaaaaggcaaatcacgcgttcgttacgggcaaacagattcggcacgttctgagcggtgagatggttaacggagaagagatcgcccggcacgtagatcatctcacgcagaataccgttgcacggcatgtgtacgcggtggtagtcacgcggggagaggtaagtggtcacaaacgtaccgttgcggaacaggttcgccatcagatagttgcctgccagcaaggcttcgaggctgtagttgtggcctttggcttgcaggattttatcttcttcgattttacccaactggctgataacgccatcggcaggcatgaccaggacattcggatcggtatcgattgggcgtacttcgtcacgcagcggacggacaaagaattcgttaaaggtgcggtagctggcggtgtccggcttttgcgcctctttcatgtcgaccttgtagtatttaacgaacagatcgataaccagttttgtcagccatcctgcccgcttgcttgcgccccaacccgccaggcgagtaagccatagtttcggcagaatgtactgtagcgaaagtttaaatgaatttaacaaggtagcctccaggccattgttttgtcgttcctgatccggccaacatgccggatcctgaaaaaaaggggatgattctaacgacggttagcttaattgtcagtcatccgtatcagaaaagtttttacgcgtttttacctgcgccatgctttccagaatacggtgatagttttcgaaacgggtttccgcgatttttccttcctcaaccgcttcccggatagcgcagcccggatcggtatcgtgtttgcaatcgcgatatttacacagacctaaatagtcatggaattcgacaaagccctgagtgatttgttccggctccaggtgccagaggccgaactcacgcacaccaggggaatcaatcacatcaccgccgtgcgggaagtgatacagtcgtgcggcggtcgtggtgtgctgaccgagacccgagttgtcagagacatcgttggtcaggatctctttttgcagccccagcaacgcgttcagcaggctggatttgccgacgccagactggccggcaaaaatgctgatgcgcccggtcaacgcctcttccagcggttttagcccatcctgagtatggctggaaaccatcaatacgcgataaccaatgttgcggtagatatccatctgctcgttgacgaacgccatgccttcgtcgtccagcaggtctatcttattgagcacaataatcggctcaatctgcaaggtttcgcaggccaccaggtaacggtcgataatattgagcgacagctccggcaaaatggcggagacaatgacaatctggtcgatgttggcggcaataggtttcacgccgtcgtagaaatccggacgcgtcaacactgaggtgcgctcatgcaccgcttccacgatccctttgacatttacgccttccgccgccggtttacccggacgccagactacgcggtcgccggtcaccagcgaacggatggtacggcgaatattgcagcggtgaacgtcgccatcggcggattccacatcagcgtgcataccaaagcggctgatgacgataccttcatcaggctcgccaaacagattgtcgtcgtagtcgggcttctccttagacgttttaagacgacgctggtgattggcgttcacgcggcgctgctggcctttggagagtttatttttactcaatcgtacagactcctggtcgcccctgatgggcaaaacatctatgatacacgcaattgtggatcaatatagtcactgtgaatgggtggaaaatagcatgagtgccaatgaaaacaacctgatttggatcgatcttgagatgaccggtctggatcccgagcgcgatcgcattattgagattgccacgctggtgaccgatgccaacctgaatattctggcagaagggccgaccattgcagtacatcagtccgatgaacagctggcgctgatggatgactggaacgtgcgcacccataccgccagcgggctggtagagcgcgtgaaagcgagcacgatgggcgatcgggaagctgaactggcaacgctcgaattcttaaaacagtgggtgcctgcgggaaaatcgccgatttgcggtaacagcatcggacaggaccgtcgtttcctgtttaaatacatgccggagctggaagcctacttccactaccgttatctcgatgtcagcaccctgaaagagctggcgcgccgctggaagccggaaattctggatggttttaccaagcaggggacgcatcaggcgatggatgatatccgtgaatcggtggcggaactggcttactaccgcgagcattttatcaagctgtaaaatttttcctggtcacgtaagcgccggaatccacttgcggcggcgtgattttgacgctaaattgaacgtcttgctgataatttcagcacttgagataaaaacgcaaaaaaaacttttttggggggttgcagagggaaagatttctcgtataatgcgcctcccgtaacgacgcagaaatgcgaaaattacgaaagcaaaattaagtagtacgcgggaatagctcagttggtagagcacgaccttgccaaggtcggggtcgcgagttcgagtctcgtttcccgctccaaaatttgaaaagtgctgcaaagcacagaccacccaagcgggaatagctcagttggtagagcacgaccttgccaaggtcggggtcgcgagttcgagtctcgtttcccgctccaaaatttgaaagtgctgtaaggcacagaccacccaagcgggaatagctcagttggtagagcacgaccttgccaaggtcggggtcgcgagttcgagtctcgtttcccgctccaaattcttctctcaataaaatatccacagcgatgcgatgcgttattgctggttttcgttgtctctgacaaactcttgtaaacagagttatccacagcctcaggctgtaatcttaatttcaaagaaacttcgcacggtgaatagtatttttttaacatattgatagataagttaaaaattaagattccgttttgtcgagtcgatcacttgacgattttattcgtcttgaattgcaatgcgtttttatttttattcacaagctgtggatgaatcaggcgtcacgcggtaaccctttttcaatcacccgaaccagacgctgttttttcggcaattgcacttcgactatgcacgcatttcgtctctctatttgctgcgcaatcgcccacgctatgtgctcatcgagaagtgggtgctcacctttacgactttccagcgctgtcaaaatcgtttcatcccaaggggcattgcctaatgctacggcgatattacgcagccaacgcaggtgaccaatacgacgaatcgccgatccttccgtgacttttaaaaacttctcttcgctccaggcgaataactcaatgagttccggtgcgtgtagcggcttacgcgggctgaaatcctcttctgtggtgagttgtgaatagcgattccacgggcagataagctggcagtcatcgcaaccgtaaatacggtttcccattaacggtcgcaactcttccgggatcgccccttcaagttcgatggtgagataagagatacagcggcgagcatcgacggtatatggctcgacgatggcaccggtcgggcaaatcgtcatacaggccacgcatttaccgcatccttcctcgactggttgatccacgggcagcggaatatcgaccagcaattcgcctaaaaagaagaaagaaccggcctcgcgattgaggataagtgagtgcttacctgtccagccgagcccagctttttcagctaacgggcgctcgagaataggcgcagaatcgacaaacggtctaaaattcagcgaaacacaatgttgctgaatcatctcgcccagctttttgagtcggttgcgcagaagtttgtgatagtcacggcccagcgcataacggctaacatagccgagtttggggtttttcagcgtgctggcaaatgcggcgttagcaggaaggtaattcatccgcacgctgatcacgcgcagcgtaccgggcaataattcatgggggcgagcgcgcagcataccgtgacgtgccatccagtccatttcgccgtggtattgtttgtccagccatgcttgcagtttgggctcggactcgctgagatcggtatcggtaatacctacctgctgaaagcccagttccagcccccactgtttaattttttgcgctaactgattgagatcgaggggctctgacatgacggaccatacaatgaagaaaaaccccgtaagtataccacacaccgtctggcacgccgacgatatccgccgcggagaacgtgaggcggcagatgcgctggggcttacactctatgagctgatgcttcgcgctggcgaagccgcattccaggtgtgtcgttcggcgtatcctgacgcccgccattggctggtgctgtgcggtcatggtaataacggcggcgatggctacgtggtcgcgcggctggccacagcggtcggcattgaggtcacgctgctggcccaggagagcgacaaaccgttgccggaagaggccgcgctggcacgcgaagcatggttaaacgcgggaggcgagatccatgcttcgaatattgtctggcccgaatcggtagatctgattgttgatgcgctgctcggtaccggcttgcagcaagcgccccgcgaatccattagccagttaatcgaccacgctaattcccatcctgcgccgattgcggcggttgatatcccttccggcctgctggctgaaaccggcgctacgccaggcgcagtgatcaacgccgatcacaccatcacttttattgcgctgaaaccaggcttgctcactggaaaagcgcgggatgttaccggacaactgcattttgactcactggggctggatagttggctggcaggtcaggagacgaaaattcagcggttttcggcagaacaactttctcactggctaaaaccgcgtcgcccgacttcgcataaaggcgatcacgggcggctggtaattatcggtggcgatcacggcacggcgggggctattcgtatgacgggggaagcggcgctacgtgctggtgctggtttagtccgagtactgacccgcagtgaaaacattgcgccgctgctgactgcacgaccggaattgatggtgcatgaactgacgatggactctcttaccgaaagcctggaatgggccgatgtggtggtgattggtcccggtctgggccagcaagagtgggggaaaaaagcactgcaaaaagttgagaattttcgcaaaccgatgttgtgggatgccgatgcattgaacctgctggcaatcaatcccgataagcgtcacaatcgcgtgatcacgccgcatcctggcgaggccgcacggttgttaggctgttccgtcgctgaaattgaaagtgaccgcttacattgcgccaaacgtctggtacaacgttatggcggcgtagcggtgctgaaaggtgccggaaccgtggtcgccgcccatcctgacgctttaggcattattgatgccggaaatgcaggcatggcgagcggcggcatgggcgatgtgctctctggtattattggcgcattgcttgggcaaaaactgtcgccgtatgatgccgcctgtgcgggctgtgtcgcgcacggtgctgcagctgacgtactggcggcgcgttttggaacgcgcgggatgctggcaaccgatctcttttccacgctacagcgtattgttaacccggaagtgactgataaaaaccatgatgaatcgagtaattccgctccctgatgagcaggcaacattagacctgggcgagcgggtagcgaaagcctgcgatggcgcaaccgtaatctatctgtatggcgatttaggcgcaggtaaaaccacctttagccggggctttttacaagctctgggtcatcagggtaatgtcaaaagccccacttatacgctggtcgaaccctatacgctcgacaatttaatggtttatcactttgatttgtaccgccttgccgatcccgaggagctggagtttatggggattcgcgattattttgccaacgatgccatctgcctggtggagtggccacaacaaggtactggtgttcttcctgacccggatgtcgaaatacacattgattatcaggcacaaggccgtgaggcgcgcgtgagtgcggtttcctctgcgggtgaattgttgctggcgcgtttagccggttaacctttgaaaggtggcgggatgatgtatcgcatcagaaattggttggtagcgacgctgctgctgctgtgcacgccggtgggtgccgcgacgctctctgatattcaggtttctaacggtaatcaacaggcgcggataacgttgagttttattggcgatcctgattatgcgtttagccatcaaagcaaacgcaccgtggcgctcgatatcaaacaaacgggcgtgattcagggactgccgttgttgttcagcggcaataatctggtgaaggcgattcgctctggaacgcctaaagatgcacaaacgctacggctggtggtcgatcttaccgaaaacggtaaaaccgaagcggtgaagcggcagaatggcagcaattacactgtcgtctttacgattaacgccgatgcgccgccacctcctcctccgccgcccgtggttgcgaaacgcgttgaaacgcctgcggttgtcgcaccgcgcgtcagcgaaccggcgcgcaatccgtttaaaacggaaagtaaccgcactacgggtgttatcagcagtaatacggtaacgcgtccggcagcgcgcgcgacggctaacactggcgataaaattatcatcgctattgatgccggacacggcggtcaggaccctggcgctatcggccccggtggtacgcgggagaaaaatgtcaccatcgccatcgcgcgtaaattgcgtactttgctcaatgacgatccgatgtttaagggcgttttaacccgtgacggggattactttatctcggtgatggggcgcagtgatgtggcacgtaagcaaaacgccaatttcctcgtgtcgattcacgctgatgccgcaccgaaccgcagtgcgactggcgcttccgtatgggtgctctctaaccgtcgcgccaacagcgaaatggccagctggctggagcagcacgagaaacagtcggagctgctgggtggggcgggtgatgtgctggcgaacagtcagtctgacccctatttaagccaggctgtgctggatttacagttcggtcattcccaacgggtagggtatgatgtagcgaccagtatgatcagtcagttgcaacgcattggcgaaatacataaacgccgaccagaacacgcgagtctcggcgttctgcgttcgccggatatcccgtcagtactggtcgaaaccggttttatcagcaacaacagcgaagaacgtttgctggcgagcgacgattaccaacaacagctggcagaagccatttacaaaggcctgcgcaattatttccttgcgcatccgatgcaatctgcgccgcagggggcaacggcacaaactgccagtacggtgacgacgccagatcgcacgctgccaaactaaggacgattgatgccaattcaggtcttaccgccacaactggcgaaccagattgccgcaggtgaggtggtcgagcgacctgcgtcggtagtcaaagaactggtggaaaacagcctcgatgcaggtgcgacgcgtatcgatattgatatcgaacgcggtggggcgaaacttatccgcattcgtgataacggctgcggtatcaaaaaagatgagctggcgctggcgctggctcgtcatgccaccagtaaaatcgcctctcaggacgatctcgaagccattatcagcctgggctttcgcggtgaggcgctggcgagtatcagttcggtttcccgcctgacgctcacttcacgcaccgcagaacagcaggaagcctggcaggcctatgccgaagggcgcgatatgaacgtgacggtaaaaccggcggcgcatcctgtggggacgacgctggaggtgctggatctgttctacaacaccccggcgcggcgcaaattcctgcgcaccgagaaaaccgaatttaaccacattgatgagatcatccgccgcattgcgctggcgcgtttcgacgtcacgatcaacctgtcgcataacggtaaaattgtgcgtcagtaccgcgcagtgccggaaggcgggcaaaaagaacggcgcttaggcgcgatttgcggcaccgcttttcttgaacaagcgctggcgattgaatggcaacacggcgatctcacgctacgcggctgggtggccgatccaaatcacaccacgcccgcactggcagaaattcagtattgctacgtgaacggtcgcatgatgcgcgatcgcctgatcaatcacgcgatccgccaggcctgcgaagacaaactgggggccgatcagcaaccggcatttgtgctgtatctggagatcgatccgcatcaggtggacgtcaacgtgcaccccgccaaacacgaagtgcgtttccatcagtcgcgtctggtgcatgattttatctatcagggcgtgctgagcgtgctacaacagcaactggaaacgccgctaccgctggacgatgaaccccaacctgcaccgcgttccattccggaaaaccgcgtggcggcggggcgcaatcactttgcagaaccggcagctcgtgagccggtagctccgcgctacactcctgcgccagcatcaggcagtcgtccggctgccccctggccgaatgcgcagccaggctaccagaaacagcaaggtgaagtgtatcgccagcttttgcaaacgcccgcgccgatgcaaaaaccaaaagcgccggaaccgcaggaacctgcacttgcggcgaacagtcagagttttggtcgggtactgactatcgtccattccgactgtgcgttgctggagcgcgatggcaacatttcacttttatccttgccagtggcagaacgttggctacgtcaggcacaattgacgccgggtgaagcgcccgtttgcgcccagccgctgctgattccgttgcggctaaaagtttctgccgaagaaaaatcggcattagaaaaagcgcagtctgccctggcggaattgggtattgatttccagtcagatgcacagcatgtgaccatcagggccgtgcctttacccttacgccaacaaaatttacaaatcttgattcctgaactgataggctacctggcgaagcagtccgtattcgaacctggcaatattgcgcagtggattgcacgaaatctgatgagcgaacatgcgcagtggtcaatggcacaggccataaccctgctggcggacgtggaacggttatgtccgcaacttgtgaaaacgccgccgggtggtctgttacaatctgttgatttacatccggcgataaaagccctgaaagatgagtgatatcagtaaggcgagcctgcctaaggcgatttttttgatggggccgacggcctccggtaaaacggcgttagccattgagctgcgtaaaattttaccagtagagttgataagcgttgattctgcccttatttacaaagggatggatatcgggacggcgaagccgaacgctgaagagttactcgccgcgccgcaccgattgctggatattcgcgatccgtcgcaggcttactcggctgctgattttcgccgcgatgcgctggcggaaatggccgatatcaccgcggcggggcggatcccactgttagtgggcggtacgatgttgtatttcaaggcattgctggaagggttgtcgccgctaccgtcggcagacccggaagtgcgggccagaattgagcaacaggcggcagagcaaggttgggagtcattgcatcgtcaacttcaggaggtagatccggttgcggcagcaaggattcatccaaatgatccacaaaggctttcccgggcactggaagtttttttcatttcgggtaaaactttaacggaactgacgcaaacgtcaggagacgctctaccgtatcaggtgcatcagttcgccatcgccccggcgagccgtgaactgctccatcaacgcattgagcagcgttttcatcagatgttggcttcaggttttgaagcagaagtccgggcgctttttgcccgaggagatttgcatacggacttgccttccattcgttgcgtgggttatcgccagatgtggtcttaccttgaaggcgaaatctcatacgatgaaatggtttatcgaggtgtttgcgccacgagacagttggcgaagcggcagataacctggctgcgtggttgggaaggggttcactggcttgacagtgaaaaaccagaacaggcgcgtgacgaagtattacaggttgttggtgctatcgcaggctgaatgtgtacaattgagacgtatcgtgcgcaatttttcagaatcgaaaggttcaaagtacaaataagcatataaggaaaagagagaatggctaaggggcaatctttacaagatccgttcctgaacgcactgcgtcgggaacgtgttccagtttctatttatttggtgaatggtattaagctgcaagggcaaatcgagtcttttgatcagttcgtgatcctgttgaaaaacacggtcagccagatggtttacaagcacgcgatttctactgttgtcccgtctcgcccggtttctcatcacagtaacaacgccggtggcggtaccagcagtaactaccatcatggtagcagcgcgcagaatacttccgcgcaacaggacagcgaagaaaccgaataaggtttcgggctgttttttttacacggggagccagcgatcctgcgttccccgctgatctatttagagggttatacgcttgtttgaccgttatgatgctggtgagcaggcggtactggtacacatctattttacgcaagacaaagatatggaagacctccaggagtttgaatctctggtctcttccgccggtgtcgaagcattgcaggtgattaccggtagccgtaaagcgccgcacccaaagtattttgtaggtgaaggtaaagcagttgaaattgcggaagctgtcaaagcgacgggtgcttcggtcgttctttttgaccatgccctgagcccggcgcaagagcgtaacctggagcgtttgtgcgagtgtcgtgttatcgaccgcaccggccttattttagatattttcgcccaacgtgcgcgtacccatgagggtaagttgcaggttgagctggcgcagctgcgccatctggctacgcgcctggtgcgtggctggacccaccttgaaagacagaaaggcgggataggtttgcgtggtccgggtgaaacccagctcgaaaccgaccgtcgtttgttgcgtaatcgcatcgtgcagatacagtcacgcctggaaagagttgaaaagcagcgtgagcaggggcggcaatcgcgtatcaaagccgacgttcctactgtttcgctggtgggatataccaacgccggtaaatctacccttttcaatcgcatcaccgaagcgcgggtctacgcggcagaccagttgtttgccaccctcgacccgacgttgcggcgtattgacgttgcagatgtcggtgaaaccgtacttgcagataccgtagggtttattcgccacctgccgcacgatctggtggcggcatttaaagccacgttacaagagacgcggcaagccacattactgctgcacgtcattgatgcggcggatgtgcgtgtacaagaaaacatcgaagcggtgaatacggttcttgaagagatcgacgctcacgagatcccaaccctgctggtgatgaacaagatcgatatgctggaagatttcgaaccgcgtattgatcgggacgaagagaacaaaccgatccgtgtctggctttccgcacagaccggagcggggataccacagctttttcaggctttgacggagcggctttccggcgaggtggcgcagcatacattgcgtttgccgccgcaggaagggcgtctgagaagtcgtttttatcagcttcaggcaatagaaaaagagtggatggaggaggacggcagcgtaagtctgcaagttcgtatgccgatcgttgactggcgtcgcctctgtaaacaagaaccggcgttgatcgattacctgatctaacggcgtagcgtctgaagcgtggagtcatatcctctggcgtcgaaagacaacagggatcaccgcataacaaatatggagcacaaacatggcgtggaatcagcccggtaataacggacaagaccgcgacccgtggggaagcagcaaacctggcggcaactctgagggaaatggaaacaaaggcggtcgcgatcaagggccacctgatttagatgatatcttccgcaaactgagcaaaaagctcggtggtctgggcggcggtaaaggcaccggatctggcggtggcagttcatcgcaaggcccgcgcccgcagcttggcggtcgtgtcgttaccatcgcagcggcagcgattgtcattatctgggcggccagtggtttctataccattaaagaagccgaacgcggcgtggtaacacgctttggtaaattcagccatctggttgagccgggtctgaactggaaaccgacgtttatcgacgaagtcaaaccggtgaacgtggaagccgtgcgtgaactggccgcttctggtgtgatgctgacgtcggacgagaacgtagtgcgcgttgagatgaacgtgcagtaccgcgtcaccaatccggaaaaatatctgtatagcgtgaccagcccggatgacagcctgcgtcaggctaccgacagcgccctgcgcggggttatcggtaaatacaccatggaccgcattctgacggaaggtcgtaccgtgattcgtagcgatactcagcgcgaactggaagagactatccgtccgtatgacatgggtatcacgctgctggacgtcaacttccaggctgctcgtccgccggaagaagtaaaagcggcgtttgacgatgcgattgccgcgcgtgaaaacgaacagcaatacattcgtgaagcagaagcgtataccaacgaagttcagccgcgtgcgaacggtcaggcgcaacgtatcctcgaagaggcgcgtgcgtacaaggcccagaccatcctggaagctcagggtgaagtggcgcgctttgctaaacttctgccggaatataaagccgcgccggaaattactcgcgagcgtctgtatatcgagacgatggaaaaagtgttgggtaacacccgcaaagtgctggttaacgataaaggtggcaacctgatggttctgccgttagaccagatgctgaaaggcggtaacgcccctgcggcgaagagcgataacggtaccagcaatctgctgcgtctgccgccagcctcttcctccacaaccagtggagcaagcaacacgtcgtccaccagtcagggcgatattatggaccaacgccgcgccaacgcgcagcgtaacgactaccagcgtcagggggaataacgatgcgtaagtcagttatcgcgattatcatcatcgtgctggtagtgctttacatgtctgtctttgtcgtcaaagaaggtgagcgcggtattacgctgcgttttggtaaggtactgcgtgacgatgacaacaaacctctggtttatgagccgggtctgcatttcaagataccgttcattgaaacggtgaaaatgctcgacgcacgtattcagaccatggacaaccaggccgaccgctttgtgaccaaagagaagaaagacctgatcgtcgactcttacatcaaatggcgcatcagcgatttcagccgttactacctggcaacgggtggtggcgacatttcgcaagcggaagtgctgttgaaacgtaagttctctgaccgtctgcgttctgaaattggtcgcctggacgtgaaagatatcgtcaccgattcccgtggtcgtctgaccctcgaagtacgtgacgcgctgaactccggttctgcgggtacagaagatgaagttactaccccggcggcagataacgccattgccgaagcggcagagcgcgtaacggctgagacgaagggcaaagttccggtcatcaacccgaacagtatggcggcgctgggtattgaggttgtcgatgtgcgaattaagcagatcaacctgccgaccgaagtgtctgaagcgatctacaaccgtatgcgcgccgagcgtgaagcggtagcgcgtcgtcaccgttcacaaggtcaggaagaagcggaaaaactgcgcgcgactgccgactatgaagtgaccagaacgctggcagaagctgagcgtcagggccgcatcatgcgtggtgaaggcgatgccgaagcagccaaactgtttgctgatgcattcagtaaagatccggacttctacgcattcatccgtagcctgcgtgcttatgagaacagcttctctggcaatcaggacgtgatggtcatgagcccggatagcgatttcttccgctacatgaagacgccgacttccgcaacgcgttaatataacgactgcggtacaggtcaataaagccaccgcatcctcagggatgtcggtggttttctttttctataaggataatgaatgaattcgacaatctggctggcgcttgccctggttttggtactggaaggtttagggccgatgctttacccgaaggcatggaagaagatgatctctgcgatgaccaatttgcccgataatattttacgtcgttttggcggtggacttgtggttgcgggcgttgtggtctactacatgttgaggaaaacgattggctgaacaaaaaacagactgatcgaggtcatttttgagtgcaaaaagtgctgtaactctgaaaaagcgatggtagaatccatttttaagcaaacggtgattttgaaaaatgggtaacaacgtcgtcgtactgggcacccaatggggtgacgaaggtaaaggtaagatcgtcgatcttctgactgaacgggctaaatatgttgtacgctaccagggcggtcacaacgcaggccatactctcgtaatcaacggtgaaaaaaccgttctccatcttattccatcaggtattctccgcgagaatgtaaccagcatcatcggtaacggtgttgtgctgtctccggccgcgctgatgaaagagatgaaagaactggaagaccgtggcatccccgttcgtgagcgtctgctgctgtctgaagcatgtccgctgatccttgattatcacgttgcgctggataacgcgcgtgagaaagcgcgtggcgcgaaagcgatcggcaccaccggtcgtggtatcgggcctgcttatgaagataaagtagcacgtcgcggtctgcgtgttggcgaccttttcgacaaagaaaccttcgctgaaaaactgaaagaagtgatggaatatcacaacttccagttggttaactactacaaagctgaagcggttgattaccagaaagttctggatgatacgatggctgttgccgacatcctgacttctatggtggttgacgtttctgacctgctcgaccaggcgcgtcagcgtggcgatttcgtcatgtttgaaggtgcgcagggtacgctgctggatatcgaccacggtacttatccgtacgtaacttcttccaacaccactgctggtggcgtggcgaccggttccggcctgggcccgcgttatgttgattatgttctgggtatcctcaaagcttactcaactcgtgtaggtgcaggtccgttcccgaccgaactgtttgatgaaactggcgagttcctctgcaagcagggtaacgaattcggcgcaactacggggcgtcgtcgtcgtaccggctggctggacaccgttgccgttcgtcgtgcggtacagctgaactccctgtctggcttctgcctgactaaactggacgttctggatggcctgaaagaggtgaaactctgtgtggcttaccgtatgccggatggtcgtgaagtgacgaccactccgctggcagctgacgactggaaaggtgtagagccgatttacgaaaccatgccgggctggtctgaatccaccttcggcgtgaaagatcgtagcggtctgccgcaggcggcgctgaactacatcaagcgtattgaagagctgactggtgtgccgatcgatatcatctctaccggtccggatcgtactgaaaccatgattctgcgcgatccgttcgacgcgtaattctggtacgcctggcagatattttgcctgccgggctaacagtgtgatacattgctgtgtcggttaagctattacgctatccgacacagtgttaaatcctcgcttttttccttccccgaactgaaataaattagcgacacagcttgtggctggtttatcatcaatataaatgtattttttcccgatttcccttttgaggttgatgtgcagttaacgagtttcactgattacggattacgtgcgctgatctacatggcgtcattgccagaagggcggatgaccagtatttctgaagtgactgacgtctacggcgtctcccgtaatcatatggtcaaaataatcaatcaacttagtcgtgccggctacgtgactgctgttcgtggaaaaaatggcggcattcgcctgggtaaaccggcgagtgcgatacgtattggtgatgtggtgcgcgagctggagcccttatcgctggtgaattgcagcagtgagttttgccacattacacctgcctgtcggttgaaacaggcgctttctaaggccgtgcaaagttttcttacggaactggataactacacgcttgccgatttggttgaagagaatcaaccgctttataaattattgctggtggagtgacgaaaatcttcatcagagatgacaacggaggaaccgagatgtcacaagatcctttccaggaacgcgaagctgaaaaatacgcgaatcccatccctagtcgggaatttatcctcgaacatttaaccaaacgtgaaaaaccggccagccgtgatgagctggcggtagaactgcacattgaaggcgaagagcagcttgaaggcctgcgtcgccgcctgcgcgcgatggagcgcgatggtcaactggtcttcactcgtcgtcagtgctatgcgctgccggaacgcctcgacctggtgaaaggtaccgttattggccaccgtgatggctacggctttctgcgggttgaagggcgtaaagatgatttgtatctctccagcgagcagatgaaaacctgcattcatggcgatcaggtgctggctcagccgctgggcgctgaccgtaaaggtcgtcgtgaagcgcgtattgtccgtgtactggtgccaaaaaccagccaaattgttggtcgctactttaccgaagcgggcgtcggctttgtggttcctgacgatagccgtctgagcttcgatatcttaatcccgcccgatcagatcatgggcgcgcggatgggctttgtggtggttgttgaactgacccaacgcccgactcgccgtaccaaagcggtgggtaaaatcgtcgaagtgctgggcgacaatatgggcaccggcatggcggttgatatcgctctgcgtacccatgaaattccgtacatctggccgcaggctgttgagcaacaggttgccgggctgaaagaagaagtgccggaagaagcaaaagcgggccgtgtcgatttgcgcgatttaccgctggtcaccattgatggcgaagacgcccgtgactttgacgatgcggtttactgcgagaaaaaacgcggcggcggctggcgtttatgggtcgcgattgccgacgtcagctactatgtgcgcccgccaacgccgctggacagagaagcgcgtaaccgtggtacgtcggtgtacttcccttcgcaggttatcccgatgctgccggaagtgctctctaacggcctgtgctcgctcaacccgcaggtagaccgcctgtgtatggtgtgcgagatgacggtttcgtcgaaaggccgcctgactggctacaaattctacgaagcggtgatgagctctcacgcgcgtctgacctacaccaaagtctggcatattctgcagggcgatcaggatctgcgcgagcagtacgcaccgctggttaagcatctcgaagagttgcataacctctacaaagtgctggataaagcccgtgaagaacgtggcgggatctcatttgagagcgaagaagcgaagtttattttcaacgctgaacgccgtattgagcgtatcgaacagactcagcgtaacgacgcacacaagttaattgaagagtgcatgattctggcgaatatctcggcggcgcgtttcgttgagaaagccaaagaaccagcattgttccgtattcacgacaagccgagcaccgaagcgattacctctttccgttcagtactggcggagctggggctggaactgccgggcggtaacaagccggaaccgcgtgactacgcggagctgctggagtcggttgccgatcgtcctgatgcagaaatgctgcaaaccatgctgctgcgctcgatgaaacaggcgatttacgatccagaaaaccgtggtcacttcggtctggcattgcagtcctatgcgcactttacttcgccgattcgtcgttatcctgacctgacgctgcaccgcgccattaaatatctgctggcgaaagagcaggggcatcagggcaacaccacggaaaccggcggctaccattattcgatggaagagatgctgcaactgggtcagcactgttcgatggcggaacgtcgtgccgacgaagcaacgcgcgatgtggctgactggctgaagtgtgacttcatgctcgaccaggtaggtaacgtctttaaaggcgtaatttccagcgtcactggctttggcttcttcgtccgtctggacgacttgttcattgatggtctggtccatgtctcttcgctggacaatgactactatcgctttgaccaggtagggcaacgcctgatgggtgaatccagcggccagacttatcgcctgggcgatcgcgtggaagttcgcgtcgaagcggttaatatggacgagcgcaaaatcgactttagcctgatctccagcgaacgcgcaccgcgcaacgtcggtaaaacggcgcgcgagaaagcgaaaaaaggcgatgcaggtaaaaaaggcggcaagcgtcgtcaggtcggtaaaaaggtaaactttgagccagacagcgccttccgcggtgagaaaaaaacgaagccgaaagcggcgaagaaagacgcgagaaaagcgaaaaagccatcggcgaaaacgcagaaaatagccgcagcgaccaaagcgaagcgtgcggcgaagaaaaaagtggcagagtgatcaataccctctttaaaagaagagggttagattgctgacaaaatgcgctttgttcatgccggatgcggcgtgaacgccttatccggcctacataatcacgcaaattcaatatattgcagagatcatgtaggccggataaacgtagtgcatcaggcaaaacgtaaacaacgagtacattaatgagcgaaatgatttacggcatccacgcagtgcaggccctgctggagcgcgcccctgaacgttttcaggaagtctttattttaaaaggccgtgaagataaacgtctgttaccgctgattcacgcccttgagtctcagggcgtggttatccagttggcaaaccgccaatatctcgacgagaaaagcgacggtgccgtgcatcagggcattatcgcccgcgtgaagccaggacgtcagtatcaggaaaacgatctgccggatctgatcgcttcgctcgatcaaccgttcctgctgatcctcgacggtgtaaccgatccgcacaacctcggcgcgtgcctgcgtagcgcggacgctgctggcgttcacgcggtgattgtgccgaaagatcgctccgcacagctcaacgctacggcgaaaaaagtagcctgcggcgcggcagaaagcgttccactgattcgggtgactaaccttgcgcgcaccatgcgtatgttgcaggaagagaatatctggatcgtcggtacggcaggcgaggcggatcatacactctatcagagcaaaatgaccggacgcctggcgctggtgatgggcgcggaaggtgaaggtatgcgtcgcctgacccgtgaacattgcgatgagttgatcagcatcccaatggcaggaagtgtttcttccctgaacgtttcggttgcaaccggaatttgcttatttgaagcggttcgtcagcgcagctagttcgtctgaattatgaaaagccatccagatttggatggttttttttgtctatagctggtaagataattacgtactgcaaatattcattttattaatatttaaactaaatctatatggaataatatatgacatggaatccgttggcgctggcgacggcgctgcaaactgtacctgaacaaaatattgatgtgacaaatagcgagagcgcattaattattaaaatgaatgattatggcgatttgcaaatcaatattctttttacttcccgccaaatgattatcgaaacctttatttgtccggtaagtagtatcagcaatccagatgaatttaataccttcttattaagaaatcagaagatgatgccgttgtcatcggtaggaatctccagcgtgcaacaggaagagtattacattgttttcggggcgttatcgcttaaatcttctcttgaagatatcctgcttgagataacctcgctggtagataacgcattggatctggctgaaattacagaagaatattcacactaattacaaggacgggtatttatgggaattttaaaaagtttatttacgctggggaaatcgtttatctcccaggcggaagaatccattgaagaaacccagggcgtgcgcatgctggaacagcatattcgtgacgctaaagctgaactcgataaagccggaaaatctcgcgttgatctgctggcgcgggtgaaattaagtcacgataagctgaaagatttacgtgagcgcaaagccagtctggaagcccgtgcgctggaagcgttaagcaagaacgttaatccgtcgttgattaacgaagttgctgaagaaatcgcgcgccttgagaatctcattaccgctgaagagcaagtgttgtcgaatctggaagtctcccgtgatggcgtggaaaaagcagttacagcgacagcgcagcgtatcgctcagtttgagcagcaaatggaagtcgttaaagccactgaagccatgcagcgtgcacaacaggctgtaacaacctctaccgttggcgcatcttccagcgtttcgacagcggcagaatccttaaaacgcctgcaaacgcgtcaggccgaacgtcaggctcgcctggatgctgctgcacagttggaaaaagtcgcagacggtcgcgatcttgatgaaaagctggcggaagccggaattggcggtagcaataaaagtagcgcccaggatgtattagcaagactgcaacgccaacagggcgagtaatttttttgccagcctcgctaaaaggctggcaactattttaaggataaaatatgtctggttttttccagcgtctgtttggcaaggataataagcctgctatcgctcgcggtccgctgggacttcatctcaatagtggctttacgctcgacacgttagcgtttcgtttgctggaagatgaattgctgattgcgctgccgggtgaggaatttacggtagccgctgtcagccacatcgatctgggcggcggtagtcagattttccgctactacacttcaggcgatgaatttctgcaaatcaataccaccggcggcgaagatattgatgacattgatgatatcaagctctttgtctatgaagagagctacggtatcagtaaagagagtcactggcgcgaggcgatcaacgccaaagtgatgggggcaatgatcttaaactggcaggaaaaacgctggcagcgattttttaacagcgaagaaccgggaaatatcgaacccgtctacatgctggaaaaagtagaaaatcaaaaccatgccaaatgggaggtccataattttaccatgggctaccaacgccaagtaaccgaagatacttacgaatatttgctgttaaatggtgaggaatcttttaacgatctcggcgagccagagtggttattttcgcgcgcgttgggtgtcgatatcccgctgacatcacttcatattattggttaattacaaggacgtttacaatgcatatactggattcacttcttgcctttagtgcctatttttttattggcgtggctatggtgattatttttctgtttatctactccaaaattacaccgcacaacgaatggcaattaatcaaaaacaataataccgcggcgtcactggcattcagcggtacattgttgggttacgtgatccccttatccagtgcggcaatcaatgcggtgagtattccagactatttcgcctggggcgggattgcactggtgattcagttactcgtttttgctggtgtcagactttatatgcccgcattaagcgaaaaaattattaatcacaataccgcagcaggaatgtttatgggaaccgccgcactggctggtggtatttttaacgcagcttgtatgacatggtaatggacgatcatggccagaaaacgcaaatcaagaaataacagtaaatttggtcacggagcgatcagtcgcattggaagaccgcataatccttttgagccgcgccgcaatcgctacgcacaaaaatacttaacgttggtgctaatgggcggtgccgtttttttaatagtcaaaggatggagtgaaagtggcgatgtcgataacgacggcgacggaacgttttattcgacagtgcaggattgtattgatgacggtaataatgccgacatttgcgcgcgtggctggaacaacgccaaagcggcattttatgccgatgttccgaagaatatgactcagcagaattgtcagtctaagtacgaaaattgctactacgacaatgttgaacagagttggatcccggtcgtttctggatttttgttaagccgagttattcgtaaagatcgcgatgagccgttcgtctataacagcggcggatcctcatttgcttcccgccccgtctggcgcaacacttccggtgattactcctggcgctccggttctggcaaaaaagagtcttactcttcaggcggctttaccaccaaaaaagcgtcaaccgtttcgcgcggcggctatggtcgttcttccagcgcccgtgggcattggggaggctaatcatgctgagacacaacgttcctgtgcgacgggatctggaccagatcgccgctaacaacggtttcgactttcatatcatcgacaatgaaatctattgggacgagagtggggcttaccgttttactctgcgccagattgaagagcagatcgaaaaaccgactgcggaactgcatcagatgtgccttgaggtggtggatcgcgcggttaaagacgaagagatcctgacgcaactggcgatcccgccgttgtactgggatgtgatcgccgaaagctggcgcgcacgcgatccttcgctgtatggccggatggattttgcctggtgtggcaatgcgccggtgaagctgctggagtacaacgccgatacgccgacctcgttgtatgagtcggcttatttccagtggttgtggctggaggatgcccggcgcagcggcattattccgcgtgatgccgatcagtacaatgccattcaggaacgcctgatttcacgctttagcgagctttatagccgggagccgttttatttctgctgctgtcaggacaccgatgaagacaggactaccgtgctgtacttgcaggactgcgctcagcaggcagggcaggagtcgcggtttatctacattgaagatctcggtttgggcgtcggcggtgtactgaccgatcttgatgataatgtcatccagcgtgcatttaagctgtatccgctggagtggatgatgcgtgacgataacggtccgctgctgtgcaagcgtcgcgagcaatgggtggagccgttatggaaaagtatcttgagtaataaagggctaatgccgctgctttggcgcttcttccctggtcatcctaaccttcttgcatcctggtttgagggtgaaaaatcgcagattgccgctggcgaaagctatgtgcgtaaaccgatctactcgcgcgaaggcggaaacgtcaccattttcgacggtcagaataacgtcgttgaccacgctgatggtgattacgccgatgaaccgatgatctaccaggcgtttcaacctctgccgcgatttggcgatagctacacactcatcggtagctggattgtcgatgatgaagcgtgcggaatggggatccgtgaagataacacgctgatcaccaaagacacctctcgtttcgttccgcattacattgctggctaagaatgttttagcaatctctttctgtcaggaatccatggcagtgaccatactaatggtgactgccattgatggagggagacacagtgcactggcaaactcacaccgtttttaatcaacctataccattaaataacagcaacttatacctgtctgatggcgcgctctgcgaagcggtaacgcgtgaaggtgccggctgggatagcgattttctagccagtattggtcagcagttaggaacggctgaatcccttgaactggggcggctggcgaatgtgaatccgcctgaattattgcgctacgatgcgcaaggacgccgtctggacgatgtgcgttttcaccccgcctggcacctgctgatgcaggcgctatgtaccaatcgggtgcacaatcttgcctgggaagaagacgctcgctccggcgcatttgtggcgcgcgcggcgcgttttatgttgcacgcacaggttgaggcagggtcgttatgtccgataaccatgacctttgccgccacgccattgctgttacagatgttacccgcgccgtttcaggactggaccacgccgctgctgagcgatcgctacgattctcacttattgccaggtgggcaaaaacgcggtttgttgattggcatgggaatgacggaaaagcagggcggttccgatgtcatgagcaacaccacccgcgcagagcgcctggaagatggctcttatcggctggtggggcataaatggtttttctcggtgccgcaaagcgatgcgcatctggtgctggcgcagactacgggcggtttgtcctgcttttttgtgccgcgctttttgcctgacgggcaacgcaacgcgattcgcctcgagcggctgaaagataagctgggtaatcgctctaacgccagctgcgaagtggagtttcaggatgccattggctggttgttggggcaggaaggggaaggaattcgtctgatcctgaaaatgggtgggatgacgcgttttgattgcgccctgggtagccatgccatgatgcgccgtgcattttcgctggcgatttatcatgcacatcaacgccatgtttttggtaatccattgatccaacagccccttatgcgtcatgtcttaagtcgcatggcacttcagcttgaagggcaaacggcgttgctgtttcgtcttgcgcgagcgtgggaccggcgtgccgatgccaaagaagccctgtgggcgcgtttatttacgcctgcggcaaaatttgtgatctgcaaaagaggtatgccgtttgtggccgaagcgatggaggtgctgggcggcattggttattgcgaggagagcgagctgccgcggctttaccgggagatgccggtaaacagtatttgggaaggttccggcaatattatgtgcctggatgtgctgcgcgttctcaataagcaagcgggcgtatacgacttattgtcggaagcgtttgtggaagtgaaagggcaggatcgctattttgatcgcgcggttcgtcgtttacagcagcagctgcgtaagccagctgaagaactgaggcgagagattactcatcagctattcctgctgggctgcggtgcgcaaatgttgaaatatgcttctccgccaatggcgcaggcgtggtgtcaggtgatgttagatacgcgcggcggcgtacggttgtcagagcagatccagaatgatttattgctgcgggcgacggggggagtgtgtgtgtaagcgtatacgactgatgcgacgctggtttcgattaactaaatgaaatatgtgaaaattgtaggccggacaaggcgctcgcgccgcatccggcattgttcatttgctgtagatgacactcatgcatacagtatcgcctgtacgcgccagttatcaggctgctggtcttcgtacatggtaataatgcggtaccatgacgcaccttgttcatcggcctttaacgccacgatacgttccacgtcctgcggatcccctgaaatattgctaactgagatctgacctatttcattcaggcccgtcacgcagtcagcactggcgaattctgcagactgtgccgtggcgctcgcaggataagtcactaattgcagcgagggtgaggcaagtaattgtttcatcgtcagctccatttttcgtttccccacatgttgcagggcattccatcgcggtaataaacgcccaggcttccagccggtaatttattgtgcacagataaacgcatagggacgcaaagcaatgtaaagctgactatgtaagttgtctgatttatttacggtacaaaatggcttgtgaataccactgtcctgtcacgatggtttcgtccaccatgacgacaacgtaataatcagcttttgcagcgacagctttcgctctgatttctgctaatgcgtcatccggagaaccccgaaccatcgtgcttacgctgcctattcgctgtaacccttgcgtctggtcgcggcgaatctcttgcggatggtccgttactggcggtgctggctgtggcgtaccttgcagtgcgctacaggcacttaacatcaacaccaataataaactggcaaaccggtaaataacgctattacgtttcctgctaaccatagtgtagtgccttattaatttaactttgggggaatgttcccgaattgttacctggtacgcgattttcgaatgaaaacgtgacgaaagcgtaacccacatctcaacattatgaactaataccgccagcagaaacttgtgctaaggatttcttcatgtcataccagacaaaaaggagagacagatgattgaaatagaatcacgcgagctggcagatattcccgttcttcatgcttatcctgtcgggcaaaaagataccccgttaccgtgcgtaattttttatcacggctttacttcatccagtctggtgtatagctattttgccgttgcgctggcgcaggctggtttgcgagtgatcatgccggatgcgcccgatcacggtagccgttttagtggtgacgcagcgcggcggttaaatcaattctggcaaatcttgctacaaagtatgcaggaattcactactttacgtgcggcaatagccgaagaaaactggctgcttgatgaccgtctggcagtcggtggtgcgtcgatgggcgcgatgacggcactggggattaccgctcgccaccccacggtgagatgtaccgccagcatgatgggatcgggctattttacatcactcgcccgttcactgtttccaccgctgatacctgaaacgacagcacagcagaatgaattcaataacattgtcgcgccgctggcagagtgggaagcgacaaaccacctggaacaacttagtgacagacctctactgctgtggcatggcctcgacgatgacgttgtgcctgccgacgaatcactacgtttgcagcaggccttaagcgagacgggacgggataaactgctaacctgttcatggcagccaggcgtgcgtcaccgcattacgcctgaggcgttagatgctgcagtgacatttttccgccagcatctttaaacacgcagaatgctgaccccttgcgcttccagttgttgcaggatttccgggttagcatttttgccggtgatcagcatatcaatttgatcggcacggctaaaaagcattcccgcgcgttcgccaatcttactgctatcaaccagtaccaccagtttccctaccacgctcagcatcttctgctctgccattgccgtcagcatatcggttttatacaacccttctgctgtcagtcctttgccgctggtaaacatccagtgcccggcatagagactgttttcgctgccctgcgggcttaaagtgatggactgacttttgttgtactgtccgcccataatgatcacgctgtcatgttcttgatcgatcaggtaatttgccagcggtagataattagtgatgatttgcactggcttgccacacatttcccgcccaagcagaaacgcggtggagccgcagttgatgactacgctttcgcccggattaaccagctgcgaggccgctttagcgatacgtactttttcatcgtgattctgcgcctgatgcagattcatcggcgtccagcgcgggcgctgttgggtaatagcttctgcgccattgcgcacttttttcagtttgccgctttcgtcaagtttattgatatcgcgtcgcgcagtggcaggcgaaattcccagacgctcaacgactttctcaacggtcacaaagcccaattgtgcgagcatttccaggaggatttgatgtctttgtgcttcagtcatgagctattccgataaaatttgatttttttagatgatatttgaaatagccaggaaatactacgccggatagcgcgaacttctccacgctatccggtataaacgacagattacaggaatgacttgaacggcagatccggttcaatagtgaagcaatcatcgaaaccgcgcggatagtggtactcgaagttgtctttatccagcggccaggtaaatttgccgccaacctgccagataaacggcttgaagccatacttcagacgatcttttttcatctcccacagcacgcggatctcttgcggatcggcctggaagtttgaccagatgtcgtggtggaacgggataaccactttcgcattcagggcttcacccatacgcagcatatcggcgctggtcattttgtcggtaataccgcgcgggttctcaccatacgatcctaacgccacatcgatctgatgttcgttaccgtgcttcgcataatagttggagtagtgggaatcgccactgtgatatagggaaccgccaggggttttgaacaggtagtttactgcgcgatcgtccatgccatctggcagtacgccagccgctttttgatcggcaggcagggtgatcagtgcagtacggtcgaaagcgtcaagcgcatgaatttcaatgtctttcacttttactacatcgcccggtttgaccacgatgcaacgctctttcggtacgccccagccaatccacaaatccacacaggttttcggtccaatgaacggtacgtcatcagcacagttctgcatcacggcagcagcaacgttaacgtcgatatgatcgttgtgatcgtgagtcgccagtaccgcgtcgatctggcgaatcgcaaacggatcaagaacaaacggggtggtgcgcaggtttggctgcagttttttcacgccagccatgcgctgcatctggtgaccctgtttcattaacgggttaccgtgactttgtttgccagtgccgcaccagaaatcaacgcaaacgttggtgccaccttccgatttcaaccagatcccggtgcagccaagccaccacatcgcaaatgtgcctggagcgacctgttcttgttcaatttcttcattcaaccagctaccccactccgggaaagtgctcaggatccaggattcacgggtgatacttttcactttactcatcgccatttaccttcatgattgttcaattcgaatcaatgtgtgattggttttgattaattctgacactattttttcaggaaggcaatgaccattttttgactttttgccagggaagtggttgttgattttgagtgtggaaagatttaatggaatgtgtaattcaattaactaaatgaatttaaatgaatagttgtttcgttgtgtgaatcccattctatccatgtggaattatttgcgggtcgcgtcacatttaatcataaataatcttgttgtgattacttttgaaaattagagtgagtgcacaacattccgggtgtgtggaatacccggttacctcttcttcaggagatcgttatggagatcctctacaacatctttaccgtgttttttaaccaggtcatgaccaatgccccgttgttgctgggtattgtgacctgtctgggctacatcctactgcgcaaaagtgtcagcgttattattaaaggcacgattaaaaccataattggtttcatgttgttgcaggcagggtccggcatcctcaccagcaccttcaaaccggtggtggcgaaaatgtccgaagtctacggcattaacggcgcaatttccgatacttacgcgtcgatgatggcaaccatcgaccgcatgggcgatgcctatagctgggtaggttacgcggtgttgttagcgctggcgctgaacatctgttacgtgctgctgcgtcgcattaccggtattcgtaccatcatgctgactggtcatatcatgttccagcaggcggggctgattgccgttacgttgtttattttcggctactccatgtggacaaccattatctgcacggcgattctggtttcgctctactggggcattacctccaacatgatgtacaagccgactcaggaagtgacggacggctgcggtttctccatcggtcaccagcaacagtttgcatcatggattgcctataaagttgcgccgttcctcggcaaaaaagaggaaagcgttgaagacctcaaactgccaggctggctgaatattttccacgacaacatcgtctccacggcgattgtgatgaccatcttctttggtgccattctgctctccttcggtatcgacaccgtgcaggcgatggcaggcaaagtgaactggacggtgtacatcctgcaaactggtttctccttcgcggtggcgatcttcatcatcactcagggcgtgcgcatgtttgtggcggaactctctgaagcatttaacggtatctcccagcgcctgatccctggtgcggttctggcgattgactgtgcggctatctatagcttcgcgccgaacgccgtggtttggggctttatgtggggcaccatcggtcagctgattgcggttggcatcctggtcgcctgcggttcctcgatcctgattattcccggctttatcccgatgttcttctccaacgccaccatcggcgtgttcgctaaccacttcggcggctggcgtgcggcgctgaagatatgtctggtgatggggatgattgaaatctttggctgcgtctgggcggtgaaactcaccggtatgagcgcctggatgggcatggcggactggtcgattctggcaccgccgatgatgcagggcttcttctccatcggtatcgcctttatggccgtcatcattgtaattgcactggcttatatgttcttcgctggccgcgcactgcgcgcagaagaagatgcagaaaaacaactggcagaacagtctgcttaatatggagttttgattatgaccgtacgtattctggctgtgtgtggtaacggacaaggcagttccatgatcatgaaaatgaaagtggaccagtttttaacccagtcgaacatcgaccacacggtaaacagctgcgcggttggtgaatacaaaagcgagttgagcggcgcggatatcatcatcgcttctacgcacatcgcgggcgaaatcaccgtgaccggcaacaaatatgtcgttggcgtgcgcaacatgctctctcctgctgactttggcccgaaactgctggaagtgatcaaagaacatttcccgcaggacgtgaagtaagggcgcgctatgaaattacgtgattcgctggcggagaataaatctatccgtctgcaggctgaagctgagacatggcaggacgcagtgaaaatcggcgttgacctgctggtggcggcagatgtggtagagccgcgttactaccaggcgattctggatgcggttgaacaacacggcccgtactttgtgctcgcacctggcctggcaatgccgcatggtcgcccggaagagggcgttaagaaaaccggttttgcactggtgacgctgaaaaagccgctggagttcaaccacgaagataacgacccggtggatatcctcatcacgatggcggcggtcgatgccaacacgcatcaggaagtgggcatcatgcagatcgtcaacctgtttgaagatgaggaaaatttcgaccgtttacgtgcctgccgtaccgagcaggaagtactggatctcattgaccgcaccaacgcggcagcttaagaaggaattgaagatgtcattaccgatgttgcaagtcgcgctggacaaccagactatggatagcgcctacgaaaccactcgcctgattgccgaagaagtcgacattatcgaagtgggtaccattctgtgcgtgggcgaaggcgtgcgtgcggttcgcgatctgaaagcgctctacccgcacaaaatcgtgctggcagacgccaaaattgccgatgcgggcaaaattctttctcgtatgtgcttcgaagccaacgctgactgggtgaccgtgatttgttgtgcggatatcaacaccgccaaaggtgcgctggacgtagcaaaagagtttaacggcgacgtgcagatcgaactgaccggttactggacctgggaacaggcgcaacagtggcgcgacgcaggtattcagcaggtggtttatcaccgcagccgtgacgcgcaggccgctggcgtggcgtggggtgaagccgatatcactgcgatcaaacgtctttccgatatgggcttcaaagtcaccgttaccggtggcctggcgctggaagatctgccgctgttcaaaggcattccaattcatgtgtttatcgccggtcgcagcatccgtgatgccgcttctccggttgaagccgcgcgtcagttcaaacgttccatcgccgaactgtggggctaaggagcggatatgttgtccaaacaaatcccgcttggcatctatgaaaaagcgctccccgccggggagtgctggctggaacgcctgcgactggcaaaaacgttgggcttcgattttgtcgagatgtcggtagatgaaactgacgagcgcctgtcgcgcctcgactggagccgcgagcagcgtctggcgctggtgaatgcgattgttgaaaccggcgtgcgtgtgccgtccatgtgcctttctgcccatcgtcgtttcccgttgggcagcgaagatgacgcggtgcgggcgcaggggctggagattatgcgtaaagccatccagttcgcccaggacgttggcattcgcgtgatccagctggcgggctatgacgtttactatcaggaagccaataacgaaacgcgtcgtcgtttccgtgacggcctgaaagagagcgttgagatggcgagccgcgcgcaggtgacgctggcgatggagatcatggattatccgttgatgaactccatcagcaaggcgctgggttacgcgcactatctcaacaacccgtggttccagctctacccggatatcggcaacctgtcggcgtgggacaacgatgtgcagatggagttgcaggccggaatcgggcatatcgtcgcggtgcatgtgaaagacaccaaaccgggcgtcttcaaaaacgtgccatttggcgaaggtgtggtggatttcgaacgttgcttcgaaacgctcaaacagagtggctattgcgggccgtacctgattgagatgtggagcgaaacggcggaagacccggcggcagaagtggcgaaagcgcgtgattgggtgaaagcgcgcatggcgaaagcgggcatggtggaggcggcataatgcaaaagctaaaacagcaggtatttgaagccaacatggatctgccgcgctatgggctggtgacctttacctggggcaacgtcagcgctatcgaccgcgaacgcgggctggtggtgatcaagcccagcggcgtcgcctacgaaaccatgaaagcagacgatatggtggtggtcgatatgagcggtaaggtggtggaaggggagtatcgcccatcttccgacaccgcgacgcatcttgaactctaccgtcgttatccgtcgcttggcggcattgtccatacccactccactcatgctaccgcatgggcgcaggcggggctggcgatcccggcgttaggcaccacgcacgctgactacttctttggtgacatcccgtgtacgcgtggattaagcgaagaagaggtgcagggtgagtatgaactgaacactggcaaagtgattatcgaaacgctgggcaacgccgagccgctgcatacgccgggaattgtggtgtatcagcacggaccgttcgcctgggggaaagatgcccacgacgcggtgcataacgcggtagtgatggaagaagtggcgaaaatggcgtggattgcgcgcagtattaatccacaactcaatcacatcgacagcttcctcatgaataaacacttcatgcgtaagcacggtcctaacgcctattacgggcagaagtaagcagtgcgccccggaattattacctcctgcgggatgtaattggtctgattccggggccgcttcagttaaaaaatcgtataaacaacaggtgtttttatggctatcaatggattgtttgtcagaacggatccgcaacgtcgccgctatggcgttgcgttacttgtgggtgtactttcaggaattatttcagcatttgttaaatggggagcggaagtccccttgccaccgcgcacattttccggtggtcgcgatgaatttaacccgccgtatatctttctacgagattatttaggtatcgacccaacccaaactgtgtacacattctcggaacatattatcaacccggtgatggtgacgcatatcatcttctcactggtttttgcgatagggtattgtgttgtcgcggaaatttttccgaaagtgaaattatggcaggggatattagcagggcttattgtgacagtggcagtccacggtatattttgcccggcgctgaatttaacgccgccgctcactcaattgccttttgacgaatatgcgtctgaaatcctggggcatattttctggttttggataatagagattatgcgccgcgacttacgtaatcgcattactcatgagccagatccggaagtcgcaattcggtgaataaccgtataaaaaagccccctgcgaagggggcaaagcaaactatggcaatgtttcgttggttatacctggtgctagcgataaatatccgcgctggcgtgcatattgccgttactccccggttcccgcatcagaattacgtggtagtacgttgcgccctgcgcatctgtctcttcatttaatgcctgacgtgcttcgctttcagtggcgaaattatgattgatataaatcacgcctaagctctgtacgtcgtccatatttctggcctggtggttattaatttcaatggctgcccatgtatttgcacttagcaaaagcacagccagaagggctaaaactcgactgaacatagatacctcctcgacggctgactttgtgtgctctcctctgtgatgatcttctgatttaattttaatcaatgataaagaagttgatggtgaccatttctgatgcagttgttcaaaaaaacaccatgatgaagtgtgatgaactccaaatcagcggtttagaggttaattgcgaaaggggagatttatttcggctctgcccttgagtttagcggggcatacaagtactataacgcgtcatttttcagccgacctttaacacgttccttgcctccccgggattcggctgacccagacaggaggctgaataatccgtaaggagcaattcgatgcgtcattacgaaatcgtttttatggtccatcctgaccagagcgaacaggttccgggcatgatcgagcgctacactgctgccatcactggtgcagaaggcaagatccaccgtctggaagactggggccgccgtcagctggcttacccgatcaacaaactgcacaaagcacactacgttctgatgaacgttgaagctccgcaggaagtgatcgatgagctggaaactaccttccgcttcaacgatgccgttatccgcagcatggttatgcgtaccaagcacgctgttaccgaagcatctccgatggttaaagcgaaagacgagcgccgtgagcgtcgcgatgatttcgcaaacgaaaccgctgatgatgctgaagctggggattctgaagagtaatttctgatgaccaaccgtctggtgttgtccggcaccgtgtgcaggactccccttcgaaaggtcagtccatcaggaattcctcactgccagttcgtgcttgagcatcgttctgtgcaggaggaagccggttttcaccggcaggcgtggtgccaaatgcccgttattgttagcggacacgaaaaccaggccattactcacagtataacggtcggcagtcgcataaccgttcaggggttcatttcatgccacaaggcaaagaacggactgagcaaaatggttttgcatgccgagcagattgaattgatagattctggagactagccatatggcacgttatttccgtcgtcgcaagttctgccgtttcaccgcggaaggcgttcaagagatcgactataaagatatcgctacgctgaaaaactacatcaccgaaagcggtaagattgtcccaagccgtatcaccggtacccgtgcaaaataccagcgtcagctggctcgcgctatcaaacgcgctcgctacctgtccctgctgccgtacactgatcgccatcagtaatcggtcacggtccattaatacgactttgagaggataaggtaatgcaagttattctgcttgataaagtagcaaacctgggtagcctgggtgatcaggtaaacgttaaagcgggctatgctcgtaacttcctggtaccgcagggtaaagctgttccagctaccaagaaaaacattgaattcttcgaagcacgtcgcgctgaactggaagctaaactggctgaagttctggcagctgctaatgctcgcgctgagaaaatcaatgcactggaaactgttaccatcgcgtctaaagctggcgacgaaggtaaactgttcggttccatcggtactcgcgacatcgctgacgctgtaactgcagctggcgttgaagtggctaagagcgaagttcgtctgccgaacggcgttctgcgtaccactggcgaacacgaagtgagcttccaggttcacagcgaagtattcgcgaaagtgatcgtaaacgtagtagctgaataattcgttattcaacgagacgtaaaaacgccgaccattggtcggcgttttgctttctatttttcgtcaggtattagtttcgcaagtagatccattcaccattctcttgtgtccataagtcaggatggtttgctggcgttagatgcatacgatcactccttatgtctcggtcctgcggcactcgctcgaaacctaaacccgagtagattgctgctgaatttgataaggaacgtagaccaattttcaaatcatggggtaaatcagaatacgcgtttagcaatgcagcaatgatgaatccgagggcattagaaacgcctgtaacagtgcgaagttggtcgatataaagatcgattgttggtagttcagatgaccagcaattaggcatttgggcaggaagggttacaacgtatcctatcgtttggccggtatagtctggagtactataaccaggtcccaaaacaacctcgtgtattgtgtatttactgttgggttcgaaggattcgacatcttgcaataaatatttcagttctgcggttaacctcgcacccgcgtaagctttattgtatttctgggcgtgaatattatctaatgtagcttcatggttccatccaaaagaattatcaccattcattgttactccatcgtaagcattacacttcgttgctaacttattgaatgcttgccagtcagagagatctagtttgtggatctcaacagtacgtctgccatcgcaattatgatctcttccacgatttggcagtaatgtagcacgtgcatattgatgaaattttaattttactggtttgtcggtggacgaaaaatggggtgaatatgcaggaaatgaataaatagtcgttggtaatgtcattgtaatgttacctgtttaatgtttttataaatatcgcagctgatgttcacagaaaaagaatcgatattaataaaaataagtttgttttctgaagtagtgaaaatagcggatggtgaaagatattaatatcaaaaatcgctcattatggatataacgatgcccccggggagaaaatgacttccacgccttccaccatacattcttgttgtgcggtatgtaattattctacgctgttggtatcggtgcgtttgttaatcatctggttaaccagccacaaaaagccattgagaaaattattgattttacatgggattattatattgctaacccttggtttttaaaaattgtgcatagtgaaaatcaaagtaaaggtgtgcattatgcaaaatcacagcgtctcttagaaattaaccatgcgcacttgcagttaatggaatccttattggatgaagggaagaaatacaatatttttaagccaggtatcgacccattgcaggtgaatattaatattgctgcgcttgggggatattatttgatcaaccagcatacgcttggcctggtttatctggtgcgccgtaaaaccccgtccttcagggcggggatatacggcgcggttttccacctaaccaggtgtttgctgttgttcaatgtattgacggatggcggatattggcgcacctccgcagctactggcaaaatagccaggactccacaaaacgcctttgtagtaatacctgactgcaatatctggtcgatctcgtcgcagtaacctacccgatacgcctttgaggctgtttaccagactggatatcgccagtttgggaggatagttaattaacaaatggacgtgatctggttcgccatccatttcaaccagttcagcttcaaaatcagcacatacctttgaaaagtaagtgcgtagtttttctgtcgcgtcatggtcaaaaatctggcgtcggtatttggtgacaaagaccaggtgaacatgcatcaggaaaacacaatgccttccacgccggatatcggtttcttttttcacagaccaaagtatcatttggcctgtgaaacgactacaggcatttaaattccagttaagaccaggtggtcaacaggagcgtgaaatgaggcgcttcgcaggcgcatgtcgtttcgttttcaatcgtgctctggcgcttcagaatgagaatcatgaggccggtaataaatacatcccttacgggaaaatggcttcctggctggttgagtggaaaaatgccactgaaacgcaatggcttaaagatgccccgtcacagccattgcaacagtcactgaaagaccttgagcgggcttacaaaaacttcttccagaagcgggctgcttttccccgattcaaaaagcggggacagaatgatgcattccgctacccgcagggcgttaagctcgatcaggaaaacagccgtatttttctgccgaaacttggctggatgcgctaccggaatagccgtcaggtcgcgggtgttgtgaaaaatgtcactgtcagccagtcctgcggtaagtggtacatcagtgttcagactgaaagtgaagtatccactccggttcacccttcagcatcaatggtcgggctggatgctggcgtggctaaactcgccacgctgtcagatggtacagtctttgagcctgtaaacagttttcagaaaaaccagaagaagctggcgagacttcagcgacagttaagccgcaaggtcaaattcagcaacaactggcagaagcagaaacgcaaaatacagcgactgcattcctgtatcgcaaaaatccgcagggactaccttcacaaagtcacaacgaccgtcagcaaaaaccacgcaatgatagtcattgaggatttgaaggtcagcaacatgtcaaagtcagcagcgggtacggtcagccagccggggcgtaatgtccgggcaaaatcaggtttaaaccgtacgatactggatcagggctggtatgaaatgcgccgccagcttgagtacaagcagctctggcgtggcggtcaggtgcttgctgttccgccagcgtacacaagccagcgttgcgcgtgctgtggtcatacagcgaaagaaaatcgcctgtcacaaagtaaattcagatgccaggtatgtggatatacagcgaacgccgatgtaaacggcgctcgtaacattttagcggcggggcacgccgttcttgcctgtggagagatggtgcagtcaggccgctcgttgaagcaggaacccaccgaaatgattcaggcgacagcctgaacgaagcagggatccacgtccttcagggcgtggaggatgtcaacatatcagtatggtttccccccaggcactggaagccagacgtaaggtcatcaaagagacaatccttagctggcttttggttgacccttcatctaccgcgcacgaataaaactgccatccggctggcgggtaaacaggacctgttgattattccccgtatcaatggttaagcccgtcaccacgccgctggcgttctggcggattttcaccatttgcccgttttgcaaattactcagcggcttacccgcgccttctacctgcgccattgcatagacatcggtagcgggcagtccgtggtcgcggaacagctgcgccatcgttttaccgggttcgacacggtaagagcgccattgattatcaattccgctatctggctggaatggttgcgtttgggtagtttgcggctgctcttctggctggccttcctgtataggttctggagcgaccggagccacctgatcaggatcattttgtggggtgactaattgcgcccgcagctgttcttctgtcggcggttgtgattgcgactgaatatctaactgcgcttcacgcgtcaccaccggcgcgttgggcgtatcatcagatggaagcagaaatccgaccaccaatacaatggcggcaataatgatcccccgacgatgcatcggcggcagcgggtccatgaagcgaaaattgtccggcgcgtgccagactttctccagggttggttttagttcaaagcgcccgggcatggtttcctcctgctccgcgtcttgttcctcaatcatagcctatgaataagctaacgctatgatgtccgtggtaaacccgcctttattatattcatacgggatattgctattgtttctttttccccgggatttgtcatcattcctgcgacaaagttttacccaaagaagtgtggctgatatgctgcccgctacttttataccctaagaaaggaaatacgatgaccaccccaacttttgacaccatcgaagcgcaagcaagctacggcattggtttgcaggtagggcaacaactgagtgaatctggcctggaagggctgctgccagaagcactggttgcaggtattgccgatgcgctggaaggcaaacatccggctgttccggttgatgtggtgcatcgcgcgctgcgtgaaatccacgagcgcgccgatgccgttcgtcgtcagcgtttccaggcgatggctgctgaaggtgtgaaatacctggaagaaaacgccaaaaaagaaggtgtgaatagcaccgaatctggcctgcaattccgcgtgatcaaccagggtgaaggcgcaattccggcacgtaccgaccgcgttcgtgttcattacaccggtaaactgatcgacggcaccgtgtttgacagctccgttgctcgtggtgaacccgctgaatttccggttaatggcgtgatccctggctggattgaagcactgactctgatgccggtaggttctaaatgggaactgactatcccgcaggaactggcatatggcgagcgcggcgcaggcgcatccatccctccgttcagcaccctggtgtttgaagtcgaactgctggaaatcctctaagcagcgcattctgttcccctcgaaccagaggggagcaggcattcagcaataaacccttcagtttgccaaacggcgctattttgtgttgcaaagaccccataagcgtgtatttttgtgagctgtttcgcgttatcaccgtgatatgacactcactttaaacataaaattaacattagatctaaatcttagtattcatcccgcgtattgttacctaatatcgatgagtcccgatacagattcgtcgtatcatagactgactaaaggccgtagagcctgaacaacacagacaggtacaggaagaaaaaaacatggtagatcaggtaaaagtcgttgccgatgatcaggctccggctgaacagtcgctacggcgtaatctcacaaaccgacatattcagcttattgccattggcggtgccattggtacggggttgtttatggggtctggcaaaacgattagccttgccgggccgtcgatcattttcgtttatatgatcatcggttttatgctcttttcgtgatgcgggcaatgggggaattgctgctttcgaatctggaatacaaatcttttagtgacttcgcttccgatttactcgggccgtgggcaggatatttcaccggctggacttactggttctgctgggttgtaaccggtatggcagacgtggtggcgatcactgcttatgctcagttctggttccccgatctctccgactgggtcgcctcgctggcggtgatagtgctgctgctgacgctcaatctcgccaccgtgaaaatgttcggtgagatggagttctggtttgcgatgatcaaaatcgtcgccattgtgtcgctgattgtcgtcggcctggttatggtggcgatgcactttcagtcaccgactggtgtggaagcgtcattcgcgcatttgtggaatgatggcggctggttcccgaaaggtttaagtggcttctttgccggattccagatagcggttttcgctttcgtagggattgagctggtaggtacaaccgctgcggaaaccaaagatccggagaaatcactgccgcgtgcaattaactctattccgatccgtatcattatgttctacgtcttcgcgctgattgtaattatgtccgtgacgccgtggagttcggtagtcccggagaaaagcccgtttgttgaactgttcgtgttggtagggctgcctgctgccgcaagcgtgatcaactttgtggtgctgacctctgcggcgtcttccgctaacagcggcgtcttctctaccagccgtatgctgtttggtctggcgcaggaaggtgtagcaccgaaagcgttcgctaaactttctaagcgcgcagtacccgcgaaagggttgaccttctcgtgtatctgtctgctcggcggcgtggtgatgttgtatgtgaatcctagcgtgattggcgcgttcacgatgattacaaccgtttccgcgattctgtttatgttcgtctggacaattatcctttgctcgtacctggtttaccgcaaacagcgtcctcatctgcatgagaagtcgatctacaagatgccgctcggcaagctgatgtgctgggtatgtatggcgttctttgtgttcgtggtcgtgttgctgacactggaagatgacactcgccaggcgctgttggtcaccccgctgtggtttatcgcactggggctgggctggttgtttattggtaagaagcgggctgctgaactgcggaaataaccgcattatcatgctggatggcgcaatgccatccagcttttagattactcacccgccagcgcgcgtgggaacagtacattgttttccaggctgatgtgatccatcaggtcatcaatcagttcattaataccgttatacatcgctttccaggtggtgcaggcttccggcggcggtgtgacgttattggtggtgtgtttaatcacttccagcagttcgcccgcttcatcgtgctcgctttccatcacgctgattggtcccattgcctggctgcccatgccttgtttgatcatcgggaagaggatctgctcttctttcatcatgtggctggaaagctcttcatgcagcatagtcaggtattttgtcagcccttttggcacgctcggtttgtcggcgtgaacgcgctcgactttagtcgcttgcaggatcagctccggcagctgctcgcggtgacgatcgtggtagcgcacgatgatatggtcaatgatttctgccagcggggcgctacgccagtctttctcaatcggttgttcagcaagctttgccagttcagcttcaatgacctcaacatccagttctttacgtgccgccgcgcgcgccagcgtctgcttaccgccacagcagtaatccatatcatatttacgaaacagagccgaagcgcgagggatagagagcgccagttcacctaaaggttggtcgcgataagccatagctgatacctcattcttaataatataagatgtattttaaatgcatctttaaggcaaaagctataacccttacgtagcagaggcttatttaactcactgccagcgtgtcaactttctgagacagattcagttaaaggtttttctggttttgctctgaccgcaatgaccacgccaatcactaacagcgcgataccgctcagcgtcattagcggcggcatttgctggcggagtaaaaaggtgtacagcaaacctgccagcgtttcgaaaacaatcagcggcccgagaatcactgtcggtaatcgctggctggcgacgttccagcagagtgcgccaacccatgagcaaagcacggctatcgcaaccatcagactaataaacaccagcggacgggggccaaaaggtaaggagaagtccggcgtttgtatattcagccagtaacaggcgacgagatagccgatgagagaaaccggcagcgtgaccagcgcctgcgccgtcgcccacatcatcggatgtttgtcgggattttcccgcagccagcgggcgttgcgcagggcataccatgcccagcagaccacggaaactaacgctagcacgatgccagaggtataacgtgcccagtcaaaatcggggagtccgtggtttaactcagcaatattcacactcgccaggccgatgccaatacaaatcagtgccggggcgagttttccccacgcgagtttgccgtcgcgctggctataaagcagattggcaaagacaggaatgaccaccggcagggtgccgataatcatcgtggaaacaggcgcgccagtacgttgaatggcactggcaaggcagaagtaataaatgaggttgcccatcatagtgagcatcaaggcggtaagccagtcccgacgcgccaactgacgcagacgcacgcgtcccagccaggcaatgggcagcgcaattaaccctaacgccagataacgccccatcgactgcaacatcgccgggtattccggtacgatcaacggcccgacaaaaataagcccccacatcaaccctgctaacagggcgtacagcacgccgctaatcattactggcatccattggtctgtcagaagaaagttcaggaagcagacatgattgctcccggcatcccgtcattattagagaggatgcgggaggatgccactttaattaactagttattaacattaaaaagatggcttacgctttcggctaacgttgtcgttgggcggccaatcaatttgctaagcgttttgctgttatcaaacagaccacctttcgatgcgccaacgtcagaatccgccagcatatccgccagtccgtcgggcagtccgacgcttttcagtgccgcggcgaaatcggcttcgctcagattttgataggtaacggattttccgctctgtttggtcagctctgccgctaactgtgtcaacgtccaggcactatcgcccgccagttcgtaaaccttgccttcgtgaccggcttcgctaatcacgcgtgccgcagctgccgcataatctgcccgcgttgctgaggcgattttgccatcgcccgccgcaccgataaatacgccgtgttccagtgctgccggggcgctggcgaggtagttttcggtgtaccagccgttgcgcagcagggtgtaaacgatgccagaatcagccagcattttctccgtctcgatgtgctcatcggcgaggccgagcggggaggtatctgcatgtagcaggctggtataagcgataaatttcacgccagccgcctttgcggcattaataacattacgatgctgcgggcacgttgacccacttcgctggaagagatcagcagtagtttttccactccctgaagtgcagatgtcagtgcggcttcatcgccgtagtcagcctgacgcacggtaatgccttgtgctgccagggcctgggcttttgccggattacgaacgatagccactatttggctggcaggaaccgttttcatcaaggattcaataacatagtgaccaagttggccagtggcaccagtaatagcgatcatgggaagtctccatcgttttgtcttgtgtttaaatacgctaacacctaaacttacttttagtaagtacgtacaaaaaggtaagtatgaaatgagtcaggttagcctgtcgcaacaactgaaagagggtaatctctttgcggaacagtgcccgtcgcgcgaggtgttgaaacacgtcaccagccgttggggggtattgattctggtggcgctacgcgaaggtactcatcgctttagcgacctgcggcgcaaaatcggtggggtgagtgaaaagatgcttgcgcagtcgttacaggcgttagaacaggatggttttcttaaccgtatcgcgtatccggtggtgccgccgcatgtggaatacagcctcacgccgctgggcgagcaggtgagcgaaaaggttgctgcactggcggactggattgagttgaatttgcccgaggtgttggcggtgcgggatgaacgtgcggcataactgccggatgcgctgagcttatctggtctacggtgcatggcttgtagggcggataagatgcgccagcatcgcatccgccaataaatgccggatgcggttgatgatttataggccgaaaaagaagtgttttacttactcaaatccacctgataaatcgcaaacccgatatcatcggtcgcgactttattcatcggatattgccctttctctttaataaacgctgcggctttatctgacggggaagtttcgaaacggatatccagtttcttatcgccagcaatcggtgctaaacgccagttgttatctgccgccgggtgaatttcccccgcacgtttcgactcatcagcaatccacgctgccagcaccgagcggttctcatccggtgaagcaaaagcgatatggctgtcgcccgtaccggcaaatttgccgccgtaagcgcgatagttattggtggcaacgaggaacatggcgttcggatcaatcggcttgccattaaaggtcaggttcttaatcctttccgcattggcattaatcatctggcactcgccgtcataacgggcaggctgggtaacatcaatctgataattcacaccatcaatcacatcaaagttataggtgcggaaaccatcccagttgatgagtgattgcggtttcgtgctgttaggatcaatctggttaaactgtccggcggagcactccagccactctttcacctctttaccgctggctttcactacaatcagcgtattggggtagagataaagatcggcggcattacggaaggtcaactggcctttttccacctccacatagcttgccgggtcatttttgcgaccaccaactttaaacggtgcggcagctgaaagcaccggcagttttgccagatccggatcgccctgaatgtaatgttcgacatacgctttttgcgcgttgttcactacttgcacggtcggatcgtcctgcaccagcgccagatagctatacatattgtcggcagatttaccgattggcttgctgacgaactggcgtgtggcatcgtgatcggctttgagtgtttctaccagcttgctgtcttccgccgcgagggattttttattggcgatgtcgtaaatcggccgagcttccgctttcgcctgcgtcacctgccatttaccgctgtcattactgagttgtaagtcgaccacaccaagatgatcgccccacatgcctggcattaccgccggaacaccattcagcgtgcctttcgcgatatcagctccttcgatatcagcaaaatctttacttgggaaaacggcgtgagcatggccaaacataatggcgtcaacacccggaatttcactgagataataaactgagttttccgccatcactttatacggatcggcagacagcccggaatgcgccagaacgacaacgagatcggcacctttctcgcgcatttcaggcacgtatttgcgcacggtttcggtaatatcattcaccgtcactttcccggataaattagctttatcccagcccatgatttgcggcggtacgacgccaatatagccaatcttcagcgtctgtttttttccgtctttatcgaccacttcggtgtctttaattaaatacggtgtaaacattggctgtttggttctggcgtcaatgacgttggcatttacataagggaatttcgctcccgccagcgcatttttcaggtaatccagaccgtagttaaactcatggttgccaagcgtgccgacggtatagtccagcgtatttaatgccttatacactgggtgaatatcacctgcttttaatcctttcgccgacatgtaatctgccagcggactcccctgaatcaaatcgccgttatctaccagtacgctgtttttcacttcattgcgggcatcgttaatcaggcttgccgtacgtaccagtccgaatttttccgtggcggtgtctttgtaataatcgaaatccatcatgttgctatgcagatcagtggtttccatgatacgcagatcgaccgtcgctgcattcacactggcggcaatcagcgtggccaggagcgttgcgctaaacttaatcatcagggacatccttttatcatcgggaatacgaaagaaaagggagaataaacgtcttacttatagaacagtgaagaatgccacaattttacgctttgaaaatgatgacactatcacagttggcgcattcattaacgatagggtataagtaaaacaataagttaacaccgctcacagagacgaggtggagaaatgttagatcaagtatgccagcttgcacggaatgcaggcgatgccattatgcaggtctacgacgggacgaaaccgatggacgtcgtcagcaaagcggacaattctccggtaacggcagcggatattgccgcacacaccgttatcatggacggtttacgtacgctgacaccggatattccggtcctttctgaagaagatcctcccggttgggaagtccgtcagcactggcagcgttactggctggtagacccgctggatggtactaaagagtttattaaacgcaatggcgaattcaccgttaacattgcgctcattgaccatggcaaaccgattttaggtgtggtgtatgcgccggtaatgaacgtaatgtacagcgcggcagaaggcaaggcctggaaagaagagtgcggtgtgcgcaagcagattcaggtccgcgatgcgcgcccgccgctggtggttatcagccgttcccatgcagatgcggagctgaaagagtatctgcaacagcttggcgaacatcagaccacgtccatcggctcttcgctgaaattctgcctggtggcggaaggacaggcgcagctgtacccgcgcttcggaccaacgaatatttgggacaccgccgctggacatgctgtggccgcagctgccggagcgcacgttcacgactggcagggtaaaccgctggattacactccgcgcgagtcgttcctgaatcctgggttcagagtgtctatttattaattaatttatgcagcaggtccatcacttgctgcacctcttcctgagtaagcgccccgtctttggcccattgcacgcgaccgtctttatccagcaccactacagcggaacttttttcatccagctgccaggcaccgcgtgcgacgccattgctatcaacaataaactgcgaccagggataaagctttttattactctccagactgctgcgcacaaacatgccggaacccggaattgcgtcgtcggtgttaacaatggtggtggtctggtaacgatcgtgcggtaacttcgctgatttaatcgcttcaatcagcgtcgcgtttttctcttttgcagaggtgcgaccagcaatatgttgcagtactcgcacttttcccactaactgcgcgctgttccaggttttgtagctaaactgatctttatcaagcaccaactcgccacgatcggtgatgccaatcggcggcactcgctgaccggtttcgaactgatgtgcggaagccatcatcggcaacagcaggcaggtgagtgccagaatcttgcgtagggtcatggtgtttccttcttatgatatgcaggtgatccgaccacttgggtctgagttttaatcatatgtgctatttatcgaatttcccgcaagtgtgatgccagtttgcggtcaagcgcacaaatcatatgaaaaatgaatgcttatactgaagaccgcgcttcggtaaaaagataattctgaataattgtaacctttaggtaaaaaaagttatacgcggtggaaacattgcccggatagtctatagtcactaggcattaaaatttgcgcctcataatagttgggccgattgtggcaccgcacaggcgtaatactcagcaggagataacaatgaaaattttccaacggtacaacccacttcaggtggcgaagtacgtaaagatcctgttccgtggacggttatacatcaaggacgttggcgcttttgaatttgataagggtaagattcttatcccaaaagtgaaggataagctgcatttgtcagtgatgtccgaagttaaccgtcaggttatgcgtctgcaaacagagatggcttaaccaaagtgctatgcagtaataagacggctcctgattcaggagccgttgatgtttctgggggttacgcgacgctttcttctttatctttagcgtcaggcagttttggcgaaagggcggtggccttgctgtcgatccgggtcaccagcagctggtcgatgcggtagttatcgatatccaccacttcaaatttgtagccggcgaatttcaccgaatcggtgcgtttcgggatcttacgcagcataaacatcataaagcctccgatggtttcgtagttgcccgactgcgggaactcgtcaatatccagcacgcgcatgacgtcgtcaattggggtgccgccgtcaatcagccatgagttctcatcacgggcgacaatctgctcttccagcccctgaccgaccagatcgcccatcagcgtggtcatcacgtcgttgagggtgatgatccccaccaccagcgcgtactcgttcatgatcaccgcgaagtcttcacctgcggttttaaaactttccaacgcctctgaaagggttaacgtatccggcacaatcagcgtgttgcgaatttgtacgccgctgttcagtgccaggctttggttagccagcacgcggttcagcaggtctttagaatcgacataaccgatgatgtggtcaatatcttcattacagacgaggaacttagagtgcggatgttccgccaccttattcttcaggctttgctcatcttcgtggagatcaaaccaaatcacgttttcacgcggtgtcattgaagacggaacggtacgggattccagctcaaagacgttttcaatcagctcgtgttcctgtttacgtaacacgcccgccagcgcaccggcttccactaccgcgtagatgtcatcagaagtgatgtcatctttacgtaccattggcagtttgaaaatacggaagatcatgttcgccaggccgttgaagaaccacaccagcggggtgcaaacgtacaggcagaagcgcatcgggttgatgatacgcaaagccaccgcttctggcgcaatcataccgatgcgtttcggggttaaatccgcaaacaggataaacatgccagtcactaacgagaaagagagaataaagctcagttgctcagagagttctgccgacatatagcgggagaacaggctgtgaaaagctggagaaaatgccgcatcaccgacgataccgccgagaatcgcaactgcgttcagaccgatttggaccaccgtaaagaacatgccgggattttcctgcatattcagaacgcgttgggcatttatattgccttcatcagccagcagtttaagtttgattttgcgtgaggcggcaagtgagatctcagacatcgagaagaacgcacttacagcgatcaagcagagtatgactaaaatactgtttaacatatcttatccgacctttcaggccagatcctcggaaggggaagttgattaatttgtgtgaaatacacattgaaagccgattcgaagaaagtgaaccggcattttcagtggctagtatagcgtaaggtactgtaaagtcgccagagggttaaaattcagactgctgataaatgcaatactgcctgatgcgctatgccgatcaggcctacgcagtccctgcaatatattgaatttggacgattttgtaggcctggtaaggcattcacgccgcatctggcataaataaagcgcactttatcaacaatctacatttgtacccgtaacgctatgcttccggtggcagacagacgccaattccgccaattccacagtaaccatacgggtttttatgcagatattgctggtggtcatcttcggcataataaaacggtgtggcgttagcgatttccgtggtgatgtgacgatcgtcatcggcggcaagcatcgccgcctgaaaacgttccagactggcgcgagctgcggcatcctgttctggggtcagcggataaatcgctgaacgatactgcgtgccgtggtcattgccctgacgcattccctgggcgggatcgtgattctcccaaaatacctgtagcaactgctcatagctgatgacggaaggatcgtaaacaatgcgtaccgcttcggcatgacccgtatcaccggagcacacttcccgataagtcggatttggcgtatagcctccggtatagcctgcggcggtgctgtaaacgccgggtaactgccagaacagacgctccactccccagaaacaacccatcgcaaaatggcaatctccattccgtcaggtacattggtcattgagtgaccgttgaccgcatgcagcgtggctacgggcatcggggtgttacgtccaggcagggcatcggcgggggaaaccagatgctttttatcaaataaactcatggtgtcgctctcccgaaaatcggtcattggggttaaggttgtaacaagaggcgtatttgcacacaataaccaccgtgaataggtctaaagtaaaacataagaaatatttggggtttagtctgctttttaatccatattactggatttttgttaagccgtttaacggcgttccaggggcaggaaaaaaggatattcaggagaaaatgtgcgctatatccgacagttatgctgtgtaagcttactctgcttaagcggatctgccgtcgccgcgaacgtccgtctacaggtcgaggggttatcgggacagctggaaaagaacgttcgtgcgcagctttctacgattgaaagtgatgaagtgacgccagaccgtcgctttcgcgcacgcgtcgatgatgccatccgcgaaggtctgaaagcgctgggttattaccagccgaccattgaatttgatctccgtccaccgccaaagaaagggcggcaggtattgatcgccaaagtcacgccaggtgtgccggtgttaattggcggcaccgatgtggtattgcgcggcggcgcgcggaccgataaagactatttgaaattgctcgatactcgcccggctattggcacggtgctgaaccagggcgattatgaaaatttcaaaaagtccttaaccagcattgcgttgcgtaaaggttatttcgatagcgaatttaccaaagcgcagctgggcattgcgctcggcctgcataaagccttctgggatattgattataacagtggcgaacgttaccgctttgggcatgtgacctttgaaggatcacaaatccgcgatgaatacctgcaaaatctggtgccgtttaaagagggcgatgagtacgaatcgaaagatctggcggaactgaaccgccgactttctgctaccggctggtttaactcggtggtggtggctccacaatttgataaagcgcgcgaaacgaaagtattacccttgacgggcgtggtttcgccgcgaactgaaaacaccatcgaaaccggggtcggttactctacggacgtgggaccgcgcgtgaaagcgacgtggaaaaagccgtggatgaactcttatggtcacagtctgaccaccagtaccagtatttccgcgccggaacagaccctcgacttcagctataaaatgccgctgctgaagaatccactggaacaatattatttggtgcagggcggttttaagcgcactgacctgaacgataccgaatctgactccactacgctggtggcttctcgctactgggatctctccagcggctggcagcgtgccattaacctgcgctggagcctcgaccactttacccagggtgaaattaccaacaccacgatgctgttttatcctggggtgatgattagccgcacgcgttctcgtggtggcctgatgccaacctggggcgactcgcaacgctactctatcgactactccaacacggcctggggttcagatgtcgatttctccgttttccaggcgcagaacgtctggatccgcacactgtacgatcgccatcgtttcgttacacgcggcacgctgggctggattgaaaccggtgatttcgacaaagtaccgccggatctgcgtttcttcgccgggggcgatcgcagtattcgcggctacaaatacaaatctatcgccccgaaatacgccaacggtgacctgaaaggggcctcgaagttgataaccggatcgctggaataccagtacaacgtgaccggaaaatggtggggcgcggtgtttgtcgatagtggcgaagcggtaagcgatattcgccgcagcgactttaaaaccggtaccggggtcggcgtgcgctgggaatcgccggtcgggccaatcaaactcgattttgccgtaccggtcgcggataaagacgaacacgggttacagttttacatcggtctggggccagaattatgagtttatggaaaaaaatcagcctcggcgtggttatcgttatcttactgttgctgggatcggtggcgtttctggtgggcaccaccagcggcctgcatcttgtatttaaagcggcggatcgctgggtgccaggactggatattggcaaggtcaccggcggctggcgcgatctcaccttgtctgacgttcgttatgagcagccaggcgtggcggtaaaagcgggtaatctgcatctggcggtcggtcttgagtgcctgtggaacagtagcgtttgtattaatgacctggcgctgaaagacattcaggtcaacatcgacagtaaaaaaatgcctccttctgaacaggttgaagaagaggaagatagcggtccgctggatctctccacgccgtatcccatcaccctgacacgggtggcgctggacaacgtcaacatcaagattgatgacaccacggtgtcggtgatggacttcacctccggcctgaactggcaggagaaaaccctgaccctgaaaccgacgtcgctgaaaggcctgctgattgctctgccgaaagtggcggaagtggcgcaggaagaagtggtcgaaccgaaaattgaaaatccgcagccggaggaaaagccgctcggcgaaacgctgaaagatctcttttctcgcccggtattgccggaaatgaccgacgtgcatttgccgcttaacctgaacattgaagagtttaaaggcgagcagttacgcgtgacgggcgacacggacatcaccgtgcgcaccatgctgctgaaagtgagcagcattgacggcaatactaaactggacgccctggatatcgattccagtcaagggatcgtcaacgccagcggcacggcgcagctgtcagacaactggccggtggatatcaccctcaacagcacactaaacgtggagccgttgaaaggagaaaaactgaagctgaaagtgggcggtgcgctgcgcgaacagctggagattggcgttaacctttccggtccggtggatatggatttacgcgcccagacgcgactggcggaagccggattgccgctcaacgtggaagtgaacagcaaacagctttactggccgttcactggtgagaagcagtatcaggcggatgatctgaaactgaaacttaccggcaaaatgaccgattacacgctctctatgcgtacggcagtgaagggacaggagatcccgccagccaccattacccttgatgccaaaggtaatgaacagcaggtcaatctcgacaaactcaccgtcgcggcgctggaagggaaaactgaactcaaggcgttgctcgactggcagcaggccattagttggcgcggtgagctaacgcttaatggcattaacaccgccaaagagttcccggagtggccgtcgaaactcaatggcttgattaaaacccgcggtagcctgtacggcggcacctggcagatggaggtgccagaactgaagctgaccggtaacgtcaaacagaacaaagtgaacgttgacggcacgctgaaaggcaacagttatatgcagtggatgatccctgggcttcatctggaactcgggccaaacagtgccgaagtgaaaggcgagctgggggtaaaagatctcaatcttgatgccaccatcaacgcgccggggctggataacgcgctgccggggcttggcggtacagcgaaagggctggtgaaagtacgcggcacggtggaagcgccacaactactggcagatatcaccgcgcgcggcctgcgctggcaggaactttccgtggcgcaggttcgcgtggaaggcgacattaaatccaccgatcagatcgccgggaaactcgacgtacgcgttgagcaaatttcgcagccggatgtaaatatcaacctcgtcaccctaaatgccaaaggcagcgaaaagcagcacgagctacagttgcggattcagggagagcctgtctccgggcagcttaatctggcaggaagttttgatcgcaaagaagaacgctggaagggaactcttagcaatacccgcttccagacgccggtcggcccgtggtcgctgacccgcgatattgcgctggattaccgcaataaggagcaaaaaatcagcatcgggccacactgctggcttaacccgaatgcggaactgtgcgtgccgcaaactatcgatgcgggtgccgaagggcgtgcggtggtgaatctcaaccgcttcgacctcgccatgctgaaaccgtttatgccagaaaccactcaggccagcggtatcttcacgggtaaagcggatgttgcctgggacaccacgaaagaggggctgccgcagggcagtatcaccctttcggggcgtaacgtgcaggtaacgcaaaccgtcaacgatgcggcgctgccggtggcgtttcagacactgaatctgacggcggaattgcgtaacaaccgtgccgaattgggctggaccatccgcctgaccaataacggccagtttgatggacaggtgcaggtgaccgatccgcaaggccgccgtaatcttggtggcaacgtcaatatccgtaacttcaaccttgcgatgataaaccccatctttacccgtggggaaaaagcagcggggatggtgagtgccaacttgcgtctgggtggtgatgtgcaaagcccgcagttgtttggtcagcttcaggttacgggtgtggatatcgacggcaactttatgccgtttgatatgcagccgagccagcttgcggtcaactttaacggtatgcgctcgacgcttgccggtacagtacggacccagcagggtgaaatctacctgaacggtgatgccgactggagccaaattgaaaactggcgggcacgagtaacggcgaaaggcagtaaagtgcggatcaccgtgccgccgatggtacgaatggatgtatcgccagatgttgtattcgaggctacaccaaacctgtttaccctcgatggtcgcgtggatgtcccgtgggcgcgcatcgtggtgcacgatctgccggaaagcgcagtaggcgtctccagcgatgtggtgatgcttaacgataacctgcaaccggaagagccgaaaacggcgtcgattccgattaacagtaacctgattgtccacgttggcaacaatgtgcgcattgacgcctttggcctgaaagcgcggctgacgggcgatcttaacgtcgtacaggacaaacaagggctgggcctgaacgggcagatcaacatccctgaagggcgcttccatgcctatggtcaggatctgattgtgcgtaagggtgagttactgttctctggtccgccggatcaaccgtatcttaatattgaagctattcgtaacccggatgctacagaagacgacgtaatcgccggagttcgcgtcactggtctggcggacgaaccgaaagcggagatcttctctgacccggcgatgtcgcaacaagctgcattgtcttatttgctacgtggacaagggctggagagcgatcagagcgacagtgcggcaatgacctcgatgctgattggtctgggggttgcgcaaagtggccagattgtgggtaaaatcggcgagacgtttggcgtaagcaatttagcgctcgacacccagggagtaggcgactcctcccaggtagtggtcagcggctatgtattgccaggtctgcaagtgaaatatggcgtgggtatatttgactctatagcaacactcacgttacgttatcgcctgatgcctaagctatatctggaagccgtgtctggtgtagaccaggcactggatttgctctatcagttcgagttttagcaatgcgaatatttgtctacggcagtttacgccacaaacaaggcaacagtcactggatgaccaatgcccagttactgggcgatttcagtatcgataactaccagttgtatagcctgggccactatccaggcgcagttccggggaacggaacggtacacggtgaagtttatcgtattgacaacgccacgctggccgaacttgatgccttgcgcaccaggggcggtgaatacgcgcgccagttgattcagacgccgtacgggagtgcatggatgtacgtttatcaacgacccgtcgatggattaaagctaattgaaagcggcgactggttagacagggataagtaataataaaagcacgccaccttcgggtggcgttgttttttgcgagacgactcgcattctgttttgtaattccctcaccttttgcttttctctccgagccgctttccatatctgttaacgcataaaaaactctgctggcgttcacaaatgtgcaggggtaaaacgtttcctgtagcaccgtgagttatactttgtataacttaaggaggtgcagatgcgtattaccataaaaagatgggggaacagtgcaggtatggtcattcccaatatcgtaatgaaagaacttaacttacagccggggcagagcgtggaagcgcaggtgagcaacaaccaactgattctgacacccatctccaggcgctactcgcttgatgaactgctggcacagtgtgacatgaacgccgcggaacttagcgagcaggatgtctggggtaaatccacccctgcgggtgacgaaatatggtaaagaaaagtgaatttgaacggggagacattgtgctggttggctttgatccagcaagcggccatgaacagcaaggtgctggtcgacctgcgcttgtgctctccgttcaagcctttaatcaactgggaatgacgctggtggcccccattacgcagggcggaaattttgcccgttatgccggatttagcgttcctttacattgcgaagaaggcgatgtgcacggcgtggtgctggtgaatcaggtgcggatgatggatctacgcgcccggctggcaaagcgtattggtctggctgcggatgaggtggtggaagaggcgttattacgcttgcaggcggtggtggaataaggtgtgtttatttatcgcgggcataaaaaaacccttactaaccgaagcccggtgttcagggttattgcgccagaagaacttatttattctttgcgcgctcgaaggaggcaacgatttcagctttagcggcttctgcgttttcccaaccttcaactttcacccacttgcctttttcgaggtctttgtagtgctcgaagaagtgagcgatctgcgctttcagcagctctggcagatcgttaacgtctttaatgtgatcgtattctttgctcagcttggtgtgcggaacagcaatcagtttcgcatcttcaccggcttcgtcggtcattttcagaacgccaaccggacggcaacggatcacagaacccggctgcagcgggtacggagtcgggaccagtacgtcaaccgggtcaccgtccagagacagggtgtggttgatgtaaccgtagttgcacggatagaacatcgcggtggacatgaagcggtcaacgaacagtgcgccgctctctttgtcgatttcgtatttgatcggatctgcgttagccgggatctcaataaccacgtagatgtcttccggcagatctttacccgcagggacgttgagtaagctcatgtctgtttcctttaaaaatatgtggcaaacaagtgccgagtattatagccaactcgcgccgaatgtcttcgcttgttttcgtcttcattttcctttttcgccagttttaagacggtatgcagagcaggaaaatccataaccgtagccgcatttttcatagtgagatgaaagcgattacaaacttgtgattaacgttttatttacttttttgaagtgtgatgtaacgcaatccgttacataacgaattgtctatagttttttcgcgaacatcttttcaccaataataattaccccgacgaggacaaccctatgtggaaacgcttacttgtagtctctgcagtctcggcagccatgtcgtctatggcgttggccgctccattaaccgtaggattttcgcaggtcggatcggaatccggctggcgtgccgcagaaaccaatgtggcgaaaagtgaggccgaaaaacgcggaattacgttgaaaattgccgatggtcaacaaaagcaggaaaaccagattaaagcggtacgttccttcgttgcacaaggggtggatgcgatctttatcgctccagtggtagcgacgggttgggagccggtattaaaagaggcgaaagatgccgaaatcccggtcttcttgcttgaccgttccatcgatgtgaaagacaaatctctctatatgaccactgtcaccgccgacaacatcctcgaaggcaagttgattggtgactggctggtaaaagaagtgaatggcaaaccatgcaacgtggtggagctgcagggcaccgttggggccagcgtcgccattgaccgtaagaaaggctttgccgaagccattaagaatgcgccaaatatcaaaattatccgctcgcagtcaggtgacttcacccgcagtaaaggcaaagaagtcatggagagctttatcaaagcggaaaacaacggcaaaaacatctgcatggtttacgcccataacgatgacatggtgattggtgcaattcaggcaattaaagaagcgggcctgaagccgggtaaagatatcctcacgggttccattgatggcgtaccggatatctacaaagcgatgattgatggcgaagcgaacgccagtgttgaactgacgccgaatatggcaggtcccgccttcgacgcgctggagaaatacaaaaaagacggcaccatgcctgaaaagctaacgctgaccaaatccaccctttatctgcctgataccgcaaaagaagagttagagaagaagaaaaatatggggtattgagggtatcaatgcctgatgccgattcgtaggccggataaggcgctcgcgccgcatccggcggtggtgcgctgaagcctgatgcgacgcttaccgcgtcttatcatgcctacgagttcggtgctctgtgtaggccggataaggcgttcacgccgcatccggcagtggtgcaacaccggacttaacaccgtgcacaatctgtcccctcgccccttcggggagagggttagggtgagggggacaaacggcgcagctcttaacatcaggcacgatctattcccagacttttagagcgtggctaagggggaaaccatgacgaccgaccaacaccaggaaatcctccgcaccgaaggattaagtaaatttttccccggcgtcaaagcgttagacaacgttgatttcagcctgcgccgtggcgaaatcatggcgctgctcggtgaaaacggggcgggaaaatcgacgctaatcaaagcattaaccggtgtataccacgccgatcgcggcaccatctggctggaaggccaggctatctcaccgaaaaataccgcccatgcacaacaactcggcatcggaaccgtttatcaggaagtcaacctgctacccaatatgtcggtcgctgataatctattcataggtcgcgaacccaaacgtttcggctttctacgccgcaaagagatggaaaagcgtgccaccgaactgatgacatcttacggtttctccctcgacgtgcgtgaaccgcttaaccgtttttcggtggcgatgcagcaaatcgtcgccatttgccgggctatcgatctctccgccaaagtgctgatcctcgatgaacccaccgccagcctcgacacccaggaagtagagttactgtttggcctgatgcgtcagttgcgcgatcgcggcgtcagcctgatctttgtcactcactttctcgatcaggtctatcaggtcagcgatcggatcaccgtcttacgcaacggcagtttcgtaggctgtcgggaaacgcgcgagctaccgcagatcgaactggtaaaaatgatgctggggcgcgagctggatacccacgcgctacagcgtgccgggcgaacattgttgagcgacaaacccgttgccgcgttcaaaaattacggcaaaaaaggaacgatcgcaccgtttgatctcgaagtacgccccggcgagatcgtcggcctggcaggcttgctgggatccggacgtaccgaaaccgccgaagtgatcttcggtatcaaacctgctgacagcggcacggcgttgatcaaaggcaaacagcaaaacctgcgatcgccacatcaggcttcggtactgggcatcggcttctgcccggaagacaggaaaaccgatggcatcatcgccgccgcctcggtacgggaaaatatcatcctcgctctccaggcccagcgcggctggctacgacccatttcccgcaaagagcagcaagagattgccgaacgctttatccgccagcttggcattcgcacaccttcaactgaacaaccgattgaatttctctctggcggcaatcagcaaaaagtgttgctttcacgttggctactgacccgaccgcaatttctgatcctcgacgagccaacccgcggcattgatgttggtgcccacgccgagatcatccgcctgattgaaacgctgtgtgctgacggtctggcgctgttggtgatctcctccgaactggaagagctggtgggctatgccgatcgggtgattatcatgcgcgatcgcaaacaggtggcggagatcccgctggcagagctttccgttccggcgatcatgaacgccattgcggcgtaaggagaacagtgtgatgcctcaatctctcccggacactacgccgccgaaaaggcgctttcgctggccaacgggaatgccgcagctggcggcgctattgctggtgctgctggtcgatagcctggtagccccgcatttctggcaggtggtgcttcaggatgggcgtttgttcggtagccctatcgacattcttaaccgtgcagctcccgttgcgttactggcgattggtatgacgctggtgatcgccaccggtgggattgatctctccgtaggggcggtgatggctatcgccggagccacaacggctgcgatgacggtcgcgggattcagcctgccgattgttttgttaagcgccctgggcaccggcatcctggcgggattgtggaacggcatactggtagcgatcctcaaaattcagccgtttgtcgccaccctgatcctgatggtcgccgggcgcggcgtggcgcaactgatcaccgccgggcagatcgtcacgtttaactcgccggatctctcatggtttggcagcggatcgctgttgttcctgccaacgccggtcattatcgcggtgctgacgcttctcctgttctggctgttgacccgcaaaacggcgctggggatgtttatcgaagccgttggtatcaacattcgggcggcaaaaaatgccggggtaaacacgcgaatcatcgtcatgctcacctacgtgttgagcgggctatgtgcggcgattgcgggcattatcgtggcggcggatattcgcggtgccgatgccaacaacgccggattatggctggagctggacgccattctcgcggtggtgattggcggcggatcgctgatgggcgggcgctttaacctgctgctctcggtagtgggggcgctgattattcaggggatgaacaccggaattttgctttcgggctttccaccggagatgaaccaggtggtgaaagcggtggtggtgctttgcgtgctgattgtccagtcgcaacgctttatcagtctgattaaaggagtacgtagccgtgataaaacgtaatttgccactgatgatcaccatcggcgtctttgtgctgggctatttctactgcctgacgcagtttcccggttttgcttccacaagagtgatctgcaatatcctgaccgataacgcttttctggggattattgccgttggtatgacctttgtgatcctctctggcggtatcgatctctccgtcggttcggtgatcgcttttaccggcgtgtttctggcaaaagtgattggcgacttcggcctctcgccgttgctggcatttccgctggtgctggtaatgggctgtgcctttggcgcatttatggggcttctgatcgacgccctgaagatcccggcatttatcattacgcttgcggggatgttctttttgcgcggcgtcagctatctcgtttcggaagagtcgattccgataaaccatcccatttatgacacgctctcaagccttgcgtggaaaatccctggcggcggtcgcttaagtgcgatggggctgctgatgctggcggtggtggttatcggcatattcctcgcgcatcgtacccgttttggtaatcaggtatacgccattggcggcaacgcaacgtcggcaaacctgatggggatttctacccgcagcaccactattcgcatttatatgctctccaccggactggcaacgctggcggggattgtcttctcgatttatacccaggccggatatgcgctggcgggcgtaggtgtggaactggatgctatcgcctcagtggtaattggcggtacgcttttgagcggtggcgttggaacggtattagggacgctttttggcgtggcgattcagggactgattcagacttacataaactttgatggcacgctgagttcctggtggacgaaaatcgccatcggtattttgttgtttatttttatagcattacagcgtggattaacggtgctgtgggagaatcgtcagagttcgccagtgacaagagtcaacattgcgcagcaataaaaacgcctctccgtgtggagaggcgcaggagattacgcgtccgggaactcacggataaagcgttcgacatcttcaaccatatggtcgttgccgacaaagaacgaacggcgctggtgcagagtttccgggatgatatccagaatacgctctttgccatcgctcgctttaccgcccgcttgttccgccaggaatgccatcgggttgcactcataaagcaaacgcagtttgccgtccgggtggctggcggtgcttgggtagagataaataccgcctttcagcaggttacggtggaaatccgcaaccagtgaaccgatataacgtgaggtatacgggcggttggtggatttatcttcttcctggcagaatttaatgtacttcttcaccccgttcggaaacttaatgtagtttccttcgttgatggagtaggttttgcctttctccgggaagcgcatccgttcctggcacaggcagaaaacgcccagcgaaggatcgtaagtaaaggcgtgaacaccgcatccggtggtgtaaaccagcatggtagaggagccgtataccacgtaacctgccgcaacctgtttgttaccaggctggaggaaatcttcttccgttaccggcgtgccgacgggcgtaactcggcggtagatggagaaaatggtaccgacagagacgttaacatcgatgttggacgagccatccagtgggtccatcagcaccacgtattttgcatgttcacagccttcaaagacaacaatctcatcttcttcttcagaggcaatgcctgcaacgatatcgcgtgctttcagtgcggctttcagtttttcattagcgaacaagtcgagtttttgctgaacctcgccctgcacgttctcagcaccgctggcacccaggatatcaaccagtcctgctttgttgatatcgcgatggataatcttggcgcccagttttattgccgacagcaaagcagtgagctcaccggtagcatgagaaaactcgtgctgcttttcgacaataaattcacctaacgttttcataaaactttccctgcaatgtttatggagtaaagcgaccgcaacaatcttaacaaataatctcaatgttgcgctcaggtgaatcgcgccagcaaattacggattatcctgaaatgcgtttctcacttgcccgacatatgcgtaaaatgagcggcagattaaaaaaggatagtgacgtatgcgcattcatattttaggaatttgtggcacgtttatgggcggtctggcgatgctggcgcgccagttaggccatgaagtaacgggttcggacgccaatgtgtatccgccgatgagcaccttacttgagaagcaaggcattgagctgattcagggttacgatgccagccagctcgagccgcagccggatctggtgattattggcaacgccatgacccgtggaaatccgtgtgtggaagcggtactggaaaaaaacatcccttatatgtcaggtccacagtggctgcacgattttgtgctgcgtgaccgctgggtgctggccgttgccggtacacatggcaaaaccaccaccgcgggaatggcgacctggattctggaacagtgcggttacaaaccgggatttgtgatcggcggtgtgccggggaactttgaggtttcggcgcgtctgggcgaaagcgacttctttgttatcgaagcggatgagtatgactgcgccttcttcgacaaacgctctaaatttgtccattactgcccgcgtacgctgatcctcaacaaccttgagttcgatcacgccgatatctttgacgacctgaaagcgatccagaaacagttccaccatctggtgcgtatcgttccggggcagggccgtattatctggccggaaaatgacatcaacctgaaacagaccatggcgatgggctgctggagcgagcaggagctggtgggtgagcaggggcactggcaggcgaaaaagctgaccaccgatgcttccgaatgggaagtcttgctggatggcgaaaaagtgggcgaagtgaaatggtcgctggtaggcgaacataatatgcacaatggcctgatggcgattgcagcggctcgccatgttggtgtagcgccggcagatgccgctaatgcgctgggttcgtttattaacgctcgtcgccgtctggaactgcgtggtgaagcgaatggcgtcacggtatatgatgatttcgcccatcacccaacggcgattctggcaacgctggcggcgctgcgtggcaaagttggcggtacggcgcgcattattgctgtgctggaaccgcgctcgaataccatgaaaatggggatctgcaaagacgatctggcaccttcattaggccgtgccgatgaagtcttcctgctgcaaccgacgcatattccgtggcaggtggcagaagtggcagaagcctgcgttcagcctgcacactggagtggcgatgtggatacgctggcagatatggtggtgaaaaccgctcagcctggcgaccatattctggtcatgagcaacggcggttttggtgggatccatcagaaactgctggatggtctggcgaagaaggcggaagctgcgcagtaattcggcctcagcctgagatagcattgccggataaggcgtttacgccgcatccggcatttgagcatagtgcctgatgcgacgcttgatgcgtcttatccggcctacaggtgcaccgcatccggcaaaccatactcacatcaacaacgaaaattacccttcattctccgccagttcgcgcagatactggaaaatctggcgtgcggatttcggcggcttattcccttctttctctttcttcgcgttacggatcagagtacgcagctgctgacgatcggcatcgggccacagattcaatacttcagcgatggcgtcatcaccttgatcgatcagacgatcgcgcaggttttccagtttatggaacagcaccacctgctggttgtgacggtttttcagcttatccagcgcctgacgaataggctctacgtcgcgctggcgcagcatcttaccgatgagctgcaactggcggcggcgaccttccatcttaatacgctgggcgagctcaatagccgcgcgcagatccgcatctaacgggatcttatccagcgcgtttttccccagatcaacaatttccgcgccaaggcgttttagctcctcggcatcacgtttaatttcacttttactgacccagataatttcatcgtcttcgtcttcgatgtcatcaccgggaacgtcgtcgagccagtcttcgggctgcttagtcatctcaggctccttaaaaaagaggctaatgttaccagttaagatgcgcactgaaaaacggttctctgttagacttcagagaaactctctacattatggcacttgcaatgaaagtaatctctcaagttgaagcgcagcgcaagattctggaagaagcagtttccactgcgctggagttggcctcaggcaaatcggacggtgcggaagttgccgtcagcaagaccaccggcattagcgtaagcacgcgttatggtgaagtggagaatgttgaattcaatagcgatggcgcgctggggatcactgtttatcaccagaaccgcaaaggtagcgcatcatccaccgatttaagcccgcaggccattgcccgcaccgtacaggcggcgctggatattgcccgttatacctcgccagatccctgtgccggcgtggcagacaaagagctgctggcctttgacgcaccagatctcgacttgttccaccctgcggaagtttccccggatgaagccattgaactggcggcccgcgcagaacaggcggcattgcaggcggacaaacgcattaccaataccgaaggcggcagttttaacagccactacggtgtcaaagtttttggcaacagccacggcatgttgcagggttactgctctacgcgtcattcactctccagctgtgtaattgccgaagaaaatggcgatatggagcgtgattacgcctacaccattggtcgtgcgatgagcgatctgcaaacgccagagtgggttggggccgactgtgctcgccgtactttatcgcgcctgtcaccgcgtaaactctccaccatgaaagcgccagtcatttttgccaatgaagtggcaaccgggctttttggccatctggtgggggcgatagcgggtggctcggtttaccgtaaatctacctttctgctggattcgctgggtaaacaaattctgccggactggctgaccattgaagagcatccgcatctgctgaaagggctggcgtcgacgccattcgacagcgaaggtgtgcgcaccgagcgtcgcgatattattaaagatggcatcctgactcagtggctgctgaccagctactcggcgcggaaactggggctgaaaagcaccggacatgcgggcggtattcacaactggcggattgccggacaagggctaagcttcgaacaaatgctcaaagagatgggcaccgggctggtggtgacggagctgatgggccagggcgtgagtgccattaccggtgattattcccgtggtgcagcgggcttctgggtagagaatggcgaaattcagtatcccgttagtgaaatcaccatcgcaggtaatttaaaagatatgtggcgcaatattgtcaccgtcggtaacgatattgaaacacgcagtaatatacagtgtggttctgtgctgttgccggagatgaaaatcgccgggcagtaaaaaactggcgcgacctgccgcgctataaactaaaaaattacacaaaatcattcgcactgcatcgagacggaaagtgaatgagggccggggagcgtactcgcagtacgtgacccgggcgaatgagcgtagccgtcgatgaggcagtgtgaaggatgaagtgtaaataaaaaaggaagtgagcaatgcgtaaaagcctgttagctattcttgcagtctcctcgttggtattcagttctgcgtcgtttgccgctgatcttgaagacaatatggaaaccctcaacgacaatttaaaagtgatcgaaaaagcggataacgcggcgcaagtcaaagacgcgttaacgatgatgcgcgccgcagcgctggatgcgcaaaaagcaacgccgccgaagctcgaagataaatcaccggacagcccggaaatgaaagatttccgccacggtttcgacattctggtcggtcagattgacgacgcgctgaagctggcaaatgaaggtaaagtaaaagaagcgcaggctgctgcagagcaactgaaaacgacccgcaacgcctatcaccagaagtatcgttaattcctcatttccctgttgcctgcactcaggtaacagggaacttatcatcgcaaatgatgcaccacctgattgctgctgccgcgccagatcagggaagggtcttttaaatcctgcacaaatttgccgtcgaccagcacgttaatcaaatcaacaacctgcatttgcgcagcgttgagttcgtcgagtttatagcctgtccacacccagatgtctttacccggacactcggcgcggatgcgttttaccagtttcagaatatccggcacgttttgcggatgcagcggatcgccgccggagagggaaatcccctggcgtttgatacgagtgtcattcagatctttaatgatcttgtcttccattgctttggtaaatggctgaccagaatttacccgccatgtgcttttgttatagcaaccggggcattcatgaacacacccggagacaaacagggtgcagcgagtgccggggccgttgacgatgtcgacaggatagtactgatgataattcattatttcgcctggcttatcagtccgcgtgtaggctgcatccggtaatcaatgcctgatgcgacgctgtcgcgtcttatcaggcctacagccgttgccaaatgtaggccggataaggcgtttacgccgcatccggcatttgcttagcgcagagtgaagattaacctatctgcccattccccaaatgtttaacgcggcgcttaacttcttcctgcttaccagcgttaaacggacgtgcatccgggctacctaaatatccgcacacgcggcgagttaccgacacacgggaggcgtcatggttaccacatttcgggcaagtgaagcctttgctggtgcactcgaactcaccggtaaagccacactcgtagcactcatcaatcggtgtattggtgccgtaatacggtacatgctgatagctgtaatcccagacatcttccagcgctttcaggttgtgctgaatgtttggatactcgccgtagcaaatgaaaccaccgttcgccagcggcgggtaaggcgcttcaaagtcgatcttgtcgtacgggttcaccttcttctccacatcaaggtggaaactgttggtgtagtaacctttatcggtcacgcccggcaccacgccaaactcagcagtatcgagacggcagaagcggtcgcacaggttttcactcggcgtgctgtagagactgaaaccataacccgtttcttctttccactgatccactgcctggcgcagacgttcaacaatggcgatacctttcgcgcgaagctgctcgttgtcgtaaacatgctcgccgccgaacagcgcgttaatggtttcgtggatgccgatgtaacccagcgaaatagacgcacgaccgtttttgaagatttcagaaacatcatcgtcagcattcagacgtacgccacaagcaccttccatatagaggatcggggccacgcgcgctttcacgccttcgagacgagcgatacgggtcatcagcgccttacgtgccagcaccagacgttcatccagcagcttccagaaggtggcttcatcgccttttgcttccagagcaatacgcggcaggttcaggctgatcacgccgaggttgttacgaccatcgtggatctgctcgccgttttcattttcccacacgccgaggaagctgcggcagcccatcggggttttaaacgaaccggtgactttcactacctgatcgtagttcaggatatccggatacatgcgcttgcttgcgcactccagcgccagctgtttgatgtcgtagttcggatcgccttttttatggttcagaccatcgcgaatcgcaaacaccagtttcgggaacaccgcagttttacggtttttaccgaggcctgcgatacggttacgcaggatcgattcctgaatcaggcgcgattcccagctggtgcccagaccaaaaccaaaggttacaaacggcgtctgaccgttggcggtgtgcagggtgtttacttcgtactccagcgactggaaggcatcgtagcactctttgatggtacgagagtttgcgtagccttcggcgtccgggatgttccactcttctgcggtcttgcgatgtttgttgtagctggcggtaacaaacggcgccagcacttcatcgatacggttaatggtggtgccgccataaatatggctggcgacctgagcaataatctgcgcagttaccgcggttgccgtagagatcgacttcggcggttcaatctcggcgttccccattttaaagccctgggtcagcatgcctttcaggtcgatcaacatgcagttgaacatcgggaagaacggcgagtaatcgagatcgtgatagtgaatatcgccacgctcatgtgcctgcaccacgtcacgcggcagcaggtgctggcgtgcatagtgtttagccacgatcccggccagcaggtcgcgctgggttggaatcaccttgctgtctttgttggcgttttcgttgagtaacgaggagttggtctgctcgaccagaccacggatctcctggttcaggcgaccgcgtttttcacgttcaatgtcgcgatcgtgacggtactcgatgtaagcacgagccagttgtttgtatggacccgacatcagctggttttcaactgcggtctggatctcgttgatatccacctggttgcggccctgcatctgctcgctgacaaccgcggcaacagtggcgcaataatcggcatcatcgacttccgctgctttagctgcacgcagaatcgcttctttgatgcgctctgatttaaacggcactttgcagccgtctcgtttcatcacatgcggtgtcatgatcgctccatatttttaagaacaggttatccacagaaattgggaaaggcgttttccggttttttcgtttcgttttccggtgctttccgcaatcgccatccgcttatccacaacgccgcacctttttcgtggggagctgtagtagcaattatagtcgattaatacaacatattgggttgggacgcattttaaagtctatatatagtgctttgcatcaaggatgttttaactttttttgatgtagctcaaagtaaaaagcagagcgtacggatgacgggcgctacagcgttatgtaaattttttaatgaatttgctggttgaaaaatcaacaaaaacaacaaaaacaacatgctgacagacaaaaccccggaatgaccggcattaccggggcttagggaagatttacttctgtaaccaccagacagcctcaaaaggccgtaaattcatggcacagggttgtggtgaggcttcttcgtagttatgcatcacaagctgccagttgccgcgcatttgccctggctgccagggttggatctcacggctaaggttggcaatgaccagcaaggtttgccccttccattcacggcgatagcaccacaatacagggctgtttggcagcagatcctggtaattgccccatgtcaggatggcttcttgcttacgcagtgcgattaacttttggtaggtgtaaaacaccgaggactcatcggccagcgcggcttctacgttgatttgttgatagttatcgcccaggccaatccacggttcgccagccgtaaacccggcattatcgccgttgctccattgcatgggcgtgcggctgttgtcacgggatttactggcgaggattgccaataactcgtcggcatcacgaccatcgttgcgcagctcggcaaacatattgaggctctccacgtcgcgatagtcagtaatgcgcgtgaaatgcgggttggtcatgccaatctcttcgccctggtagatatacggcgttccctgcatgccatgcagcaccatcgccagcatttttgccgcaggcacgcggtattcaccttcatcaccaaagcgagaaataatgcgcggctgatcgtggttacaccagaacaaggcattccatgccacgttgtgcattccttgttgccagtggcggaacaatgttttcaacgccacaaagtcaggtttagccagcgtccatttttcaccaccgggataatcgaccttcaggtgatgaaaattaaaggtcatcgacaattcactgcctgtcagtgccgcgtatcgctggcaatgctcaaggctggtggaggacatttcacctacggtcattaacccgcgtggcgtaaacacatcgcggttcatctcgtgcaaaaactcgtgtgctcgtggcccgtcggtgtaaaagcgacgcccgtcgccatccaggtcttcagggaaacgcgggtctttggagatcagattcaccacatccaggcgcaacccgtcgaccccacgatcggcccagaattcacagacttttttcagctctgcgcgtaccgctggattctcccagttgagatccgcctgttctggtgcaaagagatgcaaatagtactgttcgctttccgcatgccagcgccacgcactaccgccaaattttgaacgccagttgttcggtggcgtttctggttcgccatcgcgccagatataaaactggcggtaagggctttctttgttcagcgcctcgcgaaaccaggcatgttgggtagaggtatggttaaacaccatatcgagaatgatacgaatcccgcgcgattttgcctgcgtcaccagttcgtcaaaatcgtccagcgtgccgtaggtgggatcaatcgccgtatagttcgctacatcgtaaccgttatcgacctggggagagacataaaagggggttagccagatggcatcaacgcccagtttatgcagatagtccaggcgttggataacgccacgtaaatcgccggtgccgctacccgtggtgtcctgaaaactctttggataaatctggtagataacgccgttttgccaccagtggggaagattagtcattacgttattcctgcaaatgcgagggggcgcaattgcgccccgaagaaaattaaacaatgtccagcgtgcccaggcggtatttccgctgatagataaacgaggtgagtacaatcgggatgatgatggcgatagccattgccagcgcaaatacctgccagtagctcggttgaatcgagagaattcccggcaggccccctacgccgataccattcgccataacgccgttcaggccgcatagtaatcctgccagaccagaaccaatcatcgcgcacagcatcgggaagcgatatttcaggttgatgccgtacattgcaggctcagtgaccccaagccaggcggagatagcggcaggcacggagatctcgcgttcattgtgcttgcggctggaaatgataatgcctatcacggcggagccctgagcgatattcgacagcgcaatcagcggccacactggcgtgccacccatgctttgaatcatctgcaaatcaatagcaagcgtggtctggtgtacaccggtgatcaccagcggggcgtacaggaagccaaacaatgctgcgccaatcggagcaaagctgccggtcatcaggtgacgtaccgcaaaggcaacgccatcgccaatcatgcgaccaaacggaccaatcagcgcatgggcgaggaacaccgcgaggatcagcgaacagacgggcaccaccaccagatagaggtaatccggcacgatgcgtttaaggcgagtttcaataacgcccagcgccagcccggctaacagtgccgggatcacctgcgcctgatagcctactttggcgatgctgaacatgccaaagtcccacacttccggcagctgctgcccgagcagataagcgttcatcagctggggagaaaccagtgtcacgccaagcacgataccaaggatcggcgtgccgcccatttttttcaccgctgaccagcaaataccgaccggcaggtagaagaagatcgcttcaccgatcaaccacagaaaatcgtagatcgtttgcagggaagggtacatttgcgccagcgtctgaccgttgctcatgggcaaatcgccgatcacattgcgaaaaccgaggatcaaaccgccgctaatcaacgcgggcagcagcgggaagaagatctccgcgaaatgagagatcaactgctcatgccatttcatattctgccgggcggctttttttacctgctctttatcaacctgcgcctgtccggttgacgcaatcagtgcttgatagtaatcacccacattggtgccaatcaccacctgaaattgcccggcattggtgaaacagcctttcaccatggggagttgctcaatttctttcggtctggcattggccggttggttgaggacaaagcgcaggcgagtaatacagtggctcaccgtcgcaatattgccgcgcccgccgaccagttcaatcaaccgatcgatatccgtttggtttattttgctcatcataaagccccatggcagatgacatttttggttgactgcagaatatattgcgcggaaaaatttaaaaacgggaacgttcccgaaacgcagcgaagatcacaatttatcgttcaggaaacgatcaggacagggtggcggggatgatgatttgttgcggttcgctgcgcccggttacctgtgcgatcaattggcaggccgcctggcgtccagcttcggcgtagccaggatctacggtgacgatctccggatgaaggaatttcattaacggcgtattaccgacgctcgccagttgcaaggtgtcgatgcgttgctcttgcaggtatttacttgcgccaagtgccagcgtgtcggttgcgcacagtaaggcggtagtttcaggcgtaatcacttttgccacgttctcatagccttgcttcatagcaagccctggcagagcggcaacgggatgcagtttatgcgctttgcagaacgccaggtaggcttcgtgacgtcgcttaccggttgtcacgtcactatgcggcacgccgagataactgatattacgatgcccctggtcatacagccgttgcatcaggatcttgattgccccttcgtcgtcataacagaccgaagcaaaaccttttgcgtcacgcgccagcagaaccagcgatgactgccagtgggctaacatttcttctgttatgccagtaaaaccgaacagcactacgccgtcgatattacgccgtttcagcacccccaaatgttcggcaactaattgcggggaaaactgactttccatcatgattgggtcgtaaccttgttcatagaacgctggcagcatggtttgaacggcgagattttctgacaacgaatccagacgggtaacaatgatggcgaccactttatcgctttgcccacgcatagcgcgcgcagagcgggaaggggaaaatccatgctgattcatcactgcttcaacacgctcgcgggtgcgctggctcacgccgctttcgttattcagcacccgggaaactgtagatttccccacgccgcttaagcgtgcgatgtctttgatggtcagccgattttgcatcctgttgtcctgtaacgtgttgtttaattatttgagcctaactttacccgtgcattcagcaatgggtaaagtctggtttatcgttggtttagttgccagcaggtattatatcgccatagatgctacgaatattattggattctccttattatttgcggcgcttttttcacttaccggaggttatatggaacctgatcccacgcctctccctcgacggagattaaaacttttccggtaagcccgtcttttcacggcgttaccggatgcgtaaggccgtgacgttttaacgtccctgctcagctttattaccttcaggtaaggcttcgccacgcctgaagacatttctgtactgtttcagacagtgcggagggactccttatgtttaaagaaatttttacccggctcactcgccatttaccttcccgtctggttcatcgtgatccattgcctggcgtgcagcagacagtgaatacggtggtcccgccgtccttaagtgcgcattgcctgaaaatggcggtgatgcccgaagaagaattgtggaaaacgttcgacacccatccggaagggttaaatcaggcggaagtggaatctgcccgcgaacaacatggtgaaaataaattacccgcacaacaaccgtcgccgtggtgggtacatttatgggtctgctatcgcaacccctttaatattttactcaccattctcggcgctatttcttacgccacggaagatttatttgccgcgggcgttatcgcgctaatggtcgctatttctacgttgctgaactttattcaggaagcacgttccactaaagcggcagatgccctgaaagcgatggtcagtaatacagcgacggtgctgcgcgtaattaacgacaaaggcgaaaatggctggctggagatcccgatcgaccagctggtgcccggcgatattataaaactggcggcgggagatatgatcccggcagatttacgtatcttgcaggcgcgggatctgttcgtcgctcaggcgtcgttaaccggtgagtctctgcccgtggaaaaagccgctaccactcgccagccggagcacagcaatccgctggagtgcgacacgctgtgttttatgggcaccaccgtggtgagcggcacggcacaagcaatggtgattgctacaggtgccaacacctggtttggtcaactggcggggcgtgttagtgagcaggaaagcgagccgaatgcctttcagcaggggatcagccgcgtcagtatgctgctgattcgctttatgctggtgatggctccggtggtgttgcttatcaacggttacaccaaaggcgactggtgggaagcggcactgtttgcgctttcggtcgcggtaggcttaacgccggaaatgttgccgatgattgttacctcgacgctggcgcgcggcgcagtaaagctgtcgaaacagaaagtgatcgtcaaacatctggatgccattcagaactttggcgcaatggatattctgtgcactgataaaaccggcaccctgacacaggataaaattgtgctggagaatcataccgatatctccggtaaaaccagcgaacgcgtgctgcatagtgcgtggttgaacagtcattatcagaccggacttaaaaatctgcttgatacagcggtgctcgaaggtacggatgaagagtcagcgcgctcgctggccagccgttggcaaaaaattgatgagattccgtttgatttcgagcgtcgtcggatgtcggtggtagtggcagaaaataccgaacaccatcagctggtttgcaaaggcgcattgcaggaaatcctcaatgtgtgttcgcaagtgcgtcacaatggcgagattgtaccgctcgatgacaccatgctgcgtaagattaagcgggttactgatacgctgaatcgtcaggggctgcgcgtggttgcggtggcgacgaaatacctgccagcgcgtgaaggagattaccagcgggcggatgaatccgacctgatcctcgaaggatatattgctttccttgatccgccaaaagagacaaccgctccggcactgaaggcattaaaagcgagtggaattaccgtaaaaatccttactggcgacagtgagttagttgcagcgaaagtgtgccatgaagtggggctggacgcgggagaggtggtcattggtagtgatattgaaacgctatctgacgacgaactggcaaatcttgcacagcgcaccacgctgtttgcccgcctgacgccgatgcataaagaacgcattgtgaccttactgaagcgcgaagggcatgtggttggctttatgggcgatggtattaatgatgcgcccgccttacgcgctgcggatatcggcatttctgtggacggcgcggtagatatcgcccgtgaagcggctgatatcatcctgctggaaaaaagcctgatggtgctggaagagggggttattgagggacgtcgcactttcgccaacatgctgaaatacatcaaaatgacggcgagctctaacttcggtaatgtgttcagcgtgctggtggcgagtgctttcttgcccttcctgccgatgttgccgttacacttgcttattcagaacttgctgtacgatgtgtcacaggtggcgatcccgtttgataacgtcgacgacgagcaaattcaaaagccgcaacgttggaatccggcggatctggggcgctttatgatcttcttcggaccgatcagctcgatcttcgatattctgacgttttgcctgatgtggtgggtattccatgccaacacgccggaaacgcaaacgctgttccagtcgggatggtttgtggtgggcttactgtcgcaaacgctgattgtgcatatgatccgtacccgccgtgtgccgtttattcagagctgtgcatcgtggccgttaatgatcatgaccgtgatcgtgatgattgtcgggatcgcattgccgttttcaccgctggccagttatctgcagctgcaggcgctgccgttaagctatttcccgtggctggttgcgattctggcaggtatatgacattaacccagttggtgaaaggattttatagccgtcgttacggctggcagtaaagaataaactgggcacgatagccccgattcagattgcagacaaagtaagctttgttcatgccggatgcggcgtaaatgccttatccggccaacaaattcaataaattgcaggaatcacgtagatactgttatggcctgcaagttttttcctggtccggtttcccggattgcaggcatgccagacacagcgccgtcaggcgctgtttttttcatcccttccgcgatttttacgccgctaccggattatgccgtgacgcatcgaacggcacgcctgacttcagcactccatacgccacctgtgccagcttgcgcatcatcgcgccgagaatcacctttcctttcttgccattagccgccagacggtcgcggaacgcccgtccccactcagtcttactggtggctaccattgcggcatatacaacgccctgcgaagcgacacatgtccggccttactcatccggctcgcccctctcacactgctacctgattcataacgccgtggtgtcagacccgcaaaagcggcgaactgtctggcatgggcgaagcggtcctcagaccgatataagccagcaataccgcagatgttttctctccgatacccgggatgctttccagcagtttcctgcggtgtttcatatccggatcatcgtctgtcaggtcttttatctgcttctcaagacgcttcagctctgcttcaagccacagaaggtgagcatcaatgctcggtctctggacttcccgcgccgtttcagtgcgattcagttcctgcgtgtgcatatctgtcagcgcctggtggcggactaccagggcacgcaacgcgcgttcaagcgggtgaggcgcttcccaggctgcagggcgcttctgacgacagaactctgccagcatgcgcgcatccacggtatcagtcttgttacgcagtccttcactctgagcgaaagctttacccagcgcaggattaatgactgacactatgtagccagcatcgtaaaggcactcagcgacaggttccatataggtgccggtcgcttcgatgcagatatgcgcatggtcaatcttgtgacctttcagccagctcaccagctcatcgtgccctttagtggtgttagcgaattttttggtgcgatgacgaccatcaggacgcaacacatcgacatccagtttctctttagcggtgtcgataccgatataatgaagttcatgttccatagtgaaaccaaccttgcaaatacggattaccgggaaaaccggtccatgatactgtccggtttatcactttgggagaaaggcagtccgctgcataaatctacgcaacaggttagaacccaaggcccgatacggcatgcggactgcaggcagagaaaactggccgattttctctgcactggagggataatacaaggcctgataagcgtagcgcatcaggcgattttgcgtttgtcatcagacttaatccgggcatgatagcccggatttccatcaagattagcgacgaacagcgatcgcttcgatctcaattttcacgtctttcggcagacgggcaacttcaacgcaagaacgtgccgggaaggtggcattgtgttcggtgaagaaggcttcgtaggtagcattaacggttgcgaagtcgttcagatctttcacaaacacggtggttttaacgatgtcgcccactttcaggcctgcggcttcgacgatcgcttttacgttatccagcgactgacgtgcctgtgcagcgacgtctgccggtacttcgcccgttttcggatttaccgggatctggccggaggtgatgatcatattgcccagatcaacgccctgtacgtaaggaccgatagctgccggtgcattttccgtcgcgatagttttgctcatgatttctcctttattacagcggtaaaaagtctggctcattatagggagccagacttttattaccaaccgcaattaattggccagcaccacattatgggaaaactctttttcacagtatttgcatttgagcgcgatgtcattggcgcgttttcgcacggcaaagctggaagaaaccggttcggcatggctgatacagttgctgttcgggcagaccagcacattgtcgatgcgctctggcagactggggcgcgatttacccaccacttcatagttgtcgatacggttaaccgtggcttgcggcgcatacaatgccagttgatctacctgatcttcactcaaaaaggtattttcgattttgatcagatctttgcggcccatctcgccagaaggcaagttcagaccgatggtgatgcgctgatccgtttcggtcagcttgaacagactcaacagcttaaaaccgatctgggcggggatatggtcaattaccgtgccgcgtttaatagcttcaacctgcaatttattatcgtgtgtcatctctatttccccttacagtaccagatcgcgattcagaaccagtgccagtaacgcctggcgagcgaaaatcccgttgcctgcctgctggaagtaccaggcgtgtggcgttttatcaacatccgtcgcaatctcatcaacacgcggcagcggatgcagcactttcatattggctttggcgttgtggagatcgctggcgcgaagaacaaactgcgctttcacgttggcgtactcggacgggtccagacgctctttttgcacgcgggtcatgtacaggatgtctacttccgctatcacttcttcaatagagctgtgcagactccatgcgatccctttttcatcgagcatatccagaatgtattgcggcattgccagcgcgtccggcgcgatgaagtaaaaacggttgccgtcgaacttcgctaacgcctgagtcagggagtgaacggtgcggccatatttcaggtcaccaaccattgcgacgtggagattgtccagacgcccctgggtttcctgaatagtgaataagtccagcaaggtttgcgtcggatgttggttggagccatcaccggcattcagtaccggtacattgccggaaaactcggtggccaggcgcgccgcaccttcctgcggatgacgcatcactatcgcatcgacgtaagtgctgataaccgaaatggtatcggccagcgtttcgccctttttacccagtgatgtattggcgctgtcggagaagcccaccacgctggcacccaggcggtgcatagatgtttcgaaagagaggcgggtacgggtagaggcttcgaagaaacagctggcaatgactttgtgcttcaacagctctggttgcgggtttgctttcagtttcgccgctgtcgccagcaccagattaaggtcatcgcgactaaggtcgtttatggaaatgatatgtttctgatatagcggattagccatcttttatctcctgacgcctgggcaaaaaaaagcccctcgattgaggggctgggaatgggtgatcaacgggaagaaaaacggcaggccagcgtcttttttcagacgcggtaagacaaaatgtcgaacacactgaaccatacatcctcccggcaaattgtccggcattatactcatcgtcagaagcggtgcaagcatttgatgcaatattttgtcagcgcaaacggtttatttgaattataagtcaaaatacatgcatttttatttgttgtgattctgcaggggaacggtcgttcggtatcaataattgcagacatttcctgcttttttctttttcactttcacgcaatcagatatgcattttattccattcatccgacttatagggcggagtgtgaaaacgaacggctaacactattgcttactgctcagggatgcgcgctatcactttaatttcaaaatcaaagcctgccagccatgtaacacctaccgccgtccagtttggataaggtggggcgctaaatatttcatttttcaccgtcatgatgtcttcaaattggttttctggatcggtatggaagctcgtaacatcaatgatatcgtcaaaagtgcatcccgcagcagccagggtcgcatgcaaattatcaaatgccagtctgacttgttgctgaaaatcgggttctggtgttccgtcctctcgacttcctacttgcccggaaacaaacagcaaatcgccggaacgaatagccgcagaataacgatgttcagcatacagtgaatgtcggcctgcagggaaaacagcggttctttctaccatttggttatcctcaagatttacgacatgaacagaagatttatatttaccaggagccgcttttagcggacgacgtgagtaaacaaaacccagacatcatgggaaatggctgggcttaattgagcgtagtcggttatgcgccaaacgcgccatcaatggtatgcatcgcgccggtaacaaaactggcttctggccctgctaaccatgcgaccataccagcgacctcttccggttgcccatgtcttttgatagccataaaactatgcaacatatcgcgcattggcccgttggcgggattagcgtcggtatcaattggccctggctggacgacgttaatggtgatcccacgcggtccgaaatcacgggccagcccgcgcgccatgccttgcagggcagatttactggcggcataagcagccatgcctgcaacaggcatacgatcgccattcacggagccgatgattaagatgcgcccgccttcgggcatctgccgggcggcttcaacagaggcatgataaggagcatgaatattgattttgaaaaggcgatcaatatcatcggcattcaattccagggcctcgccaaagacgccaatacctgcatttaccaccaggatatccaatgcgccgctcttacgaacgacatcaatgacagcgtctctgtcagcactatctgtgaatactgctgtcgctccagtctcttgtgccaggcgtttagcggcatctttcgaccccgcataggtgaatcgtacattggccccatcggtgacgaaacgacgtacgatagcggcaccgataccacgactgccaccgaggatgagaactgtcttacctgtaaaagcgcccataaggactccttgatttattatgtaacatgcattacaaaactgttttaactttctgtcaacaggttttgtaatggtcactaaaaaacaatctcgcgttccaggtcgtcccagacgtttcgctcctgagcaggcaatctctgcggcaaaagtgctttttcaccaaaaaggtttcgatgctgtcagtgttgctgaagttactgattatcttggtattaaccccccgagcctctacgcggcttttggcagtaaagctgggttatttagccgtgtactcaatgaatacgtcggtacggaagctattccgcttgccgatattcttcgtgatgatcgtccagtaggcgagtgcctggttgaggtattaaaagaagcggcgcgcagatatagccaaaacggcggctgcgctggctgtatggttcttgaaggtattcatagtcatgatccactagcgcgtgatattgccgttcaatattatcacgccgcagaaacgaccatttatgactatatcgccaggcggcatccacaaagcgcacaatgtgtgactgattttatgagtaccgtgatgtcagggctttctgcgaaggcacgggaggggcactcaatcgaacaactctgtgcaacagctgcactggcgggggaagcgataaaaactcttctcaaggagtgatgctggccttgatccgaaaggcgggaacgcgcctgccgataagttgtgataagacaataattcacgcgttaaggctagcggaattgatcaccttttcgtataacgatagaaatgaaacgttgttttaattaaggagtggaaaagatgatcatcggaaatattcataatcttcagccgtggctaccccaggagttacgccaggcgattgagcatatcaaagcacacgttacggcagaaacgccaaagggcaagcacgatatcgaaggcaatcgtctgttttatcttatctcggaagatatgaccgagccgtacgaagcccgccgtgcggagtaccatgcccgctatctcgacattcagattgtgttaaaaggtcaggaaggcatgaccttcagcacgcaacctgcaggcacgccggataccgactggttagctgataaagacatcgcatttttgccggaaggcgttgatgagaaaacagttatccttaatgaaggtgattttgttgtgttttatccgggggaagtgcataaaccgctgtgcgcagtgggcgcgccagcccaggttcgcaaagcagtagtgaagatgctgatggcgtgatgacttttcgccgtaaataactccaggtttacggcgagcttctgaaaagagcgttttttgatatttttttgtgagtagagtttgtaatgcttagacgttcttattaactcaaggagtccgtcatgagcaaaatatcagatttgaattattctcaacacattacatcagccgacaattttaaaccaaaaaatgaagtcttaaatacctggtatgtgggaatgaatgattttgcccgaattgccggagggcagaatagcagaagcaatattctttctcccagagcatttttggagtttttggctaagatatttaccctgggttatgtggattttagcaaacgctccaacgaagcgggtagaaatatgatggctcatattaagtcctcatcttatatcaaaaataatgatggtagtgagataatgaagtttgttatgaataatcctgaaggggagcgagcggatttatctaaggtggaaatagaaattacacttgcctcagcttttaataatgggattcgtgaaggacatacagtcattatatttacacaacctgatggttcgactaatcgttatgaagggaagtcctttgaaagaaaagatgagagttcattacacctgattactaacaagattctggcgtgttaccaacgcgaagctaacaaggaaatagctcgtctattaaatattccgcaggagttaaataattctcaggacttgaataactcgcaggtgagttgtaaagattcagttgattctacgattacggatttattagaaaaaccattgaataatgcattattagcaataaggaaagaacatctgctattaatgccttatgtatgtaatgaatcgatttcatacttgcttggtgaaaaagggatactgaaagaaatagatggccttaacgcagtaaataattatcttcttaataataagaaagctactgacaatgaaattaatgacatcaaagttaacctgtctcatattcttattgattccttagatgatgcaaaagttaaccttacaccggtcatcgattcgattctggagatttttttaaaattcccatatattaatgatgtaagaatactggattggtgttttaataaaagaatgcaatattttggtgattctgaaaagataaagtatgcatgctccgtgataaatcatattgattttagccgcgatcaatctaaagattttagctgcgatcaatctaaaattaaaatagctgagaccttatttttcaatctcgataaagaacactataaaaatagccgtaaattacaggaattgatttgggataagttggttgcatatgtcaatgattttaacttaagcaatcaagaaaaatcacgcttaatactaaggttatttgatgatgttaagttgctatttaatgaagtgcctgtcagcattttagtaaatgatattttttttgaaggattttttcatgaagcaacctgattttgctaagtggtatttctatcaattacttaaagattatgagggcgaacagctgtatcttaatgagttaggatatgtttatggtaatgaagaaaaaacaaatgaaattgtaaaaaacaatccgggttatgtcgttaagatttttaaagaaaagatggttaatgaattaaaaattagaacaagaatgatgaaaatcctccggaagatttacgtatagcaatagaaaaatatggatggaataattgaactattactgcataaaataatgtgatgccgggatgtttttgtatttcccggcatctttatagcgatatcaattatttactgagcgtcgcgaccatcaccgctttgatggtatgcatgcggttttccgcctgatcaaaaacaatgctggcggcagattcgaagacctcatcagtcacttccattccgccatgtaggccaaactcttccgccattttcttaccaagcgtcgtctggtcgtcatgaaacgcgggcaggcagtggaggaatttgacctccgggttaccggtcaactgcatcatcttgctgttcacctgataatcacgcagtaatgcaatccgttctgcccatttctcttttgcttcccccatcgacacccatacatcggtatagataaagtcagcaccttcaactcctttggctacatcttccgtcagcgtaatattcccgccattttgctgtgccagggcgcggcattccgtaaccagcgcagcttccggccagcatgcctgtggcgcgaccagacgcaaatccagaccggtaagcgccgcagcttcgagcatcgaattgcccatgttgttacgtgcgtcacctgcatagaccagcgtcatttcgttgaatgctttaccgggtaaatgctcctgcatggtgaggagatccgccagcaactgcgtggggtgaaactcattggtcaggccgttccataccggcacgccagcgtattccgccagtgtttcgacaatctcctgaccatagccgcgatactgaataccgtcatacatgcgacccagcacgcgggcagtgtctttaatcgactctttatgaccaatctgactgccgcttgggccgagataagtaacgcgagcaccctggtcatatgcggcaacttcgaaagagcatcgggtacgggtcgagtctttttcgaagatgagcgcgatgtttttaccagtgagtttggcttcttctttgccgcttttcttatcggctttcagcttcgcggctaactgcagcaggctgttgagttcagctggcgtgaaatcgagtaatttcaggaaatgcttatgataaaacccggacatagatccctcctgtggctaacgccttaatgaattaaaattcaatttatatggatgattatccatttgcaagtctaaagcataaatctttgtcacaaaggtggaggcaatgtcagtggtgtgtgacaataagagtatcggcaggacattaagaggaatgagccatggcaaacccggaacaactggaagaacagcgtgaagaaacacgtttgattattgaagaattactggaagatggcagcgatccggacgcgctgtacaccatcgaacaccatctttccgcagacgatctggaaaccctggaaaaagcagcagttgaagcgtttaaactcggttacgaagtgaccgatccagaagagctggaagttgaagatggtgatatcgtgatttgctgcgacatcctcagcgagtgcgcgttgaatgccgatctgatcgatgcccaggttgaacaactgatgacgctggcggagaaatttgacgttgagtacgacggttggggcacttactttgaagatcccaatggcgaagacggcgacgatgaagattttgtcgatgaagacgatgacggggttcgccactaattaattgattaaaatgcccgatagcacacactagcgggcatttttttagagttcgcgtagcatccgcacttcacaatctacatggcccgtgcagccaagtgcatagtcgatatgttgaaaacctaaatgttcatacaaaccaatcgcttctttcaaaaaagcggtcgtttccagatagcagcgtttgaagcccatctctcgtgcctgctccatcgccattaaggccagttttttcgccagccctttaccgcgaatagccggaagaaaatacatcttctgcagttcgcaaatgtccgactcactcccggttaatggcgcaatcccaccgccgccgaccacttcaccatcgtactcaaccacccaatatgcatgacccggctgactatacacttgatacaactcgtccaggttcggatcggcgacggtgtagcctttatcagcggtaagaccgtattcggcggatacctgacgaatgacgcgggcgatggcgggattatcctgctgcgtcaggcgacgcattacaggtgattgcggcgcaatgttattcatagtttaacccaataaaaataaagtaattatacatttgtttaataccactctcttcttacgtgcgcaagcgacttataaagtaataaagtttttgccagcctattactgataagagtattgtaacgtggcagaacattttactgtctgtatatataaattatatcaatgggttttttaattcagggaatttttatggctcaagttattaatgaaatggatgttccgtcccattcgtttgtttttcatggtacaggtgagagatattttcttatttgtgtggtgaatgtgttgttaacgattataacgctaggtatctatttgccatgggcattaatgaaatgtaagcgttatctctatgctaatatggaagttaacggacaacgattttcttatggaattactggtgggaatgtttttgttagttgtcttgtttttgttttttgctatttcgcaatcttaatgacagtgtcagcagatatgccacttgttggctgtgttttgactttgttactgttggttttgcttatatttatggcagcaaaaggactgcgttatcaggccttgatgaccagtctcaacggcgtaagatttagttttaattgctctatgaaagggttctggtgggtaacctttttcttgccgattttaatggccattgggatggggactgttttctttatctcgacaaagatgctacatgccaatagttcaagtagtgttattatatctgtggttctgatggcaatagttggtattgtttccattggtatttttaatggtactttatatagcctggtaatgagttttctctggagcaataccagtttcggtatacatcgtttcaaggtgaaattagatactacgtattgtataaaatatgccattctcgcatttttagctttattaccttttctcgctgttgctggttatattatcttcgatcaaatattaaatgcgtatgatagttctgtgtatgcaaatgatgatattgagaatttacagcaatttatggaaatgcaacgtaaaatgataatcgcgcagttaatctattattttgggattgctgttagcaccagttatttaacggtgtcgttgcgaaatcattttatgagcaacctgtcactgaatgatgggcgtattcgttttcgctcaactttaacgtaccacggtatgctttatcgcatgtgtgcgttggtggtgatatccgggattacgggcggtctggcttatccactgctgaaaatatggatgattgactggcaggcaaaaaatacgtatttgctgggcgatttggatgaccttcctttaatcaataaagaagaacaaccagataaaggcttcttagccaggatttcacggggaattatgccttctttaccatttctgtaagagataaaaaaggccggagcatgctccggccttcgttttcattactgtgttttgattacagcgcggcgataacagcctgctgttcaatcagcttcgctttcgcttctgcatagccttccagcttttcacgctctttcgcgatgaccgcttccggtgcgcgggcgacaaagccttcattcgccagcttgttctcgatacggctgatttcaccttcaatcttcgccacttctttcgccagacgcgccagctcatcttctttgttgatgaggccagccatcgggatcagcagctctgcaccgtcgatgatcttagtaacggaaaccggacctttgtcatcggcaggcagcacggtgatactttccagacgcgccagcgtttgcaggaagccacggttttcatttacgcgacgttctgcatccgcgctgcaaccacgcagtagcagctccagcggtttgcccggcgcgatgttcatttctgcacggatgttacgtaccgcaacgatcgcctgcttcagccactcggtgtcggccagtgcggcttcatcaacctgagatgcatcgtactgcgggaacggctgcagcatgatggtgtcggcagtgataccgcaaagtactttcacacgctgccagatggtttcggtgatgaacggaatgatcggatgcgcgaggcgcagcagaccttccagtacagtcaccagcgtatggcgagtaccgtgcagttctgcttcggtgccaccgttcattaccggcttggtcagctcgagataccagtcacagaactggttccaggtgaactcatacagaatgcctgcggcgatatcgaagcggaagctgtccagcgcttcgcggtacgctttgatggtctggttgaactccgccagaatccagcggtccgccagcgacagcgtcatttcgccgccgttgaagccgcaatcctgaccttctgtgttcatcagcacaaagcggctggcgttccacagcttgttacagaagttacggtaaccttccaggcgcttcatatcccagttgatgtcacgaccggtagacgccagtgccgccagggtgaagcgcagcgcgtcagtaccgtgcggttcaataccgttcgggaactgcttctcggtgcgcttacggattttgtccgccagctgtggctgcatcatattgccggtgcgtttttccagcagttctggcagcgaaataccgtcaaccatatccagtgggtcaataacgttacccttggatttggacatcttctggccttcgtcgtcacgaatcaggccggtcatgtaaacggtgtggaacggcacctgcggtttgccattttcatctttgatgaagtgcatggtcatcatgatcatgcgggcaatccagaagaagatgatgtcgaagccggataccatcacgctggttgggtggaactgacgcagggcgtcggtgttttccggccagcctagggtagagaaggtccacagtgcagaagagaaccaggtgtcgagaacgtcttcgtcctgacgcagggcaacgtcggcaccgaggttattttctttacgcacttcgtcttcgttgcggccaacataaacgttacccgcttcgtcataccatgccgggatacggtgaccccaccacaactgacgagagatacaccagtcctgaatatcgcgcatccaggagaagtacatgttttcgtactgcttcggtacgaactgaatgtcgccgttctcaaccgcttcaactgccggtttcgccaggacatcggcacgcacgtaccactggtcggtcagcattggttcgatgaccacgccgccacggtcgccgtaaggaacggtcaggtcatgtggtttaatttcttccagcaggccgagtgcgtcaaccgcagcaacgaccgctttacgtgcagcaaaacgctccagtttctggaactctgcagggatttcgctggaataaacgtcagattcgttacctttggtatcgaacacctgggcgctttcacggatatcgccgtcaaaggtcaggatgttgatcatcggcagggcgtgacgtttacccacttcatagtcgttaaagtcgtgcgccggagtgattttcacgcagccggtgcctttttccatgtcggcgtgttcgtcgccaacgatcggaatacgacggttaaccagcggcagaatgacatatttgccaatcagatctttgtaacgcggatcttccgggttaacggccacgccggtatcgcccagcagggtttccggacgagtagtcgcaaccaccagataatctttaccatctgcggttttcgcgccgtcagccagcggatagcggatgtgccacatcgaacctttcgattcgcggttttccacttccaggtcagagatagcggtgcgcagtttcggatcccagtttaccaggcgtttgccacggtaaatcaggtcttctttatacagacgaacgaaaacttctttcaccgcattggacaggccttcgtccatggtgaagcgttcacgctcccagtccacggagttgccgagacggcgcatctgacgggtaatggtgccgccggattccgctttccattcccagattttgtcgatgaaagcttcgcggccgtagtcgtgacgggttttaccttcttctgcggcaatcttgcgctcaacgaccatctgggtagcgatccctgcgtggtcagtaccgacctgccacagggtgtttttgccctgcatgcgctgatagcggatcatggtatccatgatggtttgctggaaggcgtgacccatatgcaaactgccggtgacgttcggcggcgggatcatgatgcagaaactttcctggctttcatcgccattaggcttaaagtagccctgcttttcccagtgctcgtaaagcggctgttcgatatcttgtgggttatatgtcttttccattatttccaggttgccgtattcaggttgaaaccagccacgcggtaggctttatagcgttcgcgcgccagttgtttcagagaatcttcataaggaacgaagtctaccacttctgtgaaagcggtggcaaaatctgcaaagcttgttcgcagactaatcaatatatcgcgcgggctgctgctgcgtttttgcggccaggcgatctccaccggcgcaccgccgcgcggtccttctcccgctaaattatgcggaacaaagctttctgccggacgcgcccacagggcttcatccagccggtaagcctgcttttcatcttcacaggcgatgagcacgcgcttaccactgcgccaacgttctgcggcaatttcacacaccagctgctcaacggcgcttaagccatcgacggtggtgtcattgtccagaaggtagaacgtcgcgtttttcataaatggggcttcttgtggtggatttaaatattgctgcattcctcaccctaaaagatgagcaatgaatttctattgcgctcgatcggttccctctcccttagggagagggttagggtgagggtaaaacgcaaacttactcttcgccgttaaacccggcgcggtttaacaggaactgtgccagcaacgctaccggacgaccggttgcgcctttcgctttaccagaacgccaggcggtaccggcgatatccaggtgcgcccagttgtacttacgggtaaagcgtgacaggaagcaacctgcggtaatcgccccaccaggacgaccgccaatgttcgccatatcggcaaaattggactccagttgttcctgatactcgtcacccagcggtaagcgccatgcgcgatcaccggattgttcagacgcggcaatcagttcatgggccagcggattgtggttcgccatcagaccagtaatgtgatgacccagcgcgatcacgcaggcaccggtcagcgtcgccacgtcaatcaccgcttccggctcaaaacgctcaacgtaagttaacacgtcgcacagtaccaggcggccttcagcgtcggtgttcagcacttcaacggtttgaccggacatggtggttaacacatcgcccggacgataggcacgcccgccaggcatgttttcgcagccagccagcacgccgataacgttaatcggcagttgtagctccgcgaccatccgcatcacgccgtaaaccgctgccgcaccgcacatatcgtacttcatctcatccatgccttctgaaggcttgatcgagataccgccggagtcgaaggttaaacctttacccaccagcacgattgggcgtgcatcttccgacgcgttgcctttgtactcaatcaccgacatcagcgattcgttctgcgaaccctgaccgaccgccagataggaatgcatccccagctctttcatctgttgttcgccgataacgcgggtaatgacattcttgctgtagctgtcagccagttggcgcgcctgagaggcgaggtaagcggcgttacagatattcggcggcatattgccgagatcttttgctgctttaatcccggcggcaatcgccagaccgtgctggatcgcgcgctcaccgctggtcagttcacggcgggtcggcacgttgaacaccattttacgcagcggacgacgcggttcgctcttgttcgttttcagctgatcgaaactgtagagcgtctcttttgccgtctcgacagcctgacgcactttccagtagttgttacggcctttaacgtgcagttcagtcagaaagcagaccgcttccattgagccagtatcattcagcgtattaatggttttctgaataacctgcttgtactgacgctcatccagctcacgttctttgccgcaaccaataaggagaattcgctcggaaagtacattcggaacatggtgcagcaacaatgtctgccccggttttccttccagttcgccccgacgtagcagggcgctgatgtacccatcgctgattttatcgagctgttctgcaatcggagaaaggcgacgtggttcgaagacgcccacgacgatgcaggcactccgctgtttctccgggctaccgctttttacactaaactccatgcactacgctcctgaatcttaaagacaacggcggtggctacagatagaattgcaagctttcgtaactcatgtccgctgttgcgatgacttcgtgttaatcttaacgttattacggcattggcacgtcagaacaaaatctgagaggtgaatccgttgagtataattatcttagcgacgatttcgacgactcaagagaataaatgacgtttaagccatgaaacaagctaaaatcctgcaaaagacgagtttttacgggcgtatttaaagtgataatcataagatatctggtgcgggagacgctcaaaagccagctggcgatactcttcatcttgcttttgatcttcttctgtcaaaagttagtgaggatcctcggcgcagcggttgacggcgatattccggcgaatctggtgctctcccttctcgggttgggcgtgccggaaatggcgcagcttatcctgccattaagcctgttcctcgggctgctgatgacgctgggcaaactgtataccgaaagtgaaattacggtaatgcatgcctgcggcctgagcaaagcggttctggtgaaagcggcaatgatccttgcggtattcacggcaatcgtcgcggcggttaacgtgatgtgggcgggaccgtggtcatcgcgtcatcaggatgaagtgttagcagaagcgaaagcgaaccctggcatggcggcgctggcgcaagggcaattccagcaagcgactaatggcagttcggtgctgttcatcgaaagcgttgacggcagcgatttcaaagatgtgttcctcgcgcaaattcgaccaaaaggtaatgcacgtccttctgtggtggtggccgattccggacatttaacccagctgcgcgacggctcccaggtcgtcactctcaaccagggaacgcgcttcgaaggcactgcactgttacgtgatttccgcattacggacttccaggattatcaggcgatcattggtcaccaggcggtggcgctcgacccgaacgataccgaccagatggacatgcgtacattgtggaacactgacaccgatcgtgcccgcgcagaactgaactggcgtatcacgttggtattcaccgtgtttatgatggcacttatggtcgtaccgctgagcgtggttaacccacgtcagggacgcgtactgtcgatgctgccagccatgctgctgtatctacttttcttcctgatccagacctccctgaaatcgaacggcggtaaaggtaagctggacccgacgctgtggatgtggaccgttaacctgatttatctggctttggcgattgttctcaacctttgggacaccgtgccggtccgccgcctgcgcgccagtttttcgcgtaaaggagcggtgtgatgcaaccttttggcgtacttgaccgctatatcggtaaaactattttcaccaccatcatgatgacgctgttcatgctggtgtcgctgtcgggcattatcaaatttgtcgatcagctgaaaaaagccgggcaggggagttacgacgcgttaggcgcaggaatgtataccttgctgagcgtgccgaaagatgtgcaaatcttcttcccgatggcggctctgcttggggcgttgcttggtcttgggatgctggcgcagcgcagcgaactggtggtgatgcaggcttctggttttacccgtatgcaggtggcgctgtcggtgatgaaaaccgccattccgctggtcttgctgacgatggcgattggcgaatgggtcgcgccgcagggcgaacagatggcgcgtaactaccgtgcgcaggcgatgtacggcggctcgttgctctctacccagcaaggcttatgggcgaaagatggcaacaacttcgtctacattgagcgggttaaaggtgacgaagagttaggtggcatcagcatttatgcctttaacgagaatcgtcgtctgcaatccgtacgctatgccgctaccgcgaagtttgacccggaacataaagtctggcgtctgtcgcaggttgatgaatctgatttgaccaatccgaaacagattaccggttcgcagacggtgagcggcacctggaaaaccaacctcacgccagacaaactgggcgtggtggcgctggacccggatgcactctcaatcagcggtttgcacaactacgtgaagtatctgaagtcgagtggtcaggatgccggacgttatcagctcaacatgtggagcaaaatcttccagccgctatccgtggcggtgatgatgctgatggcgctgtcgttcatctttggcccactgcgtagcgtaccgatgggcgtgcgtgtggtcaccggtatcagcttcggttttgtcttctacgtactggaccagatcttcggcccgctgacgttggtttacggcatcccgccgattatcggcgcactgttgccaagcgccagcttcttcttaatcagcctgtggctgttaatgagaaaatcgtaaccaagcaagggagcgaaagctccctttcacattgttgataaagtcaaatacgagttcgatcggtcccctcgcccctttggggagagggttagggtgagggggacagatcgcgcctgacttaccttcttctccccccagcaaactccccaacatcccgcgtacaatctgattcgtcacctggcgagcggcgcttttcgccattgtttgcaccacaccatctttcttcccgccgcgtggtccggtagtgccaaacaaaatatccttcaatccaccaagaataccgtcatccaccgccacctctttccctttcgtggggggattcttttgctgctcggtactggcctgaacgcctttttgcagcatctcataggcggactcgcggtccacgtcatcctcgtacttgccatacaccggggagtgattaatcaagccattacgctcatcttccgtcactggccccattcgcgaacaaggcgcgatcaccatcgctcgttccaccactgaaggacttccttttgcatcgagaaacgagattaacgcctcgccggtccccagttcctggattgccttttcggtatcaaatgccggattggcccgcatggtttgcgccgcagcttttaccgctttctgatctttgggcgtaaaagcccgcaaagcgtgctgaacgcgattaccgagctggccgagcacattatccggaatatcagacgggttttgcgaaacgaaccagacgcccacgccttttgagcgaataagccttatcacctgctcaatcttatccagcagtacctgcggggcatcgttaaacagcagatgtgcttcgtcgaagaaaaacaccagttttggtttctccagatcgcccgcttccggcaattgttcatacaactctgaaagcatccacagcaggctggcggcgtacagtttcggcatctgataaagcttctcggcgctgaggatattgataacgcctttaccgttggtatcggtgcgcatccagtctttgatatccagcatcggctcaccaaagaagtgtgctgcgccttgctgttccagcgacaatagcccgcgctggatggcaccaaccgatgtgctactgatatttccgtactgattctggaaggatttggcgttatcgccgatgtactgggtaatcgcccgcaaatctttaaagtcgagcagtaacagcccctgatcatcagcaatgcggaagatgatattcagcacgccagattgcacatcgttgagattcaacagccgcgccagcaacagcggccccagatccgaaaccgtcgcccgtaccgaatggcctttctcgccaaagatatcccacaccaccaccggattggcatgcggttgccagtcattgacgccgatatttttaagccttgtgagcagtttttccgacgccgttcctgcctgcgcgataccggtcagatcgcctttcacatcagccataaacaccggcacgccgatttccgacaatgactctgccagtttttgcagcgtaacggttttacccgtccccgttgcgccagtaatcagcccgtgacggttagccattcccggcagtaaaaacagttctgtgtctggcgtgcgggcaattaacaggggttcgctcatgagatttcctccagtttcctgcctggagtataggcaacgtccggcaaagagaatacgtgtaatgaagagaaaataacctaaagcgtgttgccttgataaatctgatacccgaggtcaacagtgttgtggttgtgatcgttatttttaattttgctcagcaacatttgggcggccatccgaccaatatcaaaacggggagtaattacgctggcgaggcttgggatcatttgcctgccaatctccagcccatgaaaacccgcaatggaaatttgttctggcacggcgaggtttcgctcgcggcacagcagaagcgcacccatcgcaatatcgtcattggtgcaaaatacaccgtctaaatccgggtttgcgctaagggcatcacgcattaactgcattcctaaatgaatggatgagatggcgcgtggattcatgcgtaatggggaaagattatgcagcatcatcgcatcgcaatacccctgataacgctgttcatcgcgggtgtcatctttggaaccgagatacagaattttgtgcctgactcgcttctccagcatggtacacaccatgtcaaaagcggcctgccgattatcaaaaccgacctccatatccagccgttctccctgtacatccatcaattccacgaccggaatggtggctgaacgcagaaatttcaccgtcctgatggtgtgatatttttccgaaagtataatcccgtcaatgttataagagagcaggttaatcaccgactcttcttcggaatcgcgatcgtaattgtaattagcaataagggtctgataattatgctcagaggtgacggattctattcccgcgagaatgtcagcgaagagttgattttgaaatgacggaatcaagataccaagggtataactttgtgcattcaacaacatgccgggagcgcgattagggatataattgatctcttccataattttggcgatgcgctcgcctgtttcctttgccacctttttcggcgagcggatataacgactcacggtcatttttgttacgccagccagcgtagcgatatcctgtaaagaaattctgtgattgcgcataacttctcccaacgtcgggggaatcttcaatcttcccccgaaactacatcacaatattttattctttcagtgcaatacggcgttaatggctaacacgcccagcaaacccataatagaaataagggtttccatcaccgtccaggtacgcaacgtttcaccaaccgtcagattaaaataccctttaaatagccagaagccagggtcgtttacgtgtgacgcgatcacgctgcccgcaccggttgccagtaccattaaagcgggatcggcatgggtaacgttgataatcggcaacaccacacccgcggtggtaatggccgcgacggtggcagagcccagagcgatacgcaacagcgccgcaacagtccagcacatcaataacggcgaaagcgtagttccggtcattaagtgtgaaatatagtgcccgacaccgctatctactaatacctgcttaaacgcgccgccgccagcgataataaacacaatcatcgcgatagcgcctatagaatccccaatgatatccatgatttgctcgatggtgcgtccattacgtcggcccagtgtgaaaatcgcaataacaatggcaataaacagcgcaacggcagggttaccgacaaattcaaagaagaggcgcacggtgttagttttcggtaacgtaatttcacaaacggcggcgatagccatcaggatgaccgggatcacggcagcgaaaatactgttccagaaggagggcatctcctcttcgctaaacagatgaggattaaataagccttccggtggtgctttctcaaagcgagttagcagtttagaaaacagcggtcctgcgacaataactgtcggaatggtaatgataaatccatacagtaaagtcgttccgagattagcctcaaagatagtcgcgatggcagtaggccctggatgtggcggcagaaaacagtgggttacagagagtgctgctaccattggtacgccaacatacaacaggggtaatcctgatgatgctacgatggtaaataccaacggcaacagcaggacaaaacccacttcaaaaaacatggcgaggcccacaaccagaccggtgatcactagcgcccattgcacgcgttttttaccaaaagtagcaatcagcgtagtggcgatacgttgtgccgcacccgtatcagaaatcagcttgcctaacatggccccgaaaccgagaatcattgccagcccgccgagcgtgctgccgataccattttgtatagagtgcaggacggcctgtgcatccatcccttcggcaaatccgacgacggcagctaccagaacgagggcaataaagccgttaactttaaagccgatcatcaggataagaagcagcgcgacgcctgccgcaataatgattaatggcatagtctttatctcttattagtgccagaaaagcagcgctttcgcgctgcacgtagggtagtaggtgttaaacagccactaacatgccgccatcaacaaacaacaggtggccgtttacgaaatcagaggcttttgaagaaaggaacaccgcagcaccaatcagttcctgcggatctccccagcgtgcggcgggggtccgtttgcacaaccaggcggtgaaggcttcgtcctcaaccagtgctttagtcatttctgttttgaaatagcccggcgcaataccgttgacctgaatattgtggcgcgccagctcgacgcacatgccgcgggtgagcatttttaccgcccctttcgatgcggcataaggggtgatggtgtcacgtcccagttcgctttgcatcgagcaaatattaataactttacctgccttgcgttcaaccatgtgacgagttaccgcttgcgataccaggaacacggcggtctggtttactgcgatcacatcattccactcttgttcagggaactcagtaaaaggatgacggcgctggataccggcgttattcaccagcacatcaatggggccgatgtccttttcgatatgttcaacggcggcatcaatttcatgtttatgagtaacattaaaaggtgcggcaacggcctgaataccctcctggtggagtttttctacagcaagttctgcgcgttcggcagtaatatcattaataattatttgtgcgccatatttacccaggccggttgccagtaaaaagccaatgccctgtgctgaaccggtaatcaagatattttttcctgccagtgaaaatagatcgttcattgtattattcctttatttatctcttagaaaacaagctggacttttgctgcctgggttttatcaccggcgaaacgtagcgcctcttccaggtcagtgaagggatattcagcactcagtaaaggcagtggattgataacgccattcgccagccatgacactgcggtattaaattcgctggtaaaacggaaagagcctctgagtgaaatctccttaccaatcaacgtcatcattgggaattctgccatcgcgcctcccatacctacctgcaccattacgccgcgtgcacgagtgacctccagacaggtattcactgatgaaggatgaccggacacttcaaagctgacatcgaaatagcctttttccgctttccagtgatccatgtcgtcgttttgtgggtttacgagcacatccgcccccatctctttgcccagcgaaagggaacggggactcacatcagcacagacaatttccgcggcccccagtgttttcactgcactgacaatcaggcagccaatgggtccaacaccggaaataaatactcgcttgccctgtaactcgccggcctgatgtgcggcatgaatcgcgacggctaaaggttcggcaaaagccataaccttttcgtcagctttggccggataagggacacattgcgacgtttcgaccattttataacgggtaaaaccaccatcaacatgagggaaatacatggcactgccaaaaaaacgcatctctgtacactgattctcgttatgttcaatgcagtatttgcagtgaccgcacggtttagacggattaatggctaccgtttgcccttcatgtaattctgatgagtcgctatgaataactttaccgataacttcatgacctaacaccatcggtgcctttatcatgaaattacctacttttccttcctgataataatgtaaatcggaaccgcaaattccacctcgggttatttgtactaatgttccattattattccaatctatcgtctgctcggtaacggcaacagttttcttgcccgcaacaacgcaggactgtgttttcacttgcataaattcctcactggtcaggtagacacctcggaagcatttaagcggttttaattgtcattatttgtgatgaagatcacgtcagaaaattgttacattactatgttacgcataacgtgatgtgccttgtaattcttatcagcagaaataaaaaaacgtgaaattattatgccaccaggcgtagtatcgcagcaggtaagatgattcaggagattttaaatggcgggtgaaagctttattttgatgggcgtttcagggagtggtaaaacattaattggtagcaaggttgccgcgttattatctgctaaatttattgatggtgacgatcttcatccagccaaaaatatagataaaatgtcgcagggtattccattatctgatgaagatcgacttccctggctggaacgcttaaatgatgcttcatacagtctttataaaaagaatgaaacaggatttattgtctgttcatcattaaaaaaacattatcgtgatattttacgcaagggtagcccccatgttcatttcctctggttagatggcgactatgaaactattctcgcgcgaatgcagcgtcgggctgggcattttatgccggtagcgttactaaaaagtcagtttgaggcactggagcgtccacaagaagatgaacaggatattgtgcgcattgatatcaaccatgatattgccaatgtcactgaacaatgtcggcaggctgtgctggcgatacgacaaaacagaatatgtgcgaaagagggcagcgcctcagatcagcgctgcgaatgattttcaaaaatcggctttcaacaccacgcggtaacgcgccttaccgtcgcgcacatgctggatggcgtcgttaattttcgacatcgggaacaattcggtagtcggcgcaaccttgctgcgggcggcaaaacgcatcagcttacgcaactcataaggcgtgccagtagcagagccagagacactgcgatcgcccgcaattaacgtaaaggccggaacagacagcggcgtgagaaccgcaccgaccgtatggaaattaccgccatacgtcagcgcctcaaaataaggctgccagtcgaggctgacgttcacagtattgataatgagatcaaactgccccgccagagttttcagtgcctgcggatcgcggctattcaccactttatcggcacccatcgccagtacttcctgctctttcgccggatttgaactaaaggctgtcacctcgcatcccattgcgtgcagaagttttatagcgatatgccccagcccgccaataccaattaccccaacgcggctggtagcagtgatatggtgcatcaatagtggtttaaagaccgtgataccgccgcacaacagcggcccggcggactcgatatcaatattttctggcagtggaatcacccattgccagtccgcacgcaacttctcggcaaagccaccgcgattcataatcgtcggcaccgcaccttgctcgcagttgatctgattaccgctaatacaggcgtcgcagtgaccacagctacgcgccgtccagccaatcccgacacgctgaccgacctgcaaacctttatcctgcgcggcgctcccgagtgccaccacgcgcccaatcacctcatgcccggcaaccagcggatactgtgaaaatccccattcgttatcgatcatcgacagatcggaatggcagatcccgcagtaatccacctgcacttcaatatcttgtggcttcagctcaccgggatcgtactcataaacttccagttcgccgcccgcttcttttgcggcatagctttttatcatcgacattttttggtccttctctggtgttgtctgggaagtgtagagcatggcagggcggggtgcctggagtgtgacaaaggttacacatcgcggtatgcaatgctgaaaatttcagcacttagcgaggtgcgagcaagctggcgcttgcatggtggtgcgtgacaggtataattcacaacgttttccgcatacctcttcagtgccgaagtggcgaaatcggtagacgcagttgattcaaaatcaaccgtagaaatacgtgccggttcgagtccggccttcggcaccaaaaacgattgcgataatcgtaaaacctacaacaatcaatacgttgtacaat

SEQ ID NO: 609 - DNA, 1220 bp, Escherichia coli
  modified_base (4)..(4): a, c, t, g, unknown or other
  modified_base (6)..(6): a, c, t, g, unknown or other
  modified_base (1015)..(1015): a, c, t, g, unknown or other
tttnancgcaacatactgscctgatgwaycassccgggcaacccgaaaacatctttccacccggcattgtccgccagcacttatcaccgaccaggtctgttgcagtaaatccaccagttgcgcacattcttcatcagccatgacgccgactcgcggatggcaaatactcgtctggctgagcagcaacagacatcgtatctgtgctccttcatgttgttcccgcaaccagcgtaataccaccggcgctgatgggctgaccgtgtgattatgctccgtaatacgttcgtgtacccgtcggtgaaaggaactacaaaatgtctgaatctgttgaccatagattcctccttctgccgaatagagcgtgaagtgaaatgccaacagatttggccagtggtccaccgcctgctgaacaaaacgccggatttcccccggctctgaaattaaggcttcggttatttgcacgaaatgttccttttcaacccctgttgaattttgtcaagccggtgcagacacaagtaaagcgcgcatcggcaccggtgtaatgccagttctaatcaataagaatggaatgacgaatcagtcaggaagggataacaacccgctgctgaacggaaggtatcagcaggaagatgaacgggaatatcgccagcaccaagggacagggcygrkttccrcaatrccagcgtaccggcattacaacacgtttcatgctgctgccccccaggattcctcgattcgttgctacttccactgctccacttcacttttgtaccagcggctgctgcgccccagtttgatgggtttagggaaatggccttcactgatcaacttgtaaaaccatttgtcggtcataccggtgaaactggtgatatagttcatgtcgatcagggaattatcggcacgcagaaatacgctgtcgtggcttgttgtagtcaacatggtcagaatgtcctgtgagatttatgaagattgtgcgaatgcggggaatcstactgagcygtrytytcagaactgngmctgcctgttmcgggataccagggattaccggcggggtaacgggcttccggatcatacacaccacgattatcgcggacaaaatcactgaacgcccatatcacctctttaagtatgtcttcgcagtccggtaaatgacgatccagcgccacatcccggggggtacagctttgatgcgcccggtgacacaaagcccggattgttcc

SEQ ID NO: 610 - DNA, 912 bp, Escherichia coli
  modified_base (885)..(885): a, c, t, g, unknown or other
  modified_base (887)..(888): a, c, t, g, unknown or other
  modified_base (894)..(894): a, c, t, g, unknown or other
  modified_base (899)..(899): a, c, t, g, unknown or other
  modified_base (904)..(905): a, c, t, g, unknown or other
  modified_base (912)..(912): a, c, t, g, unknown or other
cgaataacgctcagtttgttctgtcaaaggaggaaggcggcaggctagtcgtcgttcagttagttgaaaactaactgtcacgaacggtgcaatagtgatccacacccaacgcctgaaatcagatccagggggtaatctgctctcctgattcagaagagtttatggtcacttttgagacagttatggaaattaaaatcctgcacaagcagggaatgagtagccgggcgattgccagagaactggggatctcccgcaataccgttaaacgttatttgcaggcaaaatctgagccgccaaaatatacgccgcgacctgctgttgcttcactcctggatgaataccgggattatattcgtcaacgcatcgccgatgctcatccttacaaaatcccggcaacggtaatcgctcgcgagatcagagaccagggatatcgtggcggaatgaccattctcagggcattcattcgttctctctcggttcctcaggagcaggagcctgccgttcggttcgaaactgaacccggacgacagatgcaggttgactggggcactatgcgtaatggtcgctcaccgcttcacgtgttcgttgctgttctcggatacagccgaatgctgtacatcgaattcactgacaatatgcgttatgacacgctggagacctgccatcgtaatgcgttccgcttctttggtggtgtgccgcgcgaagtgttgtatgacaatatgaaaactgtggttctgcaacgtgacgcatatcagaccggtcagcaccggttccatccttcgctgtggcagttcggcaaggagatgggcttctctccccgactgtgtcgccccttcagggcacagactaaaggtaaggtggaacggatggtgcagtacacccgtnanngttttnacatnccacnnatgactn

SEQ ID NO: 611 - DNA, 40 bp, Escherichia coli
  modified_base (1)..(2): a, c, t, g, unknown or other
  modified_base (15)..(19): a, c, t, g, unknown or other
  modified_base (21)..(24): a, c, t, g, unknown or other
  modified_base (30)..(32): a, c, t, g, unknown or other
nnactgtcgatgttnnnnnannnnaccgcnnnggtctgcg

SEQ ID NO: 612 - DNA, 65 bp, Escherichia coli
  modified_base (5)..(5): a, c, t, g, unknown or other
  modified_base (27)..(27): a, c, t, g, unknown or other
  modified_base (31)..(34): a, c, t, g, unknown or other
  modified_base (36)..(36): a, c, t, g, unknown or other
  modified_base (38)..(38): a, c, t, g, unknown or other
  modified_base (44)..(47): a, c, t, g, unknown or other
  modified_base (52)..(57): a, c, t, g, unknown or other
  modified_base (63)..(65): a, c, t, g, unknown or other
atgcnatgaacggtaaccgcgctgaantgannnngnangctgcnnnnattgnnnnnngtctgnnn

SEQ ID NO: 613 - DNA, 28 bp, Escherichia coli
  modified_base (3)..(7): a, c, t, g, unknown or other
  modified_base (12)..(12): a, c, t, g, unknown or other
  modified_base (20)..(20): a, c, t, g, unknown or other
  modified_base (22)..(22): a, c, t, g, unknown or other
ggnnnnncgccntgcaacancnggaatg

SEQ ID NO: 614 - DNA, 343 bp, Escherichia coli
  modified_base (1)..(9): a, c, t, g, unknown or other
  modified_base (13)..(15): a, c, t, g, unknown or other
  modified_base (19)..(19): a, c, t, g, unknown or other
  modified_base (22)..(24): a, c, t, g, unknown or other
  modified_base (148)..(148): a, c, t, g, unknown or other
  modified_base (152)..(152): a, c, t, g, unknown or other
nnnnnnnnngtgnnntggntgnnnttgcagaacgccgtaaggacagttttggtccgtatgtccggctgatgagcgtcaccctgaactgagtctggaagggcattcagaagagcagaattatcgccaccaccggaccattcttaaccantttnctgtgaggattttatcgtgtcagacacactccccgggacaacgcttcccgacgacaataacgaccgcccctggtgggggctgccctgcaccgtgacgccctgttttggggcacgtctggtgcaggagggtaaccggttgcattaccttgcagaccgcgccggtatcagaggccggttcagcgacgcggatg

SEQ ID NO: 615 - DNA, 162 bp, Escherichia coli
tgtaccgagaactctgtaacatccgctcccatttttcgttggcctttgtcaaagttccggctcaggatattgggcgcagatcacttatttggtggacaccactttgtcggatgcgtcagattctgaccagacggttcaggctgtacgcttacaaacaactag

SEQ ID NO: 616 - DNA, 181 bp, Escherichia coli
taccctgcagatgcaaacgattttttttttcgggcctctttctctgccgggtcaagccaggtgcatcgcagcaggattttctcagcgacagtcatctggtcatgttcaaaccacggtggttgtccgtcattgccccgctgaagtgttaacgggcatccacaggacacacagcacaaaacgt

SEQ ID NO: 617 - DNA, 375 bp, Escherichia coli
gcagtaccgcttccccataataatcgtggtgacattgtctgcagtgccagctggctttacgcaccacgggtaaggcatccggtacgaattgctgcagacgtttaatcaactgtatttctctgcgctccggcctgacataagggcactgttgaccgtgctctgtcagcctgtcgtcagtgtgttcaaaccagggaagttcagtgtcgtattgcggatggtatctgagtgcactgccacacaagtggcaggtgtagttagcataaggtgcggcctgtgcagtacgggcgccccgtcagacgtccgttgcccatcaagagcgataaaggattttgcgtacatagtcattaattcctcagccgcccagacgacacgcca

SEQ ID NO: 618 - DNA, 87 bp, Escherichia coli
  modified_base (1)..(2): a, c, t, g, unknown or other
  modified_base (4)..(4): a, c, t, g, unknown or other
  modified_base (10)..(11): a, c, t, g, unknown or other
  modified_base (17)..(31): a, c, t, g, unknown or other
  modified_base (41)..(44): a, c, t, g, unknown or other
  modified_base (48)..(50): a, c, t, g, unknown or other
  modified_base (57)..(59): a, c, t, g, unknown or other
  modified_base (61)..(61): a, c, t, g, unknown or other
  modified_base (65)..(66): a, c, t, g, unknown or other
  modified_base (80)..(80): a, c, t, g, unknown or other
  modified_base (83)..(83): a, c, t, g, unknown or other
nnancgccgnncaggcnnnnnnnnnnnnnnncgtggcatgnnnnccgnnntccactnnnanggcnntgcaccacgcctgnttnatca

SEQ ID NO: 619 - DNA, 244 bp, Escherichia coli
gatatcacagctgcgtccgttgctgccggtacatccgggaaacgcaggtcaacccgcaatgccgtcaggcggggatgaacattcagtgcgtgccgcaccgtctcacgaatacgttgctgccagaaggggttgtatttgtaggtcatggttaaatctccgtatggttcatacggaatagccacgtcgtaaaaaatgcgcagaagtccctgaagtgaccctccggcaggacactgtctcaggcact

SEQ ID NO: 620 - DNA, 56 bp, Escherichia coli
  modified_base (1)..(1): a, c, t, g, unknown or other
  modified_base (6)..(13): a, c, t, g, unknown or other
  modified_base (17)..(17): a, c, t, g, unknown or other
  modified_base (28)..(28): a, c, t, g, unknown or other
  modified_base (31)..(33): a, c, t, g, unknown or other
ncagannnnnnnnagtnacctccggcangannntgtctcaggcactctgtgataac

SEQ ID NO: 621 - DNA, 36 bp, Escherichia coli
  modified_base (5)..(5): a, c, t, g, unknown or other
  modified_base (9)..(9): a, c, t, g, unknown or other
  modified_base (11)..(11): a, c, t, g, unknown or other
  modified_base (25)..(25): a, c, t, g, unknown or other
  modified_base (27)..(27): a, c, t, g, unknown or other
  modified_base (31)..(32): a, c, t, g, unknown or other
  modified_base (34)..(34): a, c, t, g, unknown or other
  modified_base (36)..(36): a, c, t, g, unknown or other
cgggnatcngnacgcaccgcaacancngggnnantn

SEQ ID NO: 622 - DNA, 29 bp, Escherichia coli
  modified_base (8)..(10): a, c, t, g, unknown or other
  modified_base (12)..(12): a, c, t, g, unknown or other
  modified_base (20)..(20): a, c, t, g, unknown or other
gtcaagannnanttctcagnccctcactc

SEQ ID NO: 623 - DNA, 49 bp, Escherichia coli
  modified_base (16)..(16): a, c, t, g, unknown or other
  modified_base (23)..(24): a, c, t, g, unknown or other
  modified_base (28)..(28): a, c, t, g, unknown or other
  modified_base (33)..(35): a, c, t, g, unknown or other
  modified_base (38)..(44): a, c, t, g, unknown or other
  modified_base (46)..(49): a, c, t, g, unknown or other
caattatcagaacgcntgcttcnntccntgtcnnnacnnnnnnnannnn

SEQ ID NO: 624 - DNA, 90140 bp, Escherichia coli
  modified_base (1)..(2704): a, c, t, g, unknown or other
nnnnnnnnnnnnnnnnnnnnnnnnnnnnnnnnnnnnnnnnnnnnnnnnnnnnnnnnnnnnnnnnnnnnnnnnnnnnnnnnnnnnnnnnnnnnnnnnnnnnnnnnnnnnnnnnnnnnnnnnnnnnnnnnnnnnnnnnnnnnnnnnnnnnnnnnnnnnnnnnnnnnnnnnnnnnnnnnnnnnnnnnnnnnnnnnnnnnnnnnnnnnnnnnnnnnnnnnnnnnnnnnnnnnnnnnnnnnnnnnnnnnnnnnnnnnnnnnnnnnnnnnnnnnnnnnnnnnnnnnnnnnnnnnnnnnnnnnnnnnnnnnnnnnnnnnnnnnnnnnnnnnnnnnnnnnnnnnnnnnnnnnnnnnnnnnnnnnnnnnnnnnnnnnnnnnnnnnnnnnnnnnnnnnnnnnnnnnnnnnnnnnnnnnnnnnnnnnnnnnnnnnnnnnnnnnnnnnnnnnnnnnnnnnnnnnnnnnnnnnnnnnnnnnnnnnnnnnnnnnnnnnnnnnnnnnnnnnnnnnnnnnnnnnnnnnnnnnnnnnnnnnnnnnnnnnnnnnnnnnnnnnnnnnnnnnnnnnnnnnnnnnnnnnnnnnnnnnnnnnnnnnnnnnnnnnnnnnnnnnnnnnnnnnnnnnnnnnnnnnnnnnnnnnnnnnnnnnnnnnnnnnnnnnnnnnnnnnnnnnnnnnnnnnnnnnnnnnnnnnnnnnnnnnnnnnnnnnnnnnnnnnnnnnnnnnnnnnnnnnnnnnnnnnnnnnnnnnnnnnnnnnnnnnnnnnnnnnnnnnnnnnnnnnnnnnnnnnnnnnnnnnnnnnnnnnnnnnnnnnnnnnnnnnnnnnnnnnnnnnnnnnnnnnnnnnnnnnnnnnnnnnnnnnnnnnnnnnnnnnnnnnnnnnnnnnnnnnnnnnnnnnnnnnnnnnnnnnnnnnnnnnnnnnnnnnnnnnnnnnnnnnnnnnnnnnnnnnnnnnnnnnnnnnnnnnnnnnnnnnnnnnnnnnnnnnnnnnnnnnnnnnnnnnnnnnnnnnnnnnnnnnnnnnnnnnnnnnnnnnnnnnnnnnnnnnnnnnnnnnnnnnnnnnnnnnnnnnnnnnnnnnnnnnnnnnnnnnnnnnnnnnnnnnnnnnnnnnnnnnnnnnnnnnnnnnnnnnnnnnnnnnnnnnnnnnnnnnnnnnnnnnnnnnnnnnnnnnnnnnnnnnnnnnnnnnnnnnnnnnnnnnnnnnnnnnnnnnnnnnnnnnnnnnnnnnnnnnnnnnnnnnnnnnnnnnnnnnnnnnnnnnnnnnnnnnnnnnnnnnnnnnnnnnnnnnnnnnnnnnnnnnnnnnnnnnnnnnnnnnnnnnnnnnnnnnnnnnnnnnnnnnnnnnnnnnnnnnnnnnnnnnnnnnnnnnnnnnnnnnnnnnnnnnnnnnnnnnnnnnnnnnnnnnnnnnnnnnnnnnnnnnnnnnnnnnnnnnnnnnnnnnnnnnnnnnnnnnnnnnnnnnnnnnnnnnnnnnnnnnnnnnnnnnnnnnnnnnnnnnnnnnnnnnnnnnnnnnnnnnnnnnnnnnnnnnnnnnnnnnnnnnnnnnnnnnnnnnnnnnnnnnnnnnnnnnnnnnnnnnnnnnnnnnnnnnnnnnnnnnnnnnnnnnnnnnnnnnnnnnnnnnnnnnnnnnnnnnnnnnnnnnnnnnnnnnnnnnnnnnnnnnnnnnnnnnnnnnnnnnnnnnnnnnnnnnnnnnnnnnnnnnnnnnnnnnnnnnnnnnnnnnnnnnnnnnnnnnnnnnnnnnnnnnnnnnnnnnnnnnnnnnnnnnnnnnnnnnnnnnnnnnnnnnnnnnnnnnnnnnnnnnnnnnnnnnnnnnnnnnnnnnnnnnnnnnnnnnnnnnnnnnnnnnnnnnnnnnnnnnnnnnnnnnnnnnnnnnnnnnnnnnnnnnnnnnnnnnnnnnnnnnnnnnnnnnnnnnnnnnnnnnnnnnnnnnnnnnnnnnnnnnnnnnnnnnnnnnnnnnnnnnnnnnnnnnnnnnnnnnnnnnnnnnnnnnnnnnnnnnnnnnnnnnnnnnnnnnnnnnnnnnnnnnnnnnnnnnnnnnnnnnnnnnnnnnnnnnnnnnnnnnnnnnnnnnnnnnnnnnnnnnnnnnnnnnnnnnnnnnnnnnnnnnnnnnnnnnnnnnnnnnnnnnnnnnnnnnnnnnnnnnnnnnnnnnnnnnnnnnnnnnnnnnnnnnnnnnnnnnnnnnnnnnnnnnnnnnnnnnnnnnnnnnnnnnnnnnnnnnnnnnnnnnnnnnnnnnnnnnnnnnnnnnnnnnnnnnnnnnnnnnnnnnnnnnnnnnnnnnnnnnnnnnnnnnnnnnnnnnnnnnnnnnnnnnnnnnnnnnnnnnnnnnnnnnnnnnnnnnnnnnnnnnnnnnnnnnnnnnnnnnnnnnnnnnnnnnnnnnnnnnnnnnnnnnnnnnnnnnnnnnnnnnnnnnnnnnnnnnnnnnnnnnnnnnnnnnnnnnnnnnnnnnnnnnnnnnnnnnnnnnnnnnnnnnnnnnnnnnnnnnnnnnnnnnnnnnnnnnnnnnnnnnnnnnnnnnnnnnnnnnnnnnnnnnnnnnnnnnnnnnnnnnnnnnnnnnnnnnnnnnnnnnnnnnnnnnnnnnnnnnnnnnnnnnnnnnnnnnnnnnnnnnnnnnnnnnnnnnnnnnnnnnnnnnnnnnnnnnnnnnnnnnnnnnnnnnnnnnnnnnnnnnnnnnnnnnnnnnnnnnnnnnnnnnnnnnnnnnnnnnnnnnnnnnnnnnnnnnnnnntttrrcgccgcagggamagrrtttggtggamsacgtaggttatgtcccgatgtataaggtaatgactccaacttattgatagtgttttatgttcagataatgcccgatgactttgtcatgcagctccaccgattttgagaacgacagcgacttccgtcccagccgtgccaggtgctgcctcagattcaggttatgccgctcaattcgctgcgtatatcgcttgctgattacgtgcagctttcccttcaggcgggattcatacagcggccagccatccgtcatccatatcaccacgtcaaagggtgacagcaggctcataagacgccccagcgtcgccatagtgcgttcaccgaatacgtgcgcaacaaccgtcttccgaagcctgtcatacgcgtaaaacagccagcgctggcgcgatttagccccgacrtakccccayygttcgtccatttccgcgcagacgatgacgtcactgcccggctgtatgcgcgaggttaccgactgcggcctgagttttttaagtgacgtaaaatcgtgttgaggccaacgcccataatgcgggcagttgcccggcatccaacgccattcatggccatatcaatgattttctggtgcgtaccgggttgagaagcggtgtaagtgaactgcagttgccatgttttacggcagtgagagcagagatagcgctgatgtccggcagtgcttttgccgttacgcacccccccgtcagtagctgaacaggagggacagctgatagaaacagaagccactggagcacctcaaaacaccatcatacactaaatcagtaagttggcagcatcacccagttgatgcgcaacggtacgattattccagcgaataacacggtatcgttaggagcagtagggacttcggcggtaagtctgggattaacggcaaattacgcacgtaccggagggcaggtgactgcagggaatgtgcaatcgattattggcgtgacttttgtttatcaataaagaaatcacagggcattgctaatgcaggtacgcaatattacctgaagctaaaaacctgcacgttagccctttgtaggccagataagacgcgtcagcgtcgcatctggcataaacaaagcgcactttgccgacaatccgaacagagctcgccattggcaggctctggtgttcttttacgctaccatgctaataatcaacacaataatcagcccaaccacggagttgaccagctccagcagtccccaggttttcaacgtgtcttttaccgacaggtcaaagtaacctttgaacagccagaatgaggcatcattaatgtgggtgagggtgttggaacccgcagccgtcgccagcaccagcagcgccggattcacgccaaccagctgaccggttgctggatcaaggattgcagcactgataatcccggcggcggtcatcgccgaaacgacaccctgacccgtcgccagacgaattagcacagtgatcagccatgccataatgtagggcgagatattgccgtgggacatcaacatgccgatggtgtcgccaatgccggtgtcgatgatagtttgcttcaacacgccacccgcaccgatgatcagaatcaccattgcaatgcttttcaccgcactttcaaaagcgttcatcacccactgcatgtcatgaccacgtgcggtgccaaagagtacgaatgcaaccaccatcgcaataaacattgcaatcggcgaggaaccgataaagttaaccacttcccaggcaggggtatcttttaccagccagatattggcgatggtggtggagatcataatgatcgccgggatcagcggcaccagaatcgaaacgccgaaagagggcagattgttcatatctaccggttgatctgctttcaggaatgatggcgttgggcgctcaagattgccgaggaacttcggcaggatcagacctgcgcagattacacttgggatcgtcaccagtacgccatagatataaaccatccccatatctgcgccataagcattcaccagcgccacaggacccggctgcggtgggaacagtgaatgtgcggtagtggcagctgctactgccgggatcgccagtttcaggaacggaattttagcttcggcggcaatgacaataaccagcggcgctaacatgataaaggccacttcatagaacatcgccagaccaaaaatcaggccgatgataatcaccgacagctgtacatagcgcagaccgagacgcgccagcagcgtatgtgctatctggtgagccgcgccggagtcgaccatcaatttaccgatgaccgcaccgaacaccacgatgatagccagttcccccagcgtgttgccgaagcccgctttcatggtgtgcagcagcgacatcaaatccatgcccgccagcatcccgacggacagcgccgccaccaacaaagccaccattgaattgattttgaacttcaaattcagtaccagcatcagaccaatgccgaataccacccagagaatgttaagcacatgcataacgttttaccttacctggttgaaccgttgttattttgggcgacatgttatgtaaattggtcaaccattgttgcgatgaatgtcacatcctctgatcaataaccatcgattaccctttgctgcaatttgcagcaacaaccaggagagtgaaattcttgtgatgtggttaaccaattttagaattcgggttgacatgtattaccaaaaggtagaacttatacgccatctcatccgatgcaacgccacggctgcggtctggttgttcatccggatacctaaacaactccagggttccgcgtctctttgctgtggaacccactatgtgaaagaggaaaaatcatggaacagacctggcgctggtacggcccaaacgatccggtttctttagctgatgtccgtcaggcgggcgcaactggcgtggttaccgcgctgcaccatatcccgaacggcgaagtatggtccgttgaagagatcctcaaacgcaaggcgatcgttgaagacgcaggcctggtatggtctgtcgtagaaagcgtgccaattcacgaagatatcaaaacccacactggcaactatgagcagtggatcgctaactatcagcagactctgcgcaacctggcgcagtgcggcattcgcaccgtgtgctacaacttcatgccggtgctcgactggacccgtactgacctcgaatacgtgctgccagacggctccaaagctctgcgctttgaccagatcgaattcgctgcattcgaaatgcatatcctgaaacgtccaggcgcggaagcggattacaccgaagaagaaattgctcaggcagctgttcgcttcgccactatgagcgacgaagacaaagcgcgtctgacccgtaacatcattgctggtcttccgggcgcggaagaagggtacaccctcgaccagttccgtaagcacctggagctatataaagatatcgacaaagccaaactgcgcgaaaactttgccgtcttcctgaaagcgattattccggttgccgaagaagttggcgtccgtatggctgttcacccggacgatccgccgcgcccgatcctcggcctgccgcgcattgtttccaccattgaagatatgcagtggatggttgataccgtaaacagcatggcgaacggtttcaccatgtgcaccggttcctacggcgtgcgtgctgacaacgatctggttgatatgatcaagcagttcggtccgcgtatttacttcacccatctgcgctccaccatgcgtgaagataacccgaaaaccttccacgaagcggcgcacctgaacggtgacgttgatatgtacgaagtggtgaaagcgattgttgaagaagaacaccgtcgtaaagcggaaggcaaagaagacctgatcccgatgcgtccggaccacggtcatcagatgctggacgacctgaagaagaaaaccaacccaggttactccgcaattggtcgtctgaaaggcctggccgaagttcgcggtgtcgaactggcgatccagcgcgctttctttagccgttaatatccaccggcatggctgcgcgccgtgccggttccttcttccttgccgtcactctctgaagacggattctggagtttacgatgactactattgttgacagcaatctgccggttgcccgcccgtcatgggagcattctcgtctggaatcacgcattgtgcatctcggttgcggggcgtttcaccgcgcgcaccaggcgctgtatacccatcatctgctggaaagcaccgacagcgactggggtatctgcgaagttaacctgatgccaggtaacgaccgtgtgctgattgaaaacctgaaaaaacagcaactgctgtacaccgtggcggaaaaaggcgcggaaagcaccgaactgaaaattatcggttcgatgaaagaagcgctgcatccggaaatcgacggctgcgaaggtattctcaacgcgatggcgcgtccgcagacggcgattgtctctctgacggtcacggaaaaaggctactgcgctgatgcggcaagcggtcagttggatctcaataacccgctgatcaagcacgatctggaaaacccgactgcgccgaagtctgcgattggttacatcgtcgaagccctgcgtctgcgtcgtgaaaaagggctgaaagcgtttacggtgatgtcctgcgataacgtgcgtgaaaacggtcatgtggcgaaggtcgcggtactggggctggctcaggcgcgtgacccgcagctggcggcatggattgaagagaacgtcaccttcccgtgcaccatggttgaccgcatcgttccggcggcgacgccagaaaccttacaggaaattgctgaccagctgggtgtttatgacccgtgcgccattgcctgcgaaccgttccgtcagtgggtgattgaagataacttcgttaatggtcgtccggactgggataaagtgggcgcacagttcgttgcagacgttgtgccgttcgaaatgatgaagctgcgtatgctgaacggcagccactctttcctggcatatctcggttacctcggcggctatgaaactattgccgacaccatgactaacccggattatcgcaaagcggcctttgccctgatgatgcaggaacaagcgccaacgctgtcgatgccggaaggtacggacctgaacgcctatgcgacgctgctgatcgagcgtttcagcaacccgtctctgcgtcaccgtacctggcagattgcgatggacggcagccagaagttaccgcagcgtctgctggatccggtgcgtctgcacctgcaaaacggcggcagctggcgtcacctggcgctgggcgtggctggctggatgcgttacacccagggcgtggatgagcagggtaatgccattgacgtggtcgacccgatgctggccgagttccagaagattaacgcgcagtatcagggcgcagaccgcgtgaaagcgctgctgggcctgagcggtatttttgccgatgatctgccgcagaatgccgactttgttggcgcggtgacggcggcatatcagcagctgtgcgaacgcggcgcgcgcgagtgtgtggctgcgctgtaactaactgattaccctacagacttactggtcaatcaaactgatatttggttgaccagttttcgtttttttgcccacctgtacgtgccaacttccagtgctaatggtatagtttgagattaacgggtgccgtaaaattgcccgttgtaggccggataaggcgttcacgccgcatccggcaaaaatttgattaaccgcacctaacggacacaacaccatgaaatctgccacctctgcgcaaagaccttaccaggaagtcggggcgatgatccgcgatctgatcataaagacgccgtacaatcctggcgaacggttgccgccggagcgtgaaattgcagaaatgcttgatgtcacgcggacggtggtacgtgaagcgctgatcatgctggagatcaaagggctggtggaagtgcgccggggtgccggtatctatgttcttgatagctcaggcagccacaacacagacagtccggatgccaacgtttgcaatgatgcgggtccttttgagctgttgcaggcgcgacagcttcttgagagcaacatcgccgagtttgccgccctgcaggctacccgcgaagatatcgtcaaaatgcgtcaggcattgcaactggaagagcgtgaactggcttccagtgcgccgggcagcagcgaaagcggtgacatgcagttccatctcgctattgccgaagcaacgcataacagcatgctggtggagctgttccgtcagtcctggcagtggcgggaaaacaatccaatgtggatccagttgcacagccatctggatgacagcctgtatcgcaaagagtggttgggcgatcacaaacagatcctcgccgcgttaatcaaaaaagatgcccgagcggcgaagctggcaatgtggcagcatctggaaaacgttaagcaacgtctgctggaattctcgaacgttgacgatatttattttgatggctatctgtttgattcatggccgctggataaagtcgacgcctgacttattataataagcgcaagggtaaacgttccttgcgctttcttaaattaagaagtcgcaatgagtattactttgtaaattgcaggggattgtttagctatctgtataacctgaatgttagtactcattcttcctggtagttatttaccaatataattccattcaccattttttaattcaaacagttctggaagagatgacggttgcagagtcatacgtttgagtggtgcattttcatcacccgggataactttatatcccatttttgcatggatctccgcggtaccgggataggcttctataccaattattgggtcattacccaactcaatattagcattaagtaatgcggcaagagcgaatccggaagaatttgctacccctgttaccgtcattatctgatcaatatagatatcaatccttggctgctcattggtccatctttttgcctgagaagctggaagggttgaaatatatcctatcgtggttccggcataactaggaacattgcaaccagggcctaatgttatttcatgaactgtatagtcctcaacaggatcgaaagggcttttcataaataaatttagccgtaatccttctgctaactctgtggcagtatgcgcctttttacatataccaccatatatttcgtctaaagctgaggtgattttcaagtttcgatagagcatacgtcctgttgttgtaataccattgaattctctgcatgtttctgtcacataattaaatggccaggactctttactaatatcaagttttctaatttcgacaacgctttttccatcgtaattatggttattgccacgagcaagaggcggaagatagatattttccgtatccatgcgtgcacgttcatgtttacgtgttaactcactgtcgacttttggatgatgaaggaagtgattatctgtaataatttgactctgaagggcattgcttaatggcatagacataatagttacctttatgagtatttcactgatgcttagaaaaatagataaatttttctgtagtaaaaagagaagtaaacaaatgacatgcatgtttctgttgtagtgatatcaactctacacagtgatattaaatggtgggaaacactctaaagtatcaaaaaacgctcatttaaaattatttgcatgcaatttaaaagcatatcttattactaattggaatttgatgttgctatattgatgtctatattaataatgcctgtgaatggtatttttgatgtatttgatatgttatcaatttatattatttacaaactaattgtttcaaataatacatggctgattatgcgaaaataaataatttcacaccggaattaagtagcggtggtgacaagtattttcatctacgtaactattcggaatattcagaatatactagcggttttttttgagtttgatgatttttatcaaatcatgactttttcctgaaaagtcagtagatattcataggcaagtaaggttttatactttgctgacaggattcaggcctgtctcagactgacatggatgtaatgaacaaaagggaatggctatggaaaatgagcatcaatacagtggtgcccggtgttcagggcaagccgcatatgttgctaaacgtcaggagtgcgcaaaatgatgcgccaatcacttcaggctgttttacctgaaatttcaggcaataaaacgtcaccgctgcgtaaatcagtatgcagcgatctcctcactctttttaattctcctcattcggcattaccgtcattacttgtttcaggcatgcccgagtggcaagtgcataacccgagcgacaaacatctccagagctggtattgccgtcagctgcgttctgcactgttatttcatgagccacggattgcagcgttgcaggttaatctgaaagaagcgtactgccacactctggcgatcagccttgagataatgctgtaccacgacgatgaatcgctaacgtttgatctggtctgggataatggcggttggcgcagtgcgacgctggagaatgtcagctaagcacaatctccagctcgcgcagttcacgccagaagcgttcggcaactggattcatgcgggtattcatccggtatgcataggcctgaatcgggatcaccagttcgtcccgattcagtacaacgagctgcccgctgcgaatttcttgttggatggcgtattccggtagccaggcaatcccacagccgtcgagggcaacctgctttaaaagctcgctcatcgaagagacaaaaaaggtgctgaaacttaactcactgtggcgcgtcagggtgcgattaatcaatcgccccatgtaggagttgcggctgtaattcagtaacggaaagtgtggctgcgcgaggttaaaaagtgcttctccgtgttcgtcactggcgcaaacggggaacaattgagattcaaataagcgaatgtggtcaaacggcgcttccagcaaatcttcgtcgtgaaaggaaaaaatacagtcactttgcccttcacgcagtttatcgaccgcttcatcgacatcaatagcttcaattgcccaggtaaagagcggcggcatctggctgataatggacggtaacagcccgagggaaagagagtgtgcagcggctattttaattttgcgttgcgcgtaatcgctgccaccacggagttctgcaaggttgctctctaactgttgcaacagatggcggatctgcgaatggaatattttaccttgttccgagagttgcagcggcgtcacctggcggttaaacaattcaacgccaatcgcctgttccagcgcacggatgcggcggctgaatgccggttgcgagacgttgcgactgactgctgcctgggaaaaattgcggcatttttccagggtcagaaaatcataaagccatttagtttcaatattatgcaaaaccgcaccacagtcatccattacgttttactctgtcagccgcccttgcgggcattctacgtccattcgggcggctgacaaccgtttatgccgtttcaaacgttcctttcacgcaggctttgccgtctttgaccatcagcttgccgcgagcgtatacctgctcaatgcgtaattctggcgtcatgaccagtaagtctgcgtcattgcctggcagaatttcgcctttcccgctcaggttaaggaaaccggctacgctactggtgagcgggcgcagggcatcgctgatactgaaatcataatctttgaccagcacctgcacggtttccagcaacgtttcaaaaccggcaacaccgatatgggttaaattcccttcgtcatcgaagaacggctggctaccgttgccgtcggagctgagggtgacgcgtgccagcggaatacccgcctgaacggcgcgggcaataccttcggcaggggcgactggttcgtcaatgctgctggtgatatcgatggtgccgcctttgcgcgcgaactccagcgcctgctcaaacaacggaacgttgcggttaacgtgggtcggcagcaacttgctattcggcacatcgcagttttccagcaggtcatagacaggctgtaacgcctttttgctgtcgcccatgtggaacacggtgacgccaggtttaccgccgagcaaaccgccaacgcgggattccgccgccatattagccaggtgataaacgtccggtgcggcagaacggtgatcagagatggcgcatttcacgccaatcacgcgatcgataatcgccacgtcttttccacggaacccgtaatagtgcgggaagggacatgataagcgccggtcagcatccaggcgctgatgccttcttcattgagcgcacgggtcttggcgagcagggattccgggtggcgagagatagagtcggtgcccagcagaccaaccactgacgtgacgcctgcttccgtcagacgacttaacgccacttccggcgtgcgcgtcgtgggacctgcttcgccgccaccgccaatcaaatggacgtgttgatcaataaaacctgggcagaggatctgcccgctgagatcgacaaccgtgcagtccggtacaatgtcaggagggatattactggcaacggcgataattttgccgttagcgacgaggacatcgcaaattccccgatcttccggcgcatacaaatgcgctccctgcagcagggtaaaaccggctgcggtataatcaatcatggtaactccttgttaaacaataagctgcataacccagatcgacagcaatgcgttaatcacgcagaccgtaatgatatgcgggtaatatttggcattcacttcggctgtccccaggcagcgaccgacattttgcaccgggttgcccattaaatacatcgcgggcagtaaaacggtgacatcgtggccggttaatgcgccagcggtcgccagactggcggcaacaccaactgcgccgcccatactcattaatgcggctaaaaggacggttgccgcttcacctggcaatccccacagcgccattaccggttcacagatatgccccacccagtcgagcaggccggtaattttcagcgcctgaatgatgacaaacgccatcaccacgtttggcagcaggttggtggtggcgatagtaaagccacggcgcgcgccatcgataaacatatccatgacgtttttgcggacctgagttgtcatgcttgcgctccttgcgttgggttgcgacgttcttcgaagttaagccagacgcgcaaaatgttggctccgacaaatttaaacaccaggatgacggctaaaggtacgattacggacgtgcccagaaaggcgaacaccgcgacgccggaagagaagtagttggtgatgatggcgctaccgctggtttgatatgcggcgaaaatcactttatcgcgttcggtaatttcaccttcctgcgccagctctttggtcataccggcggcggcatcagtgttttgcaggttagcgatcagcgccagcgagcagatccctggaatgcccaacaacggttttagcacaggtgtcattaactgctgcgcggcgcgtaatccaccaagaccatcggtaattgaaataatccccagagagagaatgactgacggtgccagctccagcgcaaagagaaagccatctttagcccccgcgccacccgccccgcgaaatgaggtggtggctccgttcgcaccaggcagttgcccaaacgatccgttcagaacggaaaaatcaaaaacgcgccaccagctgtctgttccggaaaaaacaccggaaaaaaagattatggtgagaaaaaaagccagataccctttaatgcccactttttctgtcgccagctccccggctacagcatccccttgttgtgtcataacaatccccattgtttttttgtgtttgtgtgttgcttgagccaggaaaattcctggagcggaaaaaccttatcagccatgtgggtatggggaaaatgcaagtatgtttctggctatgcgttttttgcatagcggaaaaattatgctgtgtggaaaaggctctgcgcaggattgagttgcagaaaattcataaacccagtgacaatgacatcagtaaataaaaacagaaaatccagggacgaaaacgagatggcaaagtacaacgaaaaagagctggcggatacgagcaagtttttaagttttgtcctccgacacaaaccggaggcgattggtatcgtacttgaccgtgaaggatgggcggatatcgataagcttatactctgtgcccaaaaagcgggcaagcggttaacccgtgcattgctggataccgtggtcgctaccagtgataaaaagcgttttagttattccagtgatggtaggtgcatccgcgcggttcaggggcattcgacttcgcaggtcgccatttcctttgccgaaaaaacaccgccacagtttctttaccacggtacggcaagccgtttccttgacgagataaaaaaacaggggctgattgcaggggagcgtcattacgtgcatctctctgctgatgaagcaacggcacgcaaagtgggagcaagacacggatcgccggttatcttaaccgtcaaagcacaggaaatggcgaaacgaggcatccctttctggcaagcggaaaacggagtctggctgacatcaacggttgcggtcgaatttcttgagtggtaagggaaacactcctcatgaagtgaccacttgcagcttaaataattgtactgtgctgataagcgcagcaataaacaacgccgccgcgccgcagagagtggcgccggcaagcgccgatgttccattgccgagcatactggtcagcgccgggccgaggatttgtccaatgccgtaaatgagcgtcacaaagcctaaaagattgagatttcccggaacgctcagttggcgggcgatagtcatcaccagagatgtcgtgcccataaaggtaccgccaaaaccgatactactaatgataagcaaaagaggagagtcgctggcgagagtaagcagcacactgatagcctgcaccagcaaattcgccgtcaggcaaggcaaagccccccaacgttttgctgcccatagccagccaaagcagcctggcacaattgataagccgactaacgtccagagatgggcggttaacaatggtgagcctgcatctttcgccatgagcggcaggaaagtcgcgacgatgatataaccaaatcccgccaggccgtacagaatagccagtaaccaccagttcattatctgttgctccgtttttgccaatggcattggtgcgatggcgtgttttttcgagggcattaaaagcgtaagtgcaatcagcatcatgccagaaagcgccccggcgccttgccataacgtttgcgaggagaaggcaaaatgcaggcctgccagaacatattcgttgcccagtgcaatgccaatgccaacgccagaaaacaaagctgccagcacaaaaggatggcgcgtgtgctgcataatcagcgtcgaaccaaaaatcagcataccggcgctggcgacacccgccaggaagcgaatcaataacaccagaataaatggcggcaaccatgccattgcgaggatcaacaacccgctcgccagggcagaaaccaacagaaatgggcgcaggcgcgacggctggtgaaatgcgccaaacgaaaatagcagactgccagccagataccccgcatagttgccgctggcaatccacgagagctggctaaatgaaaacgccccttccgccatcatgacgggcaacataggcgtataaaggaagcgacctaatcccatacctaaggtcagaaccagcatcccgaaaagcgcggtgctgaaagaaaagcgttctacgggatgcgaggacgaaggcatgtttaaccttgtatgtcatttttgttgttaacaagttaataacaaaaaggtgaaatatgccagtctgttaatgcgatgatttaggggtaaagcgataaaaacgatttggttcgctaacgatataaatattaccagaggcatccatcgcaatcccttcggcctgtttgatgttatgcgacaaacctcgactacctttggttagtgatatttcaccgataacctcgccaaccagggttacttcctggagtgcgcgagattcatgagacagcaccagaagcgtatttttttgctggttaaattctgcgccggacacatcatctaaagtaaattgccgttgtagtgcctcgtctttgctgatgtgtaattcattgctacttaacagcccgttaactttgtagacctcaatcggatttttctctttaaaaaaccagaaagtgtgatcctggcgagaataagccaacccttcaaaaccgcaattggttggggagtcttgcagcgggatttttatttttttgaggatttttacttccgagtttggggtcagtgaaatcacataaatggcgtaatcgcgctcatcgctaatgacaaactgattatcgccaatgtattcgatcgtctcgagatccttaacaaaatccagaggaattgtgcggataaaatcaccattggtggtcatttcaacaatggcggcaggtttgttgatagtgctaaaaagagtattgctttgtgccgaccaggtcagcgaagagatattattcgttatgcctgcaatttctttgccgtcaatggtggcgtggtaattctgaaatgatgctgcatgattgcttttacgggcgcaagattgcacgaagaaagtacacactgccacaatggcaaaaagaatcacaataacggagatgcgtttacttaacgaaatactttttgtcacggtaatccctttaaggcaaatcaataagatatcgagaagtatacgtagcgaccttaatgaatccttaacgcggagaaacccggtaatgtgcaatgcagcgccagacaccatcctgctggcaataaattgactcagtcagcccagggatcacccattgtatttcctcgccggggggacaggtcagccaaatgcataacccgcagccgccgcgtaaatcacggggaatatcgctgacgcgaaaagtcatgcccgctgcctgcaacgctttgcgggtttgtatgacgccgactgtggagtgaaataaaaataaaaactctttcatcggcgtgtcctcactcgttgaccaattaccgccgcgccaattgcgccagcaaattgcgcatcaggatgggtatttaccggcattcccaggtgagattccagcatccgggcaaacgtctggcaatgactaacgccaccagtaaacagaatcggcgcttcacaggagagacgagcaatgaaattggcactcctccgcgccatcgcgttaatcactccggcgagaatcgcttctggcgcgacgcccgctgagcgcaggctgatcacttctgattcagcaaacactgtgcacatactcgtgatggcgtgcggcgtgacattttcggtaatgctgtcgagttgctcgacgctggtgccaagcgtgcgcgagatcacctccaggaaacgcccggtgcccgccgcgcatttgtcattcatcaggaaatcgcacaggttaccgtcatcatcaagctgaatcactttgctgtcctgaccaccgatgtcgattaccgcgcgcgttgctggcgcaagaaaccgtgcgcccagcccatgacaggagatttccgtcacttgtttatcggcaaaatccaccagttgccgtccatagccggtgagcgtcagaaacggcgttgtctctaacccttcgcgcagagtttcccaggcttcagtaattgctgttgccggacgaaagggtgttggaacgaggaaacggcgcgtaatcacgccgtctgccagtaagatccctttggtggcggtagaaccagaatcaatgccaatcgaatatgtcactgccactccttacagcatctcaataaaggccgtgacacgggtactgagctgcccgacatctgaggtggagtagtctgtttcaatagcgatataaggaatgttgtgctgctgacgcacatgacgtttaatcgccagcgattccaccgcgtaggtatggcacgcctgcaaaatcacatcaactacgccatcgacctgatattcttccaccatctggctgagcatttgcaggcgctgatcgttcggcgaaacacaggagcagccaatcgccagatatttatccgccagtgcgtcgtagacatcgcccgtttctgccacgcattgctcggtcgctttcgccccggtgcagttttcataaccgacaacccagccgccattctcttcaatcgcgcgcaccactttttctgctgcgccgccaatcgggcagccggtgattaaaatgcgtggacgcagggccagccgctggccttcttcccactgctgacgaacgcgggctgtcatcgcgtccagttcattgatcaacgcctctttatcgaaccggaaggttgcgccgtagaccactttcagaatgtcgctgccgctaagcgccggaggatttaactgcccaagatgataaaaattagccagtgcgcgacgttcgcggtttttcagcgcaatggcatcgcgcagagcatcttcgctaatctcgtgcccaaaacgttcttctaccgttttttgcaagcgcagcatctcggctttccataacgcacgcgaggcatcgtccttaacgctgttcggcaactgcatcacatgaacgggcttaaactccgccatgtattcatacattttctttttgccgtcgcaggtggtttcaccgaccaccagatccgaaaagtagaagtaggggcatttatcggttttgccaaagccgtagctgcttttaatcagcgggcagaggttgcgcggcagatctttctccgcttcttcaatggtttcatcagaggtagaacagagcgaaaccacaaccgcaccggctgccatcgggatctcttgcggcataaaggtgcagtaagtgccaaccagcggaatgccgcgctccttgagatccatgacggtgagaaagcctttctggcgagcttcagagaactgatcgaaaatggcgggtagatcggtgataagtgacatgattttccttccccgtaccacgggagataatgaaaagaggccacattattaccattcttttagtgtggtttatttgatctctctcgcggttagccacttagtttttcatggatttctaaaaattgctgagggggaacaaggccgggagctgcgacaacaaatataaaattagcccaatacaaccgccaaccagcgtaccgttgacacggataaactgcagatctttgccgatatttaactcgatttgccgcgacatatcccgagcatcccagctttttactgtatcgctgatgtggcgcgtcaggaatgcggaaaactcaggcgcgacgcggtgcgcggcttgttccaggtgaccatttaacgatgcccgcaaggcatcatcggcaattaacgtttcgccaaaccattgacccgcccgcgcgatacgttctttcacacgagaatcttcactgttgatatccgctttcagccattcccgtaaatccccccacaattcactgagatagcggttaaaagcttcatcttctttcagataacttttacggcatcggctcgcgctgccatttccggatcgtttttcaacttgtcgatcagggcaaaagtggcgcgatcaaacgcatgacggatctgatgcgcacgatcacggctgatatcatcaagcaaagaattcaccgcgtcagaaaccaactccgcgctatgttcgcccaaccattcggtggggagaattttggctttcagtggatgctcactctccagccagcgaacaatctgctgggcaataaacttgcgcgatttatcgcgctggagaagggcgatcaactgtgcgatcagcgtatcgagcagcacctgatgacgatcgtttttggtcatactctccagcatcaacgcactggttccggaaagatcgaccttatcaatcgcccgatggaccgcgcgcttaagcaggcgctgaatacgtgcatcatcggtcagttcaagaaaaccgctcatgatctgcaacagatgctgaccaacgcggcgggcgttctccggctgactaaaccagttgccaatcaacaacgccggttcgtgacgtcgaatcaatgccaccagcgactgggtatcgagaaatttttcctgcacgaactgaccgagattttcgccaatccggtctttattacgcgggataatcgccgtatgacgagaaatgatcggaatcggcacgcggcgaaacagcgccaccaccgcaaaccagtccgccagcgcgccgaccatcgccgcttcagcaatcgccttcacgccgctcacccaaaaattgggcggcaaaaacagcgtaactacaaaggtagcagcggcgataagcagtaaagagagcgccaacattttggcgcgtctgagttcaatgagtttattcataacgttaagaatagagcctgacggcaggatcgcgcaaaaatcaccgctcctccgccagctcggcagcctgatgttggcgcacgcgattgagcaatcccgccagggtgaaaacgacgataacgcccgccacgacggctaacagatgaaacggcaagcgaccgccgttaaaccacagccagcggccgatttcgaccgagacagacatcaccatcaggatcaccatattcagcgatgcggagacggtccctttcggtaagttattggaaaaaagcgtaaagcggaataaagtcgggaagatcaaaccaatcccgaaagcatacaaactggtgcccagcaccgaccacagccagacgtgcggtgacagcagattgccgataatcaacagtgcgaggccgaccagttgaatgggtacggcacgccagataaagcgcggttcggtcggatctttaacgaaacgcgccacgatggcattcgcgacaatcaccgcgccgaacaccggaacctgtgtccaggcgaactgcgaggtcgttaagccgcctgcgtcaatcaggatcaccggcgagacagccacccaactcatcatggggatatagcttaaagagatggttgctgcaccaaagaggaacagccgattgcaaaagacattacgaaaatcgcgcaagacgcttttggcgctaaatggaaccgcgccgcgcttcaccgtctctggcatcgccagcagtaagccaacaaatgagataaaacccataaccgcaatgatggcaaaaaggactttccagtgcacaaagtgcatcagagctgcgccggaaagcgggccaataatcggcgcaatcagtacgatggaggtgataatcgccatcaacttgatcccttttgtctgtccgaacgcctcctgcaccgtgacataaccaacggtagcaataaaacagatactggtgccctgaattgcacgcgcgataagaaactgtgtcatagacgtggtgaacattgtcgcagcgcaggcaagggtaaatattagcgccccggtaatcagcaccggcctgcggccaatcctgtcggaaagcggccccagcagccactgtaacgccataccgcccgcgagatagagactgacggcagccggagccagactgacatcggcattaaaatcacggaccacattaatgatccccggctggatcagatccgtcgacaggtacgcggcaaagtcatacaaaatcaacgccatcgggaaaaacagcgtggcggcatggcgggcaaaaaaacgtggcataacaaacaactccttgtccggagaaccccaacggggaaaacgaaattcaataccgtcggtaatgacgaaaggcaggcgagaaggacaaatgtactgaatttcatgtaatcaaccacactgcctgtgaacacacagacagagaaataccttctgactccaggtcagaatgtataacgattacaaatagtcatcagcacattacacctctttaattgatgggttgcatagaaaatatacaccttaagtgtaattaaaatttgcggttaatcaaaagagcgcggtggaaaggggaatatctgccgggtacaggaaatgtaaaacgcgagcctgtttccggaaaaatgtatcgtttgcagaggaacaaaaatagactggaaagcgcctcggggaacggaaaatagccaggtgagaatggttttgttagtcgctaaagtcgggccatcttatctacaggtgacggatcgccatgacaaacttcacgaccagcacgccgcatgacgcattatttaaatcctttctcatgcaccctgacaccgcgcgggattttatggagatccatttacctaaagatttacgtgaactgtgcgatctcgacagcttaaaactggagtcagccagctttgtcgatgaaaaattgcgggcgctacactccgatattctgtggtcagtaaagacccgcgaaggcgatggttatatctatgtggtgattgaacatcagagccgcgaggatatccatatggcctttcgcctgatgcgatattccatggcggtgatgcagcgccatatcgagcatgataaacgccagcagctaccgctggtcatcccgatgctgttttatcacggtagccgtagtccttacccctggtccctgtgctggctggacgaatttgccgacccgactaccgcacggaaactttatactgcagcgttcccgctggtggatatcactgtcgtgccagacgacgagattgtgcagcatcgcagagtcgccttgttggagttgatccaaaagcatattcgccagcgcgatctgatggagcttatcgatcaactggtagtattactggttacagagtgtgctaatgacagccagataactgcgctgttaaattacattttactgactggcgatgaagcgcgttttaaggcgtttatcagcgaactaatcaggcgaatgccacaccacagggagcgcataatgacaattgcagagcgaattcataatgatggatggctgttgggaagggagagggggaggaaagaagggaaagtagaaggggaacggagcctcctccgattgttgttgcagaatggggccgatcctgaatggatacaacgatataccggactttcggcagagcaaatgcaggcattagatcagcccttgcctgaaagcaagcgtgatccatggatcgagtactaatcagagacggatgacaaacgcaaagcagccttatgcgctacgcttatcaggtctacataacccattcaatatattgaactttaaagattttgtagtcctggtaaggcgttcacgccgcatccggtatgaacaaagcacactttgcctaagccatgctggaacgtggcgatgcccctgcaaagataaaacgagtcacaggcgattcgtgagaggaaatcaggggcctcgccactaattcgaattcattccattgcctgatacacggcctcgccaatttgcttcagtgcttcgcgataggtttcgctgagcggcaaagcgcagttgatacgcagacaattacggtatttgccggaagccgagaaaatcgagcctgccgccacctggattttcatgcggtacagctgccgcgcgacgcagaccatatcgacctgttcaggcaattcgatccacagtaaaaatccgcctttcgggcgcgtaatacagatttcgcagggaaaatactcccgtatccagcaggtataaagcgccaaattgcgctgatagatctgccgcatccgccggatatggcgatgatagtgaccttccagcacaaacgttgccgccgccatttgcgtggacggcacattaaagctactgatggcgtatttcatatgcatcagtttatcgtgataacgccccggtgcgacccaacccacgtgcaggcctggagcaatacttttactgaacgagctgcacaacagcactcgcccgtcgatatcccaggaatgaatggtccgcgggcgcggatactccgttgccagttcgccgtagacatcatcttcaaaaatcacaatatcatgacgttgagcgagagagagaacggcccgtttgcgcgcgtccggcataataaatcccagcggattattacagtttggcaccagaatgatgcctttaatcggccactgttccagcgccagttccagcgcttcaacgctgatgcctgtttctggatcggttgggatttcaatcactttcacgcccatgccgcgcagcatctgcattgaaccgtaataacagggggattcgaccgcgacaatatcgcccggtttacacaccgccattaacgccatcgacatcgagttatggcagccgctggtgatgatgatgtcatcggcggtgaccaccgagccgctgtcgagcatcaggcgggcaatctgctctcgcaacactcgctgaccggctaacaagtcataaccgagaacggtttgtagattatgctgcaccacccggcttagctcccgccacagcggtttcaggctgggcgtttcgacatccggcgtgcttttgcttaacggaacaatggaactgtcgctatgcgccaccagcatatccagcacctgatcccactgggtaatttccaccgggcgctgcaccggacgcgtcatcggcggtactggcggctgggctttacgttgtgcgacaaaataacccgaacgcggctgcggagtgatgagcttcatcgtctccagtatctgatacgcctgctgcacggtactgatgctgacgccgtgctcctgacttaagctgcgcaccgacggcaatttctccccgtgacgatacagcccttgctcaatccgttcggcaagcagagtcgccagatgttgataacgcgtcatgctgtattccttatgtggaccatacagagagaaaaaccggtacagatgaggctaaaaaaccggatgcagatgctgttttaacctgtctgtatgttaaataaaagtaatatttgaatctgtattgtgaactgccagaaggtggatgatgaagcctctgaaagatgaggaggcagcagatggaatttcacgaaaacaaagccaaaacgccgtttatcagacttgtgcaactctggcaggcggtgaggcgttggcggcggcaaatgcagacccgacgagtgttacagcagatgagtgatgagcggttgagagatattgggttacgcagggaggatgtggagtgagggggcaattcatcgcggataaacaggatttctctataacctccacaaggaagtggttattattgcgaaatcatcgcttcacggaaagacgtcagaatgaaagctacagaagcccgcctactcgattttttaaaacgttcgcagcagtttgttattcccatttatcaacggacttattcatggacagaacaacaatgtcggcaactttgggacgacatcattcgtgccggaaagcgtgacgatatatcagcgcattttatcggttcggttgtttatattgagcaggggttgtatcaggtttctggtatttctccgttactggtcattgatggtcaacaacggctgacgaccgcaatgttgctgattgaggctttatcgcgccatcttggcgaagacgaagtttttgatggcttttcagcaatgaaattgcgtaattattatttgctcaatccttatgagtccggcgagaaaggttttaaattactactgaccgagactgataaagacagtttactggcgttaataaaacaaagaccaatgccagaaaactattcccatcgaataatggaaaactttactttctttgatgaacaaattgccaaactcggtgatgacttgatccccttatgtcgtgggttagcaaagttattaattgtcgatgtggcgcttaatcgtggtcaggataatccgcaactgatttttgaaagtatgaactccaccggtaaggcgttaagtcaggccgatctggtgcgcaattttattctgatgggcctcgaaccagagcatcaaacccggttgtatgaagatcactgacgtccaatggaagtcgcctttggtcagcaaggttacagcgaatattttgacagttttatgcgtcattatctgacggtaaaaacgggggagatccctcggacagatgaagtctatgaggcatttaaactccatgcccgcagccagagtgttgctgaaaaaggcgtagatcggctggttgaagatattcatatctacgcggagtattactgtgcaatggcattgggaaaagaaagtgacaaatcgcttgctacggcttttcaggatttgcgcgagttaaaggttgatgtggcgtatcctttcttactggcgctttatcatgactataaaaatgacgatttgtctcacgaagatttcctgagcataattcgtttaattgaatcttatgttttccgccgtgcagtatgtgcaattccgacgaattctttgaacaagacgtttgccactttttataaggtcattaataaagaaaaatatctggaaagtattcaggtacattttatgaacctgccttcatatcgtcgtttccccaacgatgatgaatttaaacgggaattaaaagttcgcgatctctataacttccgcagccgcagctactggttacgaagactggaaaacgataaacgcagagagcgcgtggaagagtttacgattgagcacattatgccgcagaacgaaaatctgtcggctaaatggcgtgaagagctgggaagcgactggcagcgtgtgcataaagaactgttacatacgttggggaatctcactttaacgcgctataactcccgctacagtgacagacctttcgcggaaaaacgcgatattgaagacggctttaaacatagcccgctctatttgaatatcggtcttgggcagtgcgaaaaatgggatgaagccgccattcgcgcccgtgccgatcgcctggccgatctcgcggttcaggtctggcaagcgcctgctctttctgaagaggttttagctgtttatcgggggcagcctgaaaacaaaaccagttacagcctgagtgattatccttttcttgctgatggttcgcatagccgggtgttattcgatcatcttcgcgatgaaattatgcgcctggacgcagggatcacgcaggaagtattgaagctctatattgcgtttaaagcggaaacgaattttgttgatgttgtgccgcaaaaaagccgactgcgattgtcgcttaatatgcagtttcatgaactggtcgatccgaaaggtattgccaaagatgtgacaaatgttgggcgatggggcaatggtgatgtggaaattggtttcagtgacctcgcacaacttccttacattatggggttaattcgtcaggcatttgaaaaacagatggagagcgcgttggtataacgcagcgaaaaatgcccggtagtcctggcgctaccgggtcaatgtatcaggcaactttctgtttacccgcaatcaccccaataaactcctgcacctgcctttgtttacgcgccgacagcttgcacacctggcgcagcgactgcatcagttcgctctcggcggcggcgggtggttgggcggtgaggacaatacagccttccatcactttgacatctaccaccgtgccggtggcaaaaccggcggcttccagccactgacctttcagggtgatggcgggaatacggctgtaatccgggtaacgactcgcataactcacggttaattgacggttatttgccggggagacttctgcttcgaacggttgtgcaatagaatgcgtatcagtcataactgctattccctataaatagtgattgtgattagcggtgcgggtgtgttggcgcacacccgcaccgcgctaaatacctggatatatcatcagtaaatacaaggaaagtccagctaaaaattaatgaaaataagatgaaaattagcgtgaaatataaattttgctgatgtgaataaagcggctatttagccgctttattggttttttgaaggcgagaaaattagtttatcgccgcgtcagtcagtgcgtctgcaaggtgcagttgggtttgctgggcggattgggtagatgtttttaggttttcacaggctaaaatatattctctaattcttgataaaatcaagttctgttgattaaggggtggtaatggaattgttattcctctgattttacctacactgagattatatagaccgctagtggtaacagcgagccgttgcatttcttttataccagatggcgaattaagatataatgcaataaactcttgataaccttcaattatcccgcgaactcttatcaggtgattttgataaacacatttttcgattggagcgtgccaaatagcacaacgaccaatttcatcagcactaccattaccttcaacgattagaatatcgtttttttctaacgaccaaaaagctaactcatgaggttctacttcgaatctttcaagtttatcaatattaatatcacctctttggacattagcaacccgcaaataagggaaatggtttttaacaggtcgtcttttcggttgtttttgtattcctccagaaacaaacgttaagtcatcaatacgacaccactcccacccttccggaagttcaaacggtttttcctcatcgctaatcgggggcaacggtttttgtttttttattttcccttctttcaccagttgagctttttcctgcgcaattcgtttgagcagttcagaggcgggttcgtcattcggatcctgcggcacaagtttacccattacggccagttgcagaatggtctgttttaacgtatccacgctggcttcggtggtaaaaagtgtgtcgaaatgctcgctaatacgcgcccagttttcagccagttcctcggcgttttggctgtctgtaagcgttcccaacagggtttcaaccagttgctgatgtgcatccagactggtcagggattgctgttccagttggtcacagagaactgtaagttctctgatttttctgacaatttgttgttgttcatttataggcggtaaagcgattatctgttgttccattttttctttagtcatatggagcattgcaataccgttaccttgcgattttattttatctgtaatggataaaagaaaatcatgtataaaatatttgtttgagtactcttctgcaaataaatttaatttccatatatggtagtgataaattactttttctcctgtccaaatgaatggcccaaaagatgcggaccaagcgtatattaaatcaccattatttatatatttgttttcgtctaattggaggtcagagtaataccactcatttgatgtgaatagattaccaacacgcagcaaaggagtgcctgtttgaagcatttcatgttttttatatgctcgaccgttaataacctccatgagatctgcaacccgcacccactcccatccctccggcaattcaaacggcttctcttcctcgctaatttccggcagtggtttttgctttttaattttaccttgcttcaccagctctgctttttccgccgcaatacgcttcagcagctccgacgccggttcatcgttcgggtcttgcggcaccagtttaccgcgcactgccagttccagaatcagctcacgtaatttcttaatgccatacaaatcaattttaccggaactgccgcgcccggcggtggaacgggtttgcaacgccgaggtccaggtttccatatgatcaacgatcagcttttccacactcatcagttaacctccttgccagacagcgcagcgccgagaatatcgcgcagttgattacgcagcgtctggatctccgcctgttgctttgcatactgcgctaacagttcgtccggatcatggctgacggtttccgcctgatgtgggtttttaatatccagattgaagttacgcgcaatcacgtcatcaatgctgactttccacgcttgctcattctcgacgcggctggcaaaaccatcggcctcgttaccccaccagtcgatctccgcctgaaactcttcaaacttcatcggcttggttttgctgtagtttttcacgcccgccggatacggatgctcatagaaccaaatctctttggttggctgacctttggtaaagaacaacaggttggttttaatgccggtataggggttaaacaccccattcggtaaacgcacgatggtatgcaggttgcactcttcggtaagtagctttttgattttggttttaacgccttcgccaaatagtgtgccatccggcaataccaccgccgcacgaccgtttttcgccagtacttccacaatcagttgcaggaacagatccgccgtttcgcgggtttgcatctctgccggaaagttcttctcaataccgtcttcttccgtgccaccaaacggcgggttggtaacaatgacatccagttgttcatcccaggaggaaagcggtttgttcagggtgttgtcgtgacgaatttgtaccggtacttcaatgccgtgcagcagcatattggtggtcgccagcaggtgcggaagctgttttttctcaacaccgtggatctgttgttgcagcgtctgatgatcggcgacgctcttcacgtatttgttctttacatgatcaaatgcgcaggcaagaaaaccgcccgtaccgcaggccgggtccataatggattcgccgagtttcggatcaacgcgatccaccataaagcgagtgacggcgcgtggagtatagaattcgccagcattgcccgcagattgcagatctttaaggatctgttcgtaaatatcaccaaacagatggcgttcgctggcgctggtaaagtcaatttcgttcagcttgttgatcacctgacgcagtagcgtaccgtttttcatatagttataggcatcgctgaacgcctgcttcaccacgtagccgcgtgggtttttatcgataggtgcagtgaggtttttcaacgccgggaacagatcatcattaacgaattccagcagggaatcaccggtaatgccctgagcgtttgcggcccaactgcgccacaaataacgctgtgggatcggatattgatagttatcctgctccagttccagcgcctcttcctgggcatcgaagattttcaaaaacagcagccaggagagctgaccgagacgctgcgcatcgccgtccacaccggcatctttgcgcataatatcttgtaatgatttgattactgaactgatagacatgttgtattccatgaaaaacaaggccttctgcaacatgatggttgcagaaggcgcaaaagagagttgttaagcagagcggggcggtaattggtagatttcgttttccagctcgctgagcgcctgattatacccgttacggtcgccaaatccggttttaataatctccggtaaggtgcccatgctgtcgaatggtttaagtttcagcacctgaatactttcgatctcctgtacgcccgcatcggcgtatttatccagcagattatcgagcacggcttgcgctgcttcagagtattttgtgaagtagttccgcttgcgcacattctcggcgcgctctttgcgggttaacggcggctgaccatacactacgtggcaaagcatgtcgaatgggtcgagatctttaccgacttcttctgccagtacttcccagatgatcccctgttgctccagctcgtgaatgatcgcttctttgcgatcggcgtcctgccacttgcgggtaaagtcatccagcgaggcatattctttgagcagtgttttgcgggtgtaatctttaaaggattcggtaaccagtttaccgtcggcgtcgtaatactgaacacgctgtgcaataacgcccaccgctacaccgttgacgtgaaacttgcggattttcttctcgtcttcttccggaagtgggccgacatcatcggtatcggtaacctggtatggtggcgcaggcggttcatcaacgcctgttacctgttcttcgtcatgttcgctgatttcttcgagtttctcttcaaaatcagattctggatcggcgatatcctctggtgtggtatccatgactttttcgggaatgccatcgaaacgctcatcggcaaacagttcggtggcttttttaaagtcgaggatggtaaaccagagtttgccgtaacgttcgtcgatgcgtgtaccacgaccgataatttgcttgaatttggtcatcgactggatgttctggtccagtactaccagtttgcaggttttagcatccacaccggtggtcatcagctctgaagtggtcgcgataaccgggtacggttttttcgggttgatgaagttatccaactgagctttgccaatttcatcatcgccggtgattttcatgacgtatttgtcgttctttttcacctgctccgggttgagattaaccagggcgcggcgcatacgttctgcatgatcgatgtcgttacagaagacgatggttttatccatcgggttggtgcgcttgaggtagtcggtaatggttctggcaaccagttctgtgcgttcgtcgattaccatcgtgcgatcgaaatctttctggttatagatacgatcgtcgatcacctcgccgtttaagtcagtttgccctttggttgggcgccagccttgcagatcaacatcaatatcaacacggacaactttataaggggcgaggaagccgtcttcgatcccttcttttagcgagtagacgtaaaccggatcgccgaagtaatccgtgctggagacttcatgcgtctcttttggtgtggcggttaagccaatttgggtagctgaactgaaataatcaaggatctctcgccaggcgctgtcttcggatgcgctgccgcgatggcattcgtcgatcacgatcagatcgaagaaatctggtgcgacttgtttaaacgctttttggtcttcctccgggccagttatagcctgatagagcgcgaggtgaatttcataagcgggatcaatggtgcgtccgctgactttggtcattgccgtaccaaatggctggaaatcattatttttggtttggtcgaccagaatgttgcgatcggcaaggaacaaaatgcgttttttattttttgatttccacaggcgccagatgatctggaatgcggtataggttttccctgttccggtcgccatgaccagcagaacgcggttttgcccgttggagacggcttcaatggttttgttgattgcctgaagctggtaataacgtggcgatttaccgctgccatcgtcgtaatagtcctgagtaatcaccggaagctgagcttgtgtgtatcctttccagaggcagaattttgccagagttcagcggggaggggaagtcatccagcgttatttgcttttcaaggcattcaccttcggctgcggtggcatcgcggaagataaagccatccccgttggtggcaaaaacaaaaggaacgtccagcaggcgcgcatattcaatgccctgttgcatccctttgccaatttcatgtttgttggcttttgcttcaatcacggctaagggaatgcctggtttgtgatacagcacgatgtcagcagattttaccgttctgcgtgccgcaactttaccacgtacgatgactttaccgtcccggagtttgacctcctgtctgatttgcgttgtgttgtcccagcctgcattgagaatggctggcataacgcatttggtaatgatgtctgcttccgtcaggttacttaggttcagttccgccatggggtgttctcgcttttatcaggacgattctgattgtacataaaatcaatagcctggctatgatttagggcggtgtttcaacgtaaagtacgtagcagagatcacattgatatctctgttatatcttgcttgaattaatctgggcatatcagagacagataaacagaagttacaggaaccatatcaactctaacaaaatatataaaaatcttatagttgcgtttctttcgagcaagaaagataatgttattgttgattgtttgattgggtatatgaaatggaagctaaagaatgtaaggtgcaggatatccttactgaaaacaaaaagtttattattccttcttatcagcgtccttacagttggacggtagataatgcagagcaactcattgatgacatttataaaagctctcaatcagaagagaatgaatattttattgggagtatgatttgtatcaataaagggcaaaatcagtatgaagttgtagatggacaacaacgtcttacaacgttaagcattattgtctccgagctaaaaaaaatcatcccgattcaggggataaaagatgatttgcaaaaaagagttctgcctattgatgtttattctgatgaaacagatgaaccaagactaattgttagaaaaaaagagtatgatctttataaatattatatactgcaggattctaaagattataaacctgaaaagccatcggatactgagttagtattcattagcaacgctgaaacaattagagattatttgttgcggttatctgttgatgagttgaagttgcttgctaaatatattttgcaaaatgtatatatcgtatttgtgcaaactgatgatttcgcatcatcatttagactctttaatgtattaaatagtcgaggtttacctttaagtaatgcagatcttttaaaaaatgcactgtttgaatcagcttctacgcataataaaaaatcagagcaaatagaatcagcatggtcgcaaattgaagatatggttggagtgagacggcttgataaatttcttactcttcataagctttccgagaaaaagatcgtgacagggtgttacaaaaaggttttgaagcttttattgaaaatctccagcagcaatttgatggagatgctattgctatgtcactgatgttggttaattctgcaaaaaattatactaagattttagagaatgattttgaacacccttctatacgacgaaaaatagcatcgctaagtaatttaggggtagatgagtggattcctccggttatggcattcatgaatcgaatggctcgtacagaagattttaatttagatgatttttctcaatttattaccgcctttgagaaggtatatatgcatgggtggttaaaaaaacaaattaaaagccaaagagaaatggtttgttattcagctctggtagcaataaataatgatatgccttttgattctgtgataaatcagataaaccaacatgcagataattcaggttttatagctgctctggatgaagatttatatgagcctcgtccgaatcaagtgaacttaataaaagcaattttgcttcgcttagatatggagcaacaagatgagagcgtgattaaaacctatacggggagaatcacaattgagcatattcttcctcaagcattagttaatgaatactggattaatagattccaacctcaagagcatgtctactggctgcataaaataggtaatttaacactcataagtggttccaaaaattctgaagcacaacactatgattttatcaaaaagaaatctatttatgagaaacttaatagtaaaagttcttttgatttaacaaaagatgtttgtaattcttcagaatggggattggctgaactgaaaatgagacatgaaaaaatgaaaacgcaattgaagaagctttggttggtctgacatatctaaagagttccactcgtaataatgttgcggtggaactctcaaaaagttgatctttcccgaacttacttcctcaaccccgcaaacgcagcccgaatctcttcctccggcagctggatcccgataaacaccatcgtgctatgcggtttttcatcgccccacggcctgtcccagtcggcgctgtagaggcgctggacgccctggaacagcaggcggttaggttcgccgtcaatccacagcatccctttgtaacgtagcagtttatccgccgactccagcagcaggttttccatcacgcgggaaacttcgctgatatctaccgggtaatccagttccaccacaatcgacgaaatatcgttttgtttatctgcgataaagtggaaacgcggtttggtgctgacgacgttttcttccagcataaaaccgttggtgttgaacagcaggcccagatcgatgtcgccgtgggtgacggtgtagaccggtgcgcgggcgttgatgcgcgccaggcgttcatgcagtttttctgcttcgcctgcgacgtcggttttggtcagcagaatgcggtcggcgtagccaacctgtgactgggcgatggtgaactggttcatctgctcatcggcatgtaccgcatccaccagcgcaatcacgccgtccagcagataacgctggcataaaacttcatgggagaaaaaggtctgaataatcgggccgggatcggccatgccggtgcattcaatgaccagacggtcgaactgaatattgcccttgtcgagattgtccagcaggtcgagtagcgcgtcctccagctcgttggagcgcgaacaacagatgcagccgttggtcagcgttttgatctgcgtggcgcggtcgccaatcagttgatcatcaacagagacttcgccgaattcgttttcaatcacggcaattttgtagccgtgctgttcattaagaatatggcgcagcagggtggttttgcctgcgcctaaaaaaccggtgagtagggtaactgcaatcgggttcatgctctctccattaacaacagcgcataccgcctttaccatcgccgccgtagcgcgcgttctggcgttcgcggaagaattcttcatagctcatgtacggcttgtcgggatggttggtcttcatatgctcgacgtagttgtcgtagtctggaatgccaatcaacatcttcgccgcctggccgagatatttttttgcctgtcctaagttaccaaacattttgccttccagatatgcgtaaagcccggaaggtccgggccggggatttgccggatgcggcgtaaacgccttatccggcctacgatagacactttgtaggccggatacgcgcagcgcatccggcaaccggttagtggtgcgaagagatcttcacgccgccttccgggattggaacgtacggtgtttctttgtcagtacgtttgtcgctgtttcgcaccttcagccaggttttgaaaccgtagaagatgatgctgtacaccacaatcaggaacagaatactcagacccgcgttagtgtagttgttcacaacgatgtggttcatgttggcaatctgctgcgccgtcaggtcagtaccgttagcaatcttctctttgtactggcttgccatgtagaagaagccttccatctgcgggttggtgctgaacagtttcagacccagcgcccaggtggtgcagataagcagccatacagccggaacaacagttacccagatgtattgggtgcgcttcatcttaatcagcacaacggtgcccagtaccagcgctacggctgccagcatctggttggagataccgaacagcggccacaggctcttaacgccgcccagcggatcgaccacgccctgatacagcaggtagccccacagacccacacagcccgcagtaccgatgataccggcaaccagagagtcggtttttttcaggaacgggatgaagttacccagcaggtcttgcagcataaagcggccagaacgggtacccgcatccagcgcggtcaggatgaacagggcttcgaacagaataccgaagtgataccagaagcccatgtcagccatcggcagcactttgtggaacacatgagcgatacctaccgccagcgtcggcgcaccacctgcacggttcaggacagaaggctcaccaatgtctttcgcggtttgcaggatctgctctggcgaaatcacgaagccccaggagctgacggtcgccgccgcgtgtgcggtaacgtctttcagctgcgccatgatgagcggcgcgttctcgccacccatttcatgcaggttaggcatggtgatgccaaggcccgcaggcggggtattcatcgcgaagtaaagacccggttcgatgatggacgcagcaaccagcgccataatcgccacgaaggactccatcagcattgcgccgtagccaatgaaacgcgcgtcggtttcgttagccagcagtttcggcgtcgtaccggaagagatcagcgcgtggaagccagataccgcaccacaggcgatggtgatgaacaggaacgggaacagagcgcctttccacagcgggccagtaccgtcaatgtactgggtcatcgcaggcattttcagttccgggttcagcaccacgatacccagcgccaggccgacgataacgccgattttcaggaaggttgccagatagtcgcgcggtgcgaggatcagccacaccggcagcagtgcggaaacaaacgcatagccaatcagcgcgaaggtaatggtggtgtctttaaaggtcagtgccggaccccagtacggatcgtgagcaatcacgccaccgaagtagatagaggcaaccagcagcacgataccaatgacagagacttcacccacacgccccggacggataaagcgcatgtagatacccataaacagcgcaatcggtacggttgagcaaacggtgaagacaccccacggactttcggccagggctttaaccacaatcagcgccaggacggcgaggatgatgatcatgattaagaaacagccaaacagcgcgatagtccccggtactggtcccatctcttctttgatcatctcaccaagagatgcgccattacggcgagaggagataaacagcaccataaagtcctgaaccgcaccggccagcacgacccccgccagcagccacagcgtgccaggcaggtagcccatctgcgcggcgagaaccggacccaccagcggaccagcaccggcgatagcggcgaagtggtgaccaaacaacacgtaacggttggtcggaacgtagttcagaccgtcgttgttaataaccgcaggcgtcgcgcgcgtggggtcgagtttcatcaccttctgggcgatgtacagactgtagtagcgatacgccaccagatacaccgatacagaggcgaccacgatccacagggcgctgacgtgctccccccgacgtaatgcaactaccgcgaggcagaatgcaccgatgattccgagaatcacccagggtatgtgcttgaatatctttttagtatccatagtaaaacctggcatgtattgattaatagttggccgaagccgttctaggtttgcgttgcgtttgaggaggtaaattgaccgctatcctgtagtgatgttgccagagttacgcgcgcgtaaagtaaggtaaataactgagtggttattttagggatgtaagcggtcagttttgcggttgagcggcaaaggcgtcgtttaagtgacgataaatatgtgattcatatcacatatttatattgtgaataatttatgtaaataatggctttttaaattcagagtgtgaataaaattactcggcgtaatctccgcgggatattcataaagtttttcctttccaggccgaaaatcttgcatcggtccacaggaaagagaaactatgttaaaacgtatcaaaattgtgaccagcttactgctggttttggccgtttttggccttttacaactgacatcaggcggtctgttctttaatgccttaaagaatgacaaagaaaatttcactgttttacaaaccattcgccagcagcaatccacgctgaatggcagctgggtcgcgttgttgcagacgcgtaacaccctcaaccgcgcgggtatccgctacatgatggatcagaataatattggtagcggttcaaccgttgctgagctgatgcagagtgccagtatttcgctgaaacaggcggaaaaaaactgggcggattacgaagcgttgccgcgtgacccgcgtcagagcaccgccgcagcggcagagatcaaacgtaattacgatatttatcacaatgcgctggcggagctgatccaactattaggtgcaggcaaaatcaacgagttctttgatcagccgacccagggatatcaggacggtttcgagaagcagtatgtagcttacatggagcaagacgatcggctctatgatatcgccgtcagcgataacaatgcctcctacagccaggcgatgtggattctggtgggcgtgatgatcgtcgtactggcggtcatcttcgccgtctggttcggtattaaagcctcgctggtagcgccaatgaatcgcctgattgacagcattcgtcatattgcaggcggcgatctggtgaaaccgattgaggtggatggctctaatgagatggggcaactggcagagagtttgcgccatatgcagggagagctgatgcgtaccgtcggtgatgtgcgcaacggggccaatgccatctatagcggtgccagcgaaatcgccaccggcaataacgatctctcttcgcgcaccgagcaacaggccgcttcgctggaagagacggcagccagcatggagcaactgaccgcaacggtgaaacagaacgccgagaatgcgcgtcaggccagccatctggcgttaagtgcttctgaaacggcgcaacgcggcggcaaagtggtggataacgtagtacagaccatgcgcgatatctccaccagttcgcagaaaatcgccgatattatcagcgtaattgacggcattgccttccagaccaatattctggctttgaacgcggcggttgaagcagcgcgcgcgggtgagcaagggcgcggttttgcggtggtcgcgggtgaagtgcgtaatctggctcagcgcagcgctcaggcggctcgtgaaattaaaagcctgattgaagactcggtggggaaagtagatgttggctctacgctggtcgaaagcgcaggggaaacaatggcggagattgtcagtgccgtgacccgcgtgacggacattatgggcgaaattgcttctgcttctgatgagcagagccgtggtatcgatcaggttggcttagcggttgctgagatggaccgggtaactcaacagaacgctgcgctggtggaagaatctgccgctgccgccgccgcgctggaagagcaggccagtcgcctgaccgaagctgtggcagtgttccggattcagcaacagcagcaacagcagcgtgaaacatcggctgtggtaaaaaacgtgacgccagctacgccgcgtaaaatggcagtggcagatagcggggagaactgggaaacgttttaatcgccataaaaatgcccgataagcaaaatgttatcgggcatagggagtttaatctttacgcgggtcgttgatcggctgacgaaccaggaagatgtacgccagtgctcccgctgcggtgacgcaaccgcagatgattagtgccagacggaatgagtgggtggtatcaacaataaaaccagtaatgatcggcgcaaaagaggcgcagatgaagctggcaaagttctggatactgcccaccgacgccgtcatgcgagaagcaactgcgacgtggatcaagccccagcaggatgttccggcaaagtgaatacagaacagtgccatgccaatcagcagaaccgccgtcatggatgttgtcgcttgcggtacgaccagcgtaaaggcggcagaacagaacatcccggcaataatgcagatcttacggcttttaatcggagccattccccctttgaccagccagtcagtaacgtaaccgttgaccagcatcccggcagccccaaacaggaaagggatagccgccatcaaccctgtgctttttaaatccaggttataggctgtttgcaggtaaccaggaagccaggccagatacagccacgcagtgtagttgatgccactgaatccgagcatcattccccacattgtgcggttacggaacaggctgcgccattcggcaaaactgagcggatctcggcgggcattgacgctacctgcattgagataagcttgttcaacggcagtcagttctacgtgctcgcggttgcgatagagcatataccagccaatggcgagaaaaatccccagcacaccaatggtaataaacatcccacgccagcccatcaccagcatcatcgccgccagaatcggtgggcttacggcaacgccaatggtagaagctgcgttgaagaagcccatcgggcgtccgcgctctttgatgttgaaccagtcgttaatgacttttacgccacatgggttcatcggcgcttcaccaatccccataccgatacgcaccaacacgaactgcgtaaagctgtgcaccatgccagacatggcctggaacagtgaccagaagaacatccccagtcccagcatcaggcgtgggcctttacgatccaatagtgggccgcaaggaagttgcgcaatcccgtaagcgagtgaaaacacggagagcaaagcgccgatttcggtggcacttaatcccaattcttcacgaatcgttaaatttgctaccgacagcgaactgcggtcgagataattgattaccgccgcaaaaaataataacaacatggcggtggtttgaatgcgtttaattcgggtactgcgttgaactaatccatctggtggcacgggaatatctgccgacgaagatggagtaaatgaagaacgcggatcgagggtgatattttctttttccacgccggactcctgtatttataattttaattgtttacgtaattgtgcattacgcaaggttgacattaacggcaggttaaagttttaggactttactaccgctcacaaaaacatttttagtcgactgattgtgagcataggtaagcgggaatttcccggtatttatcttttgataaaaccgtgcacccgctaatagtttgctgtttttaatccgtacttaatgagcataacgcgtgttctcattaatggatcgaatcattgattgtttagctgaattcaaatggttacggagcgcaagggtggcatcaaggtcactgcggcaaatcagagcgctgagaatggtcatatgctcatcgacggcaatgatattgcgctgtttaagatcgctttcgtcccattgatagtgaaaatgaaagatgactgagatgatctcaagagattgatcaaaaaagatattgtcggcagctgaaagcagtaaggagtgaaaatctctgtcaagttgcgagaacatgcgaaagctattgccgatgttgtcacgcagtagccgatgacgttcgagcatggttttcgcctgcagccagcggggatcatgatcaggcaggttgagaaagtgctgaagtgaatgtgtttcgagcatttcgcgtagttcaaacagctgctcggcgtaggattgatcgaattgcttcatgctccactggccgcgcttttcgctttgaataagattataacggccgaattttaaaagatattctcttactacaaccgggctgacacccgcggcccgagccagttgcagttcagaaaaagtttccccagggcgtaactggcgctggtttatcatcgtgaaaaaagcctgctcaaacactttgttttgttcactcattgaagcggtagtacaggcgaaaccgtcatcatggtcaggtttacgcgcaatcacatagtcgtttccaacctgcgttaagacgccgcattcgcgtaagtggctgagaatatgacgcactgtagtgcggctgatgttgtacatttccgccagcgcactttgcgatggaagtggggaagggatatgaccccgcgccatatcatcaatgacctggttaatcacattgtggcgtaaattttgtgaacgactcatattttcctccttgtgagtccattaaaacccgatttaaaacatttttatgcgtgtgttttcacaaaacagattttccgttccgctgccatttttcattttcattgatatctaaggcaacaaaaaatggagagccgaatcatgtctacgatgaatgttttaatttgccagcagccgaaagaattagtctggaaacaacgcgagatacctattccgggtgacaatgaagcattaataaaaattaagtctgtcgggatttgcggtaccgatattcatgcctggggtggaaatcaaccattttttagttatccacgtgttttaggccatgaaatatgtggggagattgttgggctgggtaaaaatattgctgatcttaaaaatggtcagcaagttgctgtgatcccttatgttgcctgtcagcaatgcccggcgtgtaaaagcgggcgtaccaattgctgtgaaaaaatttcagtcattggcgtgcatcaggatggcggttttagtgagtatttgagcgtgccggtggcgaacattttgcccgcagacggtattgacccgcaggcggccgcattgattgaacctttcgctattagcgctcatgcggtgcgtcgcgcagccattgctcccggcgagcaggtgctggtggtcggggcggggccaatcggtctgggcgcggcggcaatcgctaaagctgatggcgcacaggtggtggtggcggataccagtccagcgcgccgtgaacatgtggcaacgcgtctggagttgcccgtgctggacccgtcagccgaagattttgacgcgcagctgcgggcgcagtttggtggttcgctggcgcagaaagtgatcgacgcgacaggtaatcaacatgcgatgaataacaccgtgaatttgattcgtcacggcggcacggtggtatttgtcggcctgtttaaaggtgagttgcagttctccgatccggaattccataaaaaagaaacgacgatgatgggtagccgcaacgccacgccggaagattttgctaaagtcggtcgactgatggcggaaggaaaaatcactgctgacatgatgttaacccatcgctatccgttcgccacgctggcagaaacctacgagcgcgatgtgattaacaatcgtgagttgattaagggtgtaattactttctgataaggcgagattattaaagttgccatgcagcgtccggggaagtgttgggcgctgtttttttttctgtttctcaatgatgttttgtaggccggagaagatgtgtaggtcgcaccttatgcgacctacacatcagtcagaaattacccttcacgttccacaactttaatttccaccatgccgatcccgagcttacgcggcgagtgtccgaggatattcccttcgttggttgagacaggttccggcggcacaattaccagtgtgtcggcatcggttgggttatcgaaatgcagtgtggtggtggtcacttcattgcccagcacaagagtttgttcttcattgcctacgcgtaccggaataggacggctggcgttattgccgtatgctttggcggtaatcaccaggtcaaatttcttcggcagcggatgcttgtactcgatttttacttcatcgcccagctgcgcgttggaccagcggccccacgactctggacgggaaatcccactaaactgtttcacctcttctggcgcaccggcgacgttgaagatgaaactgtcggctttgtagcgaatatcgttatcaacaattttcagcgtatcgacattgcctttataacgcgccatgtcgatgaccgtatctttaaatgccgttttgccctgccatgttgttttgtcaacatgctgaacaatttgctgaccgccaagctgcccttgcgagacacaccagtcggtggagagtgccagttccggagcccagagttgtgccatcttatagcaacggtcaacccagacgaaattgtcgcgtggagcgaaatcggccagctggaaacgcagcggtgctgagtattcgctttccggcagcggttccacgcgtttgtctgaaacccgcaacagcagcggcaaacggaaatggctacccgagaaggcaatcatgtttttctgctggtcgatggtgaactctttcatctctttagggaatttccacaggcggatgatatccggcttccacgccaatgttttctctttgatattgaggaagatttccgacattgactgcccggataaactgctacgaccaagtccgagatagttatcgccaccgagaatgtccagcaccgtcgcgccgttatccatcgtgttacgcttcactgccagcgtctcttgctgcggcttgtcgccacgaatgacaaaaaacaggttattgcgatcctgcttattgaggtatttccacgccgtgttgttcatcgctaaatggtcagaagagacgacgatgacggtatctttaaaccacggtgacgctttgattttgttgataaacgccgcgatattctcctggctgcaacttaccgcgctgaatgactggttcggcttaccgtcaaaatcatattttttgcggttacaggtacgcgagataaaaccatccgggtgatgggtatcgactgtcagggtaaacagtgagaatcgctgactagaacgggaaagctcttcaaactttttccacgcttcatcgagaacggtatcgtcgtagaatccccagtcgttgcgatagtgcgggtcggccaccacgcttttcagctcttctgagccgtataaatggtcgaaaccgtgcgacttcaggaacacatctttaccggcaaaacgcagattcgcgccctgcacgaaatagttctgataacccgagtttttcaggatatcgcccagacagatgttctgcgggaagaagctggaaacagaagcggaggcgttgccttcaaagggggcaaacagcggtatgccgcactgagaagccaccatgcccgcaatcgtgtaatccgttcctggcagctgctgcgtgtggctgaaatccaggccttcatttttcaacgcgcccagttcaggcgtgagatccgggaaagcttcgttatcaaaataggttcgctcgagactttcgccgtagatataaaccaggttgagtttcgggtcagggatagttttcgacggctctttataataagccgcaaagtccgggtcgccgtcgcgtgactgggatttcaccagttccgttatctgacgaaatgccgggctggcgtccaccgaacccagcgccagtaagagcgccagcaggctgtaaccaaaatggtgcggatgatgacgacgacggcgcaggatccagcccagcgcaccgaacaccgccgtcagccccagcacaatgccgatacccggcaggatgtatttgctgacgccagcaccggtcaggctattggttaaggtatagagaaccgcgtcgttaataccatcgccagtaaaatagtcgctggcaaacagggtgatatttaaaacgacaaatagccccagcaccgttaatgtggctgcaaaccaccaggtgttacgtcccgctttccatgcgtaaatcagcacagaggcgagaaaaagggcgaaagagagtagttctgacaacgggcgatcctcactaaaccgggccgtttagccaacgtttaagctttttgagaagcacaatgtaatggcgtcgccatattgctgcaattctagtgtcaaaaaaatgcgatgttgttaggaattagtttataaacagacttttttgatcgcggtcgcttcccgtgtaacagggggaaaaccgtccaggagcagggaaaagggcaggagagagccgcgtcagccgggtaacagctaaaacgcggcgtttcgcggttcaggaaatgaagttcagcccctgctttaacaccagatcgcaggctttggttttcaccttttctgccagcggagtcgttccgatgttatccagattgagttgctgaccatctttggttttcagcaaaccctgaatgccatccagatagttggtgtcttctttttgttcttcactgttcaggcccagcttttccagcacctggttcttgatgttttcggcatcggttaccgacgccagcttttgcttcgcgcagtattgcagaatgcctgcggcattgttcatgttatctgcgcttaaggcctggttcccgctgctaagcaagttagttaatgacgcgagcgaccaaccgccttcctgtgtcgtgctgttttggttgccaagttcgctggcggcgctggagagcgcatctttccaggacgcagcatgcaccccggtggaaattaatgcgctggcggcaatggcacagcacagaagatgtttaacagttttcatcatcattactcaaggtggaattgtgtcgcagtataccgccagaaacggggattaatactctttacctgttacccggctacggtagctatcccagttgaagatcacccacaaactgttacccaggcgcatacggtccatcacgcgttcgcccagcaacttggtcatctcttccatattactgttggtcagcatcccggttgggcgtttggaagaagagcggcgatcgacgatctggttgatgatcactttttcgtatttcgattcggtctgcacgccgatctcatcgatcaccagcagatcaacgttgctcagatcgttaagcagttgttcttcgctggtactgctattcctgaaggtatctttcatcgccgacataatatcggccacggtgatgatcaatacggatttaccgcgtagcagcagctcgttgcagattgccgccgccagatggtttttgccggttcctggcttaccagaaaagatgaagctggcgatgttgccgtcaaactcttcgacatactggcgcgctttgcttaacgcattcatctgcccttcacactcaacgcgatagttctcaaaggagcagttctgatgcagtggacgaataccggagcggttaaaggtgcgctgcattttcatcgcccgattttcacgttcgagagcggcggagcggatcgccccttgttctttctgccaggccagtagctcttcacccgttttgaatgcaggtttgatatgggcaggcatcattttttgcaggcgttgcatcaggtcgccaacgtttttcatcgttaccctctgaatcctggtggaatttggctgtcaggttcgctgaccgtattcacatctcgtttcggcagtccgccgttgctggcacgaccgatttgcaggctgcgcgccagtttttgttgccactgcacatggtgaaagactttaccttccgcctgccagtaggcaatgaatgaggccagttcttcggtggtcaccggctctcttagtgccacgccccatagcgccgccaggcggataaagtcggcatcgggttgccagtccggatacatggcgaatttccccatgggtacagcaacgggagcggcttgcggttcctgatagagttgatcgtccagagcgacatcgcttcccggacgcgccagcttttcttccagcgccagcagttcagccaggcgtgcaggcgtgacggcataaaacgccggggcattgttagcaaatacggcaaccacaccgccttcagcttttgccagaacggtttggtgatcgtgtaccagggcgtcaataccaacgacgtccggggtcaaaactctggaagacatactgtttctcaaatatggaatgatgaacgagaagggagataacttttatagtaacacacggaggagaggaggctgtctctcatccgtgtgcttaagcgaggcaattttatacgcgagggcgcttgcggtacaaccataatccaggaatggaaagaccgatggataacgcaccaacaatcgatgaagctgtaagaaagttggttaacagggtaatcatcaacggttcgctataacctaactggctgatttttaccgccgaaatcattgcggtataagccgatatgcccgggaacatagggataacggccgccacggtaaacactttcggatgcgccagataccagcgcgaccattgaataccaatggtgccgaccagcatagaagccataaaagttgaccactcaatattcagcccgctggtcattaagatcattcgtgaaccatggccaatcgcgccaagcagcgcacaccagcgtaacgcccgcacgggaacgttgaacaccatcgcaaagccgaccgctggaatggcggcgaggatcatatcctgcgccaatgcaaacagaaactcgatcacacccatccgcgtagcccccaaatcgtcagtgccatcaccacgccgacgcaggtagccagcgtcagcagactggcgatcgcccagcgtgccagtccggtattgatgtggcctttaaacatatcggcgacggcattaatcaacggaaagcccggcaccagcagcagaacgctggcggccatcgcaatggtgggtgtatcgctgaaagtggggagttgcaaaagcaatccggaaatggtggtggcggcgaaagcggtaaggcaaaagttgatctgtggatgaagatgacgttgtgccagcagctggcggatatacatcgcggtcgtactggcaaagaaggtgatgacggcaccatcccagccaccgttattgagtttacagaaacaggcgcaagaaaggccaaccattaaggctaccagccatcttgggtaacgtaatggctgaatttggctaaatcgtttctctacgcctttgtaatccagcagatgatgctccgcaagaatcacaatgtgctggacttcagtcaccacatgcatattaatgccgcgatcgtgattttttcgtgtcgatgtcaggcattgcccatctttaatagttgtcagcactatggcgttcgaagagatagaactttcgacgctgtccattcccaacgcccgacccagtcgtgaggaaagctcatcaaccaacgcgctttccgcaccatgttgcaaaagaaataatccacactggatacaaagccgcgttacggctcgctgttgctcagtttgcataactcgccctttgtcatagacgtgctgcgtattgttcagataatgagaatccatttgtatcatgaagcacggttgttttgcggtaggttaagatcaaaattgcgctgattaatcctggttatcgggacaagctcggtgataaaaagcgaattatctctcgccgcaaacaaactatcacatgaatattatcactataatgaatttattgttttagcctttacgggtcaggataatagatagctgggcgcgttttttagtgttaacaagttaaaatcatcagattttattgaataaatattgattgtgtgattcccgcattctgcgggaagggatatcatttaattataaattaaatgaatgtgatttctgtttttcattaagtattcctaacaacttaatgtagatattttaaatgtctccaggctatttcaccaggttatcatttgatgctaaccttctgacacatgcagtggagttgttgtgcagcaggagtatgctgatatgaaagtgaatgctaaggataatttattcgcttaatctattaatttgctggaaacatttaaggaatgaatatcctgaataaaccatcataatttttagacagtggatgtggaggaaatatgttgccaggatgctgcaaaaatggaattgttatcagtaaaatacctgttatgcaagcagggttaaaagaggtcatgaggactcacttccctgaatatgaaataatatccagcgcctctgcggaggaccttaccttattacaattacgtcgttccggattagtcattgctgatttagccggtgaaagtgaagatccacgttctgtttgtgaacattattattctttaatctcacaatatcgggaaattcactgggttttcatggtgtcacgctcctggtattcccaggcagtagaactgctcatgtgccctacggcgacgttattgtctgatgttgaacccattgagaatctggtcaagaccgtacgttccggcaatacgcacgcagagcgtatcagcgccatgctgacttctccggcaatgactgaaactcatgattttagctatcgctccgtcattctcactctttcagagcgcaaggtactgcggctattaggtaaaggatggggcatcaaccagatagcttcattgcttaagaaaagtaataaaactatcagcgcccaaaaaaacagtgcgatgcgtcgactggcaattcacagcaacgctgaaatgtatgcatggataaatagcgcgcagggtgcaagagaacttaacttgccttctgtttatggagatgccgcagaatggaacacagccgaattaagaagagaaatgtcgcactcatagaaaaatgcgtcatgagtagtatcggtattgagagtttattcagaaagtttgcgggtaacccttataagctccatacctataccagtcaggagtcatttcaggatgccatgtcgcggatctcgtttgcggcggtcattttttctttttctgccatgagaagtgagcgcagagagggattatcttgcctgactgaactggcgattaagtttccgcgtacccggcgtttagttattgcggatgatgatattgacgctcggctgattggttcattgtcgccatcaccgctggacggtgtattaagtaaagcgtcaacgctggagatttttcatcaggaactctttttgtcattaaatggtgtacgtcaggcgaccgaccgactgaacaatcagtggtacattaaccaaagccggacgctaagccccacggagagagaaatattgcgctttatgtcgcgtggctactcaatgacacaaattgccgagcagcttaaacgcaatatcaaaacgatccgtgcacataaatttaatgtgatgtcgaaactgggcgtcagttctgatgcagggttgttggaggccgcagatattctgttatgtatgcggcattgcgaagcaagtaatgtgttgcatccctattaatccgcatgatgccgggtttacttccccggcagtgctttcatttcagcgtacaatcgccacattgctgcacatccggtaagcgataacgctggcagcaagtgcggcgcaccagcaggccatcgcgcagtaccacggtacgccagagtggattatcttcaccgttcgtgagcgttttctcaaaaaagagggcatggcgcagcgattcaaccgtcgcctcgccgagcagctgcttcatctcagtgagataccagttgatcaaataaccggtattactccagataagtttgccgttgatctctccggtcgcttctagtgcctgcacaaccggaaccagcgcctggctgattaacgtttccattcgctgctgcggcgaatgtggtgttgcgtttttatcttcacacatatcgacccagaaacaggcgacgcgtccggtttcgtgaaactcagcatggaaatgttccggcgacacatctaatgccttttcctgcgtcagtagcgccagcattaatggtggcaccatcaggccgatataccattgtgcccatagtgagatcagcggtttgttctcgcggatcatcgttggttggttgcgatagatatgatcggaatagaccgcgagtagagaacttagcgcattcggtgatgaccattgcgccagcgtcatggcgttaagcggagcgggttcatccaggcggataaactcgagcaaatgttcacgatgtttggcgatcgtcgcacgtacggcttgtgcaagcccagcatcctgcggctggagatgcgttcgccagatgatatcttcatagagcggtgcggaacgataggccataatcgggatagtaatctaaatgataatgattgctaatcctagcgataggtttacccgatagcaagggatttctctggcttgcaaatgataaaaattatcatatgatattggttatcattatcaatgaaagagatgaaaccatgttgcaacgtacgctgggcagtggctggggagtgttgctgccgggattgctgattgcagggctgatgtatgcggatttatcgccggatcagtggcggattgtcattctgatgggattgatattgacgccggtgatgctgtatcacaaacagttacggcattacattttgctaccatcgtgcctggcgcttagtgctggcatcatgctgatgctaatgaatttgaatcagggatgaaaaatcaaggaagaaacaagaaaggaagtaaagataattggtgcgaggggggggacttgaacccccacgtccgtaaggacactaacacctgaagctagcgcgtctaccaattccgccaccttcgcacagtcatcttactttttttgatatcgcctcgtttggtgcgaggggggggacttgaacccccacgtccgtaagaacactaacacctgaagctagcgcgtctaccaattccgccaccttcgcccagtgcgagcaatatcaacgtggtttttggtgcgaggggggggacttgaacccccacgtccgtaaggacactaacacctgaagctagcgcgtctaccaattccgccaccttcgcataccatcaattcttaaaaagaattgctaccacggaggcgcattctagtggttttcagcttttcgtcaatagttaattatcgccggaggtgtaattgctggaaaaatgtccatcaggaaactaacgtgcaggtttggtagttttgtaggtcggataaggcgttcacgccgcatccgacacggtatttgggtgcagatgccagatgcgacgcgggcgcgtcttatctggcctacgaagggctaacgtgcaggttttgtaggtcggataaggcgttcacgccgcatccgacacggtattcggcgagataattaacctttcttcgcctggcgggtcataatggcgcgatacaccttgaaacgcccggtttgcgcaatcacttcatggaagccaaatgtctcatccagcacgtccgggtaaggcaggaaggcgttcgctacaattcgcagctcgccgccgctattaagatgacgcaccgcgccgcgaatcagcgtttgcgccgcatccaggctggtttgcatcccatcgtggaacggcgggttggagatgatcatatcaaaacgacctttcacctcggaaaagacgttgctggcaaagacttcaccttcaacaccgttggccgcaagtgttgcgcggctggcttctaccgctggcgcagagacatcgcacaaggtgagacgaattttcggcgaatggcgcgcaaaggcaactgaaagcacacccgcgccacagccgacatccagcactttacctttcgtgtgcggggttaacgtcgagagcagcaactggctaccgacatccagaccgtcgcggctaaacacgccaggcagcgttttgaccgtcaggccatcgacgctgtattcgccccagaatttatcggcatcaaataccggctgtttttccagacgaccaaaatagaggccacagcgacgagcgctgtcgactttattcaacggcgcataatctgccagcatctgctcggcgctgcgcacgccgctgcggttctcgccaacgacaaaaatatctgtccccactggcagcagagaaagtaaattcatcaactggaactgggcttccggtttgttcttcggccagtagtaaatcagcgtatcgcaatctgcgacgtcatccaccgtggcgaccagactgaaacgggcgttatcccccatctggcggcttaatacctgccagtggtggaattgctgggtatgagcacggctggccgcggtatctaaacgcgcgggcaggtcatcctgtaagtctccggcaaacagaatacggctttgttcgaaatcatcactgtgacgcagcaagacttcacttgccggggtaaatgcagacatggaatgctcctcaattgatactggcggcgattatagccatatgttggcgcggtatcgacgaatttgctatatttgcgcccctgacaacaggagctattcgctatgacatcccgacgagactggcagttacagcaactgggcattacccagtggtcgctgcgtcgccctggcgcgttgcagggggagattgccattgcgatcccggcacacgtccgtctggtgatggtggcaaacgatcttcccgccctgaccgatcctttagtgagcgatgttctgcgcgcattaaccgtcagccccgatcaagtgctgcaactgacgccagaaaaaatcgcgatgctgccgcaaggcagtcgctgcaacagctggcggttgggtactgacgaaccgctatcactggaaggcgctcaggtggcatcaccggcgctcaccgaattacgggcaaacccaacggcacgcgccgcgttatggcaacaaatttgcacatatgaacacgatttcttccctcgaaacgactgatttaccggcggcttaccacattgaacaacgcgcccacgcctttccgtggagtgaaaaaacctttgccagcaaccagggcgagcgttatctcaactttcagttaacgcaaaacggcaaaatggcggcgtttgcgattacgcaagtggtgctggatgaagctacattgttcaatattgcggtcgatcctgactatcagcgtcagggattgggaagggtgctgctggaacatctgatcgacgaactggaaaaacgcggcgtggcgacactatggctggaagtccgtgcctcaaatgctgccgccattgccctgtacgaaagtttaggctttaacgaggcgacgattcgccgcaattactaccccaccacggacggtcgcgaagacgccatcatcatggcgttgccaatcagtatgtaagacaaggtggaataatgaagtgggactggattttctttgatgccgatgaaacgctgtttacctttgactcattcaccggcctgcagcggatgtttcttgattacagcgtcacctttaccgctgaagattttcaggactatcaggccgttaacaagccactgtgggtggattatcaaaacggcgcgatcacttcattacagcttcagcacgggcgtttcgagagctgggccgaacggctgaacgtcgagccgggtaaactcaacgaagcctttattaatgcgatggcggaaatctgcacgccgctgccgggcgcggtttctctgcttaacgccattcgtggcaacgccaaaatcggcatcatcaccaacggctttagtgccttgcaacaggtgcgtctggaacgcacgggcctgcgtgattacttcgatttgctggtgatttccgaagaagttggcgttgccaaaccgaataagaaaattttcgattatgcgctggaacaggcgggcaatcctgaccgttcacgcgtgctgatggttggcgacactgccgagtccgatattctcggtggcatcaacgccgggcttgcgacctgctggctgaatgcgcacaatcgcgagcaaccagaaggcatcgcgcccacctggaccgtttcttcgttgcacgaactggagcagctcctgtgtaaacactgattgcctcccccccgttgatgggtaaaatagccgcaatttttcgttttcaacaagcgcggcgcgatgccgcttactcaagaagaaagaattatgacgttgtctccttatttgcaagaggtggcgaagcgccgcacttttgccattatttctcacccggacgccggtaagactaccatcaccgagaaggtgctgctgttcggacaggccattcagaccgccggtacagtaaaaggccgtggttccaaccagcacgctaagtcggactggatggagatggaaaagcagcgtgggatctccattaccacgtctgtgatgcagtttccgtatcacgactgcctggttaacctgctcgacaccccggggcacgaagacttctcggaagatacctatcgtactctgacggcggtggactgctgcctgatggttatcgacgctgcaaaaggtgttgaagatcgtacccgcaagctgatggaagttacccgtctgcgcgacacgccgattctcacctttatgaacaaacttgaccgtgatatccgcgacccgatggagctgctcgatgaagttgagaacgagctgaaaatcggctgtgcaccgatcacctggccgattggctgcggcaagctgtttaaaggcgtttaccacctttataaagatgaaacctatctttatcagagtggtaaaggccacaccattcaggaagtccgcattgttaaagggctgaataacccggatctcgacgctgcggttggtgaagatctggcacagcagctgcgtgacgaactggaactggtgaaaggcgcgtctaacgagttcgacaaagaattgttccttgcgggcgaaattactccagtgttctttggtactgcgctgggtaacttcggcgttgatcatatgctggatggcctggtggagtgggccccagcgccgatgccgcgtcagactgatacccgtaccgtagaggcgagcgaagacaaatttaccggcttcgtatttaaaattcaggccaacatggacccgaaacaccgcgaccgcgtggcgtttatgcgtgtggtgtccggtaaatatgaaaaaggcatgaagctgcgccaggtgcgtactgcgaaagatgtggtgatctccgacgcgctgacctttatggcgggtgaccgttcgcacgttgaagaagcgtatcctggcgatatccttggtctgcacaaccacggcaccattcagatcggcgacacctttacccagggtgagatgatgaagttcaccggtattccgaacttcgcgccagaactgttccgtcgtatccgcctgaaagatccgctgaagcaaaaacagctgctcaaagggctggtacagctttccgaagagggcgcggtgcaggtgttccgtccgatctccaacaacgatttgatcgttggcgcggttggtgtgctgcagtttgatgtggtggtagcgcgcctgaagagcgaatacaacgttgaagcagtgtatgagtcagtcaacgttgccaccgcccgctgggtagaatgtgcggacgcgaagaaattcgaagagttcaagcgtaagaacgaaagccaactggcgcttgatggcggcgataacctcgcttacatcgctaccagcatggtaaacctgcgcctggcgcaggaacgttatccggacgttcagttccaccagacccgcgagcattaattcttgcctccagggcgcggtagccgctgcgccctgtcaatttcccttccttattagccgcttacggaatgttcttaaaacattcacttttgcttatgttttagcggatatcccgagcggtttcaaaattgtgatctatatttaacaaagtaatgacatttctgacggcgttaaataccgttcaatgcgtagatatcagtatctaaagccgtcgattgtcattctaccgatattaataactgattcagaggctgtaatggtcgttattcatcacccatcgcttttgtgatggcgaccattgacttctgtagagggtgaagtctctccctattcagcaatgcaacctcgtgttgccaggctcaaattacgagcaaacatacaggaataaatcgatgactatgacaagactgaagatttcgaaaactctgctggctgtaatgttgacctctgccgtcgcgaccggctctgcctacgcggaaaacaacgcgcagactaccaatgaaagcgcagggcaaaaagtcgatagctctatgaataaagtcggtaatttcatggatgacagcgctatcaccgcgaaagtgaaggcggccctggtggatcatgacaacatcaagagcaccgatatctctgtcaaaaccgatcaaaaagtcgtgaccctgagcggtttcgttgaaagccaggcccaggccgaagaggcagtgaaagtggcgaaaggcgttgaaggcgtgacctctgtcagcgacaaactgcacgttcgcgacgctaaagaaggctctgtgaagggctacgcgggtgacaccgccaccaccagtgaaatcaaagccaaactgctggcggacgatatcgtcccttcacgtaaagtgaaagttgaaaccaccgatggcgtggtccagctctccggtaccgtagattctcaggcacaaagtgaccgtgctgaaagtatcgccaaagcggtagatggtgtgaaaagcgttaaaaatgatctgaaaactaagtaattcgtcgtaattcgtcctcccgaactttgtcgggaggcgcgatgtgcaccacactaaaaatatcgcattgagtgattttcacgctcatatcaagcggtgacattaactatggtaaaggagacgcttatgtttcgttggggcatcatatttctggttatcgcgttaatcgccgccgcacttgggtttggtggtctggccggtactgctgcaggcgcagctaaaattgtctttgtcgtcgggattattctgttcctggtgagtttgttcatgggccgaaaacgaccctagatttcagaccattaagaaaattttatccaaagccagtccagcggactggcttttgcggttttagcgaataataaattgcgttactttgtccttctttcacaacaaaaacaggaaggcagaggtggggcagcgaatacctgtaacgcttggtaatattgcgccgttgtcgctgaggccgttccagcctggacggattgctctggtgtgcgaaggcggcggacagcgtggaattttcacggctggcgtgctggatgagtttatgcgcgcgcagtttaatcctttcgatctttatctcggcacatctgccggggcgcagaacctctcggcgtatatctgcaatcagcccggttacgcgcgcaaagtcatcatgcgctataccacaaaacgcgaatttttcgatccattgcgctttgtccgtggaggaaatcttatcgatctcgactggctggtggaggccaccgcaagccagatgccgttgcaaatggataccgcagcgcggctatttgacagcggcaaatcgttttatatgtgcgcttgtcgtcaggatgactatgcgccgaattactttttgccaaccaaacagaactggctggatgtgattcgcgcctccagtgcgatacctggcttttatcgtagcggagtgtcgctggaaggcattaactacctggatggcgggatcagtgatgcgattccggttaaagaggcggcaaggcagggcgctaaaacgttggtcgtcatccgcaccgtgccgtcgcaaatgtactacacgccgcagtggttcaaacgcatggaacgctggctgggtgacagtagcctgcagccgctggtcaatctggtgcagcatcatgaaaccagctatcgtgagattcagcaatttattgagaaaccaccgggccagctgcggatattcgaaatttatccgccgaagccattgcatagtattgcgctcggcagtcggattccggcgctgcgtgaagactataaacttgggcgtttatgtgggcgttattttctggcaacggtcggtaagttattgactgaaaaagcgccgcttacccgccatctggtgccagtggtgacgccggaatcgatagtcattccgcctgcgccagtcgctaacgatacgctggttgccgaagtgagcgacgctccgcaggcgaacgacccgacatttaacaatgaggatctggcttgatttgccgttttatcgacacccactgccattttgatttcccgccgtttagtggtgatgaagaggccagcctgcaacgcgcggcgcaagcgggcgtaggcaagatcattgttccggcaaccgaggcggcaaattttgcccgtgtgttggcattagcggaaaattatcaaccgctgtatgccgcattggggttgcatccggggatgttagaaaaacatagcgatgcatcgctggggcagttacagcaggcgctggaaaggcgtccggcgaaggtggtggcggtgggggagatcggtctggatctcttcggcgacgatccgcaatttgagaggcagcagtggttactcgacgaacaactgaaactggcgaaacgctacgatctgccggtgatcctgcattcacggcgcacacacgacaaactggcaatgcatcttaaacgccacgatttgccacgcactggcgtggttcatggtttttccggcagcctgcaacaggccgagcggtttgtgcagctgggctacaaaatcggcgtaggcggtactatcacctatccacgcgccagtaaaacccgcgatgtcatcgcaaaattaccgctggcatcgttgttgctggaaaccgacgcgccggatatgccgctcaacggctttcaggggcaggctaaccgcccggaacaggccgcccgtgtgtttgccgtgctgtgcgagttacgcccggaacccgcggatgagattgccgaagtgttgcttaataacacgtatgcggtgtttaacgttcgtgggtagtctgcccttcgtaagccggataaggcgttcacaccgcatccggcagtcgacgcacaatgcctgatgcgacgctgacgcgtcttatcatgcctacaggtctgtgccgaaccgtaggccggataaggcgttcacgccgcatccggcagtcggcgcacaatgcctgatgcgacgctgacgcgtcttttcatgcctacaagtctgtgccgaaccgtaggccacatccggcatgtcacaaatacagcgccggaaatatcaaccggctcaccccgcgctcccgtaacgcatcagccaactgctcaacgtcttccggcgtggcactcgcccagctttgcgcctcgccatacacgccgtgggcatgaaacgcgttcaggcgtaccggaacatcgccaagtcccttgataaacgccgccagttcttcgatgtgttgcaaataatccacgtggcctgggattaccagcaaacgcagttccgccagcttaccgcgctctgcaagcaaacagatgctgcgcttaatctgctgattatcgcgtccggttaattgctgatgacattcgctcccccacgctttgagatcgagcattgcgccgtcgcacaccggaagcaatttttcccagccggtttcgctcaacatgccattactgtccaccagacaggtgaggtggcgcagttgcggatcatttttgatagcagtaaacagcgccaccacaaacggcagctgggtcgtggcttcgccgccgcttaccgttatccctccaataaacagcaccgctttgcggatatggctaagcacctcatccacgctcatggattgcgccattggtgtggcatgttgcggacacatcttcaggcaggtatcgcactgctcgcagactacagcgttccacgccactttgccgtcaacaatctgcaacgcctgatgcggacactgtggcacgcactccccgcaatcattgcaacgtcccatcgtccacggattgtgacagtttttgcagcgcagattgcagccctgcaaaaacagagccagacgactgcctggcccgtcaacgcaggagaaggggataatcttactgactaaagcgcatctgctgttcatggcttatcacgcgcggctggcgttccagaatacgagtgttgcgtgcggcctcttcgcccagccaggtggtattggtacgtgagccttcggcacgatatttttccagatccgacaaacgcaccatataaccagtaacgcgaaccagatcgttaccgctgacattggcggtaaattcacgcattccggctttaaaggcaccgaggcaaagctgtaccagcgcctgcggattacgtttgatggtttcgtcgagcgtcagaatgtcgctgattccagagtaataataagcatgatgcggggcgacggtttgcagatgggtaatcggatccggttcatcaccatatggcaagcgtgcgccaggcgtggtgccgatatcggaactgatccccgactgtgcgtgtagcatggcgcgtttttgccagccatatttcacgggggtattggcgacaaactccgccagttgtgcgctgatgcgataacccacttcatttgcagcggcttctttaccgtaacgtgcgacaattccttctttctcacacagtaagttaactgcttccgccagtccgtacatgccaaacattggcacaaaacgttcagggttaatcagcccttctttcaccaggaagctattctcaaagaagtgtgattgttgatagaggaattcacaccgcgcatcgatgatggcgatctgctgctggcagtagtgcggtagagtgcgcgcaaagaagtcatccagcgattcgctgcgctcggcaatggctttcaggttaaggcgtaccagcgtgctgccaccacccgccagcggcagtgagttgtaacagctcacaatcccgtagcccccttttgtgaaaattttatcatgcacgggaccgttggcgatgtgcggtttgctacattcacagatgttcttcgccacttccagcagcaggtcatcaggggtgatttcaggattgtagataaaggtcaggttcggtgaaacctgcttcaactctgcgtctgcacgtaagattgcgcgggtaatgggcgaatcagacgggccgatattggcgtgcataaaggcatctggcagggttctgtcgaggtaacgccagaaacgttttattcgaatatctatctcgtcttgtgttagaattctaacatacggttgcaacaacgcatccagttgccccaggtagaccggcatcgatgtgaccgacggtacgtggtggtaaagaatggtcagcagagagagtgcgtcatcaagatctttcgcgccttccagctccagccattcggaaccgttcgccagaaaacgggcgtaatcgggtaagacatagcgcggtttgtacggcgcatgaccttcaaacatatcgcagattacaccctcatccagcgcgcggcgggcttcggcaggcaacgccgggtaaggcagattgttttctgcttccagtgccagaaaatggcgcttctgctccgggctaagcactgggctggtgacaatttgcaggcaacgttgttgcagtgcattttcatgagaagtgggcatcttcttttccttttatgccgaaggtgatgcgccattgtaagaagtttcgtgatgttcactttgatcctgatgcgtttgccaccactgacgcattcatttgaaagtgaattatttgaaccagatcgcattacagtgatgcaaacttgtaagtagatttccttaattgtgatgtatatcgaagtgtgttgcggagtagatgttagaatactaacaaactcgcaaggtgaattttattggcgacaagccaggagaatgaaatgactgatctgaaagcaagcagcctgcgtgcactgaaattgatggacctgaccaccctgaatgacgacgacaccgacgagaaagtgatcgccctgtgtcatcaggccaaaactccggtcggcaataccgccgctatctgtatctatcctcgctttatcccaattgctcgcaaaacctgaaagagcagggcaccccggaaatccgtattgctacggtaaccaacttcccacacggtaacgacgacatcgaaatcgcgctggcagaaacccgtgcggcaatcgcctacggtgccgatgaagttgacgtggtgttcccgtaccgcgcgctgatggcgggtaacgagcaggttggttttgacctggtgaaagcctgtaaagaggcttgcgctgcggctaacgtactgctgaaagtgatcatcgaaaccggcgaactgaaagacgaagcgctgatccgcaaagcgtctgaaatctccatcaaagcgggtgctgacttcatcaaaacctctaccggtaaagtggccgtgaacgcgacgccggaaagcgcgcgcattatgatggaagtgatccgtgatatgggcgtagaaaaaaccgttggtttcaaaccggcaggcggcgtgcgtactgcggaagatgcgcagaaatatctcgccatcgccgatgaactgttcggcgctgactgggccgatgcgcgtcactaccgctttggcgcttccagtctgctggcaagcctgctgaaggctctgggccacggcgacggtaagagcgccagcagctactaaggcttgatttgccggatgacgcagcgatgctcatccggttccccgattacctcgtctcttttccacgggaggttaccttgtttctcgcacaagaaattattcgtaaaaaacgtgatggtcatgcgctaagcgatgaagaaattcgtttctttatcaacggtattcgcgacaacactatctccgaagggcagattgccgccctcgcgatgaccattttcttccacgatatgacaatgcctgagcgtgtctcgctgaccatggcgatgcgagattcaggaaccgttctcgactggaaaagcctgcatctgaatggcccgattgttgataaacactccaccggcggcgtcggcgatgtgacttcgctgatgttggggccgatggtcgcagcctgcggcggctatattccgatgatctccggtcgcggcctcggtcatactggcggtacgctcgacaaactggaatccatccctggcttcgacattttcccggatgacaaccgtttccgcgaaattattaaagacgtcggcgtagcgattatcggccagaccagctcactggctccggcggataaacgtttctacgcgacccgtgatattaccgcaaccgtggactccatcccgctgatcactgcctcgatcctggcgaagaaactggcggaaggtctggatgcgctggtgatggacgtgaaagtgggtagcggcgcgtttatgccgacctacgaactctctgaagcccttgccgaagcgattgttggcgtggctaacggcgctggcgtgcgcaccaccgcgctgctcaccgacatgaatcaggtactggcctccagtgcaggtaacgcggttgaagttcgtgaagcggtgcagttcctgacgggtgaatatcgtaacccgcgtctgtttgatgtcacgatggcgctgtgcgtggagatgctgatctccggcaaactggcgaaagatgacgccgaagcgcgcgcgaaattgcaggcggtgctggacaacggtaaagcggcagaagtctttggtcgtatggtagcggcacaaaaaggcccgaccgacttcgttgagaactacgcgaagtatctgccgacagcgatgctgacgaaagcagtctatgctgataccgaaggttttgtcagtgaaatggataccgcgcgctggggatggcagtggttgcaatgggcggcggacgccgtcaggcatctgacaccatcgattacagcgtcggctttactgatatggcgcgtctgggcgaccaggtagacggacagcgtccgctggctgttatccacgcgaaagacgaaaacagctggcaggacgcggcgaaagcggtgaaagcggcaattaaacttgccgataaagcaccggaaagcacaccaactgtctatcgccgtatcagcgaataacggtatactgatctgatcatttaaatttgaagcactgagtacggagaacatatgaaacgtgcatttattatggtgctggactcattcggcatcggcgctacagaagatgcagaacgctttggtgacgtcggggctgacaccctgggtcatatcgcagaagcttgtgccaaaggcgaagctgataacggtcgtaaaggcccgctcaatctgccaaatctgacccgtctggggctggcgaaagcacacgaaggttctaccggtttcattccggcgggaatggacggcaacgctgaagttatcggcgcgtacgcatgggcgcacgaaatgtcatccggtaaagataccccgtctggtcactgggaaatcgccggtgtcccggttctgtttgagtggggatatttctccgatcacgaaaacagcttcccgcaagagctgctggataaactggttgaacgcgctaacctgcctggttatctcggtaactgccactcttccggtacggtcattctggatcagctgggcgaagagcacatgaaaaccggcaagccgattttctatacctccgctgactccgtgttccagattgcctgccacgaagaaacctttggcttggataaactctacgaactgtgcgaaatcgcccgtgaagagctgaccaacggcggctacaacatcggtcgtgttatcgctcgtccgtttattggcgacaaagccggtaacttccagcgtaccggtaaccgtcacgacctggctgttgagccgccagcaccgaccgtgctgcagaaactggttgatgaaaaacacggtcaggtggtttctgtcggtaaaattgcagacatctacgccaactgcggtatcaccaagaaagtgaaagcaactggcctggacgcgctgtttgacgccaccatcaaagagatgaaagaagcgggtgataacaccatcgtcttcaccaacttcgttgacttcgactcttcctggggccaccgtcgcgacgtcgcaggttatgcggcgggtctggaactgttcgaccgccgtctgccggagctgatgtctctgctgcgcgatgacgacatcctgatcctcactgctgaccacggttgtgatccgacctggaccggtactgatcacacgcgtgaacacattccggtactggtttacggcccgaaagtaaaaccgggctcactgggtcaccgtgaaaccttcgcggatatcggccagactctggcaaaatattttggtacttctgatatggaatatggcaaagccatgttctgataatgggtgcggcttgatgccctcaccccggccctctccctcagggagagggtgaaaacatgtagataaggataaaacaatggctaccccacacattaatgcagaaatgggcgatttcgctgacgtagttttgatgccaggcgacccgctgcgtgcaaagtatattgctgaaactttccttgaagatgcccgtgaagtgaacaacgttcgcggtatgctgggcttcaccggtacttataaaggccgcaaaatttccgtaatgggtcacggtatgggtatcccgtcctgctccatctacaccaaagaactgatcaccgatttcggcgtgaagaaaattatccgcgtgggttcctgtggcgcagttctgccgcacgtaaaactgcgcgacgtcgttatcggtatgggtgcctgcaccgattccaaagttaaccgcatccgttttaaagatcatgactttgccgctatcgctgactttgacatggtgcgtaacgcggtagacgcggctaaagcactgggcattgatgctcgcgttggtaacctgttctccgctgacctgttctactctccggacggcgaaatgttcgacgtgatggaaaaatacggcatcctcggcgtggaaatggaagcggctggtatctacggcgtcgctgcagaatttggcgcgaaagccctgaccatctgtaccgtgtctgaccacatccgcactcacgagcagaccactgccgctgagcgtcagaccaccttcaacgacatgatcaaaatcgcactggaatccgttctgctgggcgataaagagtaattgtgtttcgctgaaaggcgattgtcgtgtgaagccggagtgggagactgctccggctttttagtatctattcatcaatagcaactgatttatagatttactattatttttcatatggatagaaaataaaatctattcaagtatctattcacgaatctattcatttatgttcagccgtcatccaggaagggcatatcagcaactctggtggacaaccataaatttctgccattttgcttttgatgtttgagctaaaccgttccgtcttttcgatctattttagagaattaatcgagatacctaacattttacttacttcagcaagcgataatttatgcctgatacgcacggcggctagccaggaaatacgctggcttaacattatattgataatctcccgctcctggttttccagatcgatcatattcccttcctttggtattttaatcagcgagttaccttaccgcccccgctatccacgtcgacaactcccgtagctctttttcctggtccgggaagtcaaccaacagcgcttcgcactcttgttgcagcatatccgcgcggtacaggccgccttgcagtcgcccggcgagggcttccagcggcgcggggttgaggctgtcggtaaacacctgggcgcgggtgatatggcctttttcaacgtcgaaatgcagttccacgccgccccagctaaagcgttcatccagcagatgcgagaatgccggagcctgaccgaagttccattcccagctactctgacgggcaaaggtttcggcgaagtttggcaagtctggcgttttgtccggggagatgatttccgcttctacacgctcgccataatgggcgaaaaaggccttggttatggcctcgcaaacctgctcatgggtgatccccggcagcagctcggtgaggttggtcacgcgggaacgcactgaggtaatgcctttcgccgccagtttctttttatccggattgagatagtttgccaggcggctaaggtcggcattgagcagcaaggtgccgtggtggaagccacgatctttggtttcgcgataggccgatcctgagactttgcggtcaccttcggcggttttcaccaccagatcgttacgcccggacgcttcggcgctgacgccaagcgcgttcagcgcattgagcacaatcgacgtggagatggttttatcgtactccggcttgccagccataaaggtaaagcaggtattgccgagatcgtggaacaccgcgccgccaccgctactgcgccgtgccaggcggacgttatcttcttccatccgccgggtattacactctttccacgggttctgcgcgcgaccaatcactaccgtgtcggcattgcgccagagaaacagaacgcgctgcgtggcgggcatctggcgaaaaatacactcctccaccgccaggttaaaccacgggtcgtaagagtcagagatgagcaggcgtaatgtggacataacgatttcctttcttgtagtaatgggtcactcttttttctcgctttcttcctcttccggcaccggtttgctggcggttaacaggaagggcgattgctgccagcgggtacgtttaccctgtagcagcgtgcgggtcagcactacgccgattgccagtgaaagcagcaacatcaggcgtaaaatgttagtggtgttatccacctgttgggcttcggtggcgagcgtatgggtgtcgagcgtcaggcgcagatagccgagcggtccgtttttcccggcaattggttcgacaatctgctggttaaaatagccgcccgcttttttaccgtcgagcgccagccggtcgcgcacttcgacgctttcgccagaacgtgcgataagatcgccttgttcgtcatacacacccgcgtcgaggatacggctttcatccgttaactgatcgaggatcgcctgaatgcgtttttcatccggtgagtcggtacgcatcagcggtgcaacgttcagcgttacctgacgcgccagggtgcgggccagttcttccagctgtggattacgttgtcgctggtggttttgactaaaccatgacgctccctgcatcagcgccactaacaaggcaagacagaacaggacaatcactgcccgatgcagccggaatttcagttttgtgcgagccatcttccaccctttgaaaatttgagacttaatgttgccagaagcaatggatacaaggtagcctcatgcgttattttccctgcttcgaacgattttacaggagccttaatgcctaacattacctggtgcgacctgcctgaagatgtctctttatggcctggtctgcctctttcattaagtggtgatgaagtgatgccactggattaccacgcaggtcgtagcggctggctgctgtatggtcgtgggctggataaacagcgtctgacccaataccagagcaaactgggtgcggcgatggtgattgttgccgcctggtgcgtggaagattatcaggtgattcgtctggcaggttcactcaccgcacgggctacgcgcctggcccatgaagcgcaactggatgtcgccccgctggggaaaatcccgcacctgcgcacgccgggtttgctggtgatggacatggattccaccgccatccagattgaatgtattgatgaaattgccaaactggccggaacgggcgagatggtggcggaagtaaccgaacgggcgatgcgcggcgaactcgattttaccgccagcctgcgcagccgtgtggcgacgctgaaaggcgctgacgccaatattctgcaacaggtgcgtgaaaatctgccgctgatgccaggcttaacgcaactggtgctcaagctggaaacgctgggctggaaagtggcgattgcctccggcggctttactttctttgctgaatatctgcgcgacaagctgcgcctgaccgccgtggtagccaatgaactggagatcatggacggtaaatttaccggcaatgtgatcggcgacatcgtagacgcgcagtacaaagcgaaaactttgactcgcctcgcgcaggagtatgaaatcccgctggcgcagaccgtggcgattggcgatggagctaatgacctgccgatgatcaaagcagcagggctggggattgcctaccatgccaagccaaaagtgaatgaaaaggcggaagtcaccatccgtcacgctgacctgatgggggtattctgcatcctctcaggcagcctgaatcagaagtaattgctcgcccgccatcctgcgggcggcacagcattaacgaggtacaccgtggcaaaagctccaaaacgcgcctttgtttgtaatgaatgcggggccgattatccgcgctggcaggggcagtgcagtgcctgtcatgcctggaacaccatcaccgaggtgcgtcttgctgcgtcgccaacggtggcgcgtaacgagcgtctcagcggctatgccggtagcgccggggtggcaaaagtccagaaactctccgatatcagccttgaagagctgccgcgtttttccaccggatttaaagagttcgaccgcgtactaggcggcggcgtggtgccaggaagtgccattctgattggcggtaaccctggtgcggggaaatccacgctgttgctgcaaacgctgtgcaaactggcccagcagatgaaaacgctgtatgtcactggcgaagagtcgctgcaacaggtggcaatgcgcgctcatcgccttggcctgccgactgacaatctcaatatgttgtcggaaaccagcatcgaacagatctgcctgattgccgaagaagagcaaccgaaactgatggtaattgactcgatccaggtgatgcatatggcggatgtacaatcatcgcctggtagcgtggcgcaggtgcgtgaaacggcggcttatctgacgcgcttcgccaaaacgcgcggtgtggcgattgtcatggttgggcacgtaaccaaagatggctcgctggctggccctaaagtgctggaacactgtatcgactgttcggtgcttctggatggtgatgccgactcccgttttcgcaccttgcgcagccataaaaaccgcttcggcgcggtgaatgagctgggcgtcttcgcgatgaccgaacaggggctgcgtgaagtcagcaacccttcggcaattttcttaagtcgcggagatgaagtgacctccggcagctccgtgatggtggtgtgggaaggaacgcgtccgttgctggtggagattcaggcgctggtcgatcactcgatgatggcgaatccgcgccgcgtggcagtggggctggaacaaaaccgtctggcaatcctgctggctgtcttgcaccgtcacggtggtctgcaaatggccgatcaggatgtatttgtgaacgtggtcggcggcgtgaaggtaaccgaaaccagtgccgatttagcgttactgctggcgatggtttccagcctgcgtgacagaccgctgccacaggatctggtggtgtttggtgaagtcgggctggcaggggagatccgcccggtgcccagcggtcaggaacgaatttcagaagcggcgaaacacggttttcgccgggcgattgttccggcggctaacgtaccgaaaaaagcgccggaagggatgcagatttttggcgttaaaaaactctccgacgcgcttagcgtgttcgacgacttataatgagagatacggagggagatatgtcgtcatttgattacctgaaaactgccatcaagcaacagggctgcacgctacagcaggtagctgatgccagcggtatgaccaaagggtatttaagccagttactgaatgccaaaattaaaagccccagcgcgcaaaagctggaggcgttgcaccgttttttggggcttgaatttccccgacagaagaaaaccattggtgtcgtattcggtaagttctacccgctgcataccggacatatctaccttatccagcgcgcctgtagccaggttgacgagctgcatatcattatgggttttgacgatacccgcgaccgcgcgttgtttgaagacagcgccatgtcgcagcagcccacggtgccggatcgtctgcgctggttattacaaacttttaaatatcagaaaaatattcgcattcatgctttcaacgaagagggcatggagccgtatccgcacggctgggatgtgtggagcaacggcatcaaaaagtttatggctgaaaaggggattcagccggacctgatctacacctcggaagaagccgatgcgccacagtatatggagcatctggggatcgatacggtgctggtcgatccgaaacgtacctttatgagtatcagcggtgcgcagatccgcgaaaacccgttccgctactgggaatatattcctacggaagtgaagccgttctttgtacgtaccgtggcgatccttggtggcgagtcgagcggtaaatccaccctggtaaacaaacttgccaatatcttcaataccaccagtgcgtgggaatatggtcgcgattatgtcttttcacacctcggcggtgatgagatcgcattgcagtattccgattacgataaaatcgcgctgggccacgcacaatacattgattttgcagtgaaatatgccaataaagtggcgtttattgacactgattttgtcactacccaggcgttctgcaaaaagtacgaagggcgtgagcatccgttcgtacaggcgttgattgatgaataccgtttcgatctggtgatcctgctggagaacaacacgccgtgggtggcggatggtttacgcagcctcggcagttcggtggatcgcaaagagttccagaacttgctggtggagatgctggaagagaacaatatcgaattcgtgcgggttgaagaggacgattatgacagccgtttcctgcgctgcgtggagctggtgcgggagatgatgggggagcagagataaccgcgatgaaacggctcaaaggcgaggtataaaataagttttttgatgagttgaaaacctctctggaagaggctgtcgagattaaacaaggtttaaaagaatcagcacgggtgacccgctacgaatttgcggatactaaggctgttgtaggccggaaaaggcgttcacgccgtatccggcattcggtgctcaatgcctgatgcgacgcttaccgcgtcttatcaggcctggagattcacaacgtattgaaatttcttggtttgtaggccggataaggcgttcacgccgcatccggcattttacgcattacttcgcaatacgcttgtacttgatacgcttcggctccagtgcgtctgcgcccagcgtgcgtttcttgtactcttcgtactcagtaaagttaccttcgaagaactcaactttaccttcatcctggtagtccaggatgtgcgtggcgatacggtcgaggaaccaacggtcgtgcgagataaccatcgcacagcccgggaactccagcagggcgttttccagcgcgcgcagggtttcgatatccaggtcgttggttggttcgtcgagcagcagcatgttgccgccaacctgcagcagcttcgccagatgcagacgaccgcgctcaccaccggaaagttcaccaacgcgtttaccctgatcaacccctttaaagttaaagcggccaacgtaggcgcggcttggcatctcggtgttgccgatcttcataatatccagcccgccggaaacttcttcccaaacggttttgctgttatccattgagtcacggaactgatcaaccgatgccagtttcaccgtttcacctaaagtgatggtgccgctgtccggctgttcctgaccagagatcatacggaacagggtcgatttacccgcgccgttcggaccgatgatcccgacgattgcccctttcgggatcgagaagctcaggtcatcaatcagcaggcgatcaccgtaggatttacgcaggttgctgacttccagcactttatcgcccagacgcggtccaggtggaataaacagttcgttggtttcgttacgtttctgatattcggtgctgttcagctcttcaaagcgtgccagacgtgctttacctttcgactggcggcctttagttccctgacgtacccactccagctctttctcgatcgacttacgacgcgccgcttcttgtgaagcttcctgcgccaggcgctgatctttctgctccagccaggaggagtagttgccttcccacggaataccttcaccgcggtcaagttcgaggatccagcctgcaacgttatcgaggaagtaacggtcgtgagtaatcgccacaacggtgccttcgaagtcgtgcaggaagcgttccagccaggccacggattcggcatccaggtggttggtcggttcgtcgagcagcagcatgtctggtttttccagaagcaggcggcacaacgccacgcgacgacgctcaccaccggagaggttagcgattttcgcgtcccaatctggcagacgcagcgcatccgccgcacgctccagctgtacgttcaggttatgaccgtcgtgagcctgaatgatctcttccagacggccttgttcagcggccagcttgtcaaaatcggcatccggatcggcgtacagcgcatacacttcatccaggcgtttcagggcgttaaccacttcagaaaccgcttcttcaatggactcacgcacggtgtgttccgggttcagctgcggttcctgcggcaggtaaccaatcttgatgtctggctgcggacgcgcttcaccttcgatgtctttatcaatgcccgccataatgcgcagcagggtagacttacccgcgccgttcagacccaggacaccaatttttgccccagggaagaaactcagagagatgtttttcaaaatatgacgtttcggcggaacaactttgccgacacgatgcatggtataaacgaattgagccacgttggacttcgcctctatgtttatcgtgatgatgagttttcaaaggcgaagtgtagcctttttccccgcctaatcccagttggtcgatcaccttcgcagtaaaagtaaaaaagtgtccgtaacgtggcgtaaacggcaatgactggttagcataaatctattacgcggcatgacgctgcattgatgtatttacacttagaggatgcgcttgtggaaaaagccaaacaagttacctggcggctgttggctgccggtgtctgtctgctgacggtcagcagcgtggcgcgagccgactcactggatgagcagcgtagccgttacgcgcaaatcaagcaggcctgggataatcgacaaatggatgtggtcgaacaaatgatgcctggactgaaggattatccgctttatccctacctggaataccgccagatcaccgatgatctgatgaatcaaccggcggtgacggtcactaactttgttcgcgctaaccccacgcttcctcccgctcgcacgctgcaatctcgtttcgtcaatgaactggcgcggcgtgaagactggcgtggcttgttagcctttagcccggaaaagcccggaactaccgaagcgcaatgtaattactactatgcgaaatggaacaccgggcagagtgaagaagcctggcaaggggcgaaagagctgtggctaaccggcaagagccagcctaacgcctgtgacaagttatttagcgtctggcgtgcgtcaggtaaacaagatccgctggcgtatttagagcgtatccgtctggcgatgaaagcgggtaacactggcctggtaacagtgctggcagggcagatgcctgccgattaccagactatcgcctcggcaatcatttcactggcgaacaaccctaatacggtactgaccttcgcgcgtacaaccggagcgaccgattttacccgtcaaatggcagcggtggcgtttgccagtgtggcgcggcaggatgctgaaaatgcacggctgatgatcccgtcgcttgcccaggcgcagcagcttaatgaagatcagattcaggagctgcgcgatatcgtcgcctggcgtttgatgggcaacgatgtcaccgacgagcaggcgaaatggcgcgatgacgccattatgcgctcgcaatccacgtcgttgattgaacgccgtgtgcgaatggcacttggcaccggcgatcgtcgcggcctgaatacctggctggcgcgtctgccgatggaagcaaaagagaaagatgaatggcgttactggcaggcggatttattgctggaacgcggacgtgaagctgaagcgaaagagattttgcatcaactcatgcaacagcgtggtttctacccgatggttgcagcacaacgcatcggagaagagtatgagctgaagattgataaagcgccgcagaatgttgacagcgccctgactcaggggccggagatggcgcgcgtgcgcgagttgatgtactggaatctcgataacaccgcgcgtagcgagtgggccaatctggtgaagagcaagtcaaaaacagagcaggctcaactggcgcggtatgctttcaacaaccaatggtgggagcttagcgttcaggcaacgatcgccgggaagctatgggatcatctggaagagcgattcccgctggcttacaacgatcttttcaaacgctacaccagcggtaaggagatcccgcaaagctatgcgatggcgattgcccgtcaggagagcgcctggaatccaaaagtgaaatcaccggtaggggccagcggcctgatgcagattatgcctggtacagcgacccatacggtgaagatgttctctattcccggttatagtagccttgggcaattgctggatccggaaacgaatatcaacattggcaccagttatctgcaatatgtttatcagcagtttggcaataaccgtattttctcctcagcagcttataacgccggaccagggagggtgcgaacctggcttggcaacagcgccgggcgtatcgacgcagtggcatttgtcgagagtattccgttctccgagacgcgtggttatgtgaagaacgtgctggcttatgacgcttactaccgctatttcatgggggataaaccgacgttgatgagcgccacggaatggggacgtcgttactgatccgcacgtttatgatatgctatcgtactctttagcgagtacaaccgggggaggcattttgcttcccccgctaacaatggcgacatattatggcccaacaatcaccctattcagcagcgatggcagaacagcgtcaccaggagtggttacgttttgtcgacctgcttaagaatgcctaccaaaacgatctccatttaccgttgttaaacctgatgctgacgccagatgagcgcgaagcgttggggactcgcgtgcgtattgtcgaagagctgctgcgaggcgaaatgagccagcgtgagttaaaaaatgaactcggcgcgggcatcgcgacgattacgcgtggatctaacagcctgaaagccgcgcctgtcgagctgcgccagtggctggaagaggtgttgctgaaaagcgattgattttgtagcctggtaagacgcgtcagcgtcgcatcaggcgcttaatacaccgcattatgaaacggactcagcgccaggatcaccgcctggtgatagacgctggcgcgagtgagtttcccggcggtaaacacgccgatcgccccttccttacgaccaatctcatcaataccggtataacgcgacattacgggaccaagtgcctcaccttcacgcactttttccagaatcaccgcaggcaacggcaaagtagccgaacgcgcctcgccgcgctggctggcgttttcaatcaccacccaactgaaagtgctgtcaccatcgatgccagcttcaatcgccacccaaaaatcagcctctggaagtaaacggcgggcatttgctacccgatttcgtgcgccagcgcgcgtttcctcactgccaaagggttgttccggtacaccgctctcgacggcaacggatgcaatatggcaggatccttcgccgaagatctcgtgaaatgcctgcagaatggcctgaattttagcgggattggtggtcgcacagacaacttggtgcataatcagcattactcagaaaattaacgttacagcagtatacggaaaaaaagcatgttacaggtatacctagtccgccacggtgaaacgcagtggaacgccgagcgacgtattcagggccagtctgacagcccgctgaccgccaaaggtgagcaacaggcgatgcaggtggcaacccgtgccaaagagcttggcattacgcatatcatcagtagcgatttaggacgcacccggcgtacggcggaaatcatcgcccaggcctgcggctgtgacatcatctttgattctcgcctgcgtgaattaaacatgggtgtgctggaaaaaagacatatcgattctctgaccgaagaagaagagaactggcgtcggcagctggtcaatggcaccgttgacgggcgtattcctgaaggcgagtcaatgcaggagctcagcgatcgcgtcaatgcggcactggaatcttgccgggacttaccgcagggaagccgaccgctgctggtgagccatggtattgcactgggatgtctggtgagtacgattctcggattaccagcatgggcagagcgccgcttacgtctgcgtaactgttctatttcgcgcgtggattatcaggaaagcctgtggctggcgtctggctgggttgttgaaaccgcaggggacatctcgcatctggacgcccctgcattagatgagttgcagcgttaacgacggatcggaatcagcagttcacagcgcagattaattgggcgatctcccgctttggcgtcttctgccgggtagtatcgctcaatatcctgacctttacggcgcgtcaggttgagcattggcatgcacgttccgtataccgtaaggataaactcctgcacgccggttcccagaccttcataggtaaacatcacatattcgccgccctgcagcatcaccggatgccccgtcagtacatagccatctgcctgatcctgggctaacgcggtggtatagaatacctcttgttcgtcgtctttatcctgactcggacgcgtttcattcaggccgtagagcactggcggaatggtcggcgcgttgccgagaaaatcgtgccagaactgataacgcatttcatggcggaaatcagagatttgctccagcgaacaggagtagctctgggtaacaccaatcagcggcgtatcttccagggtgacaaatttgtgctctggcattgtgaattcacccagacgtagcggcgggcgaataccaaaggcgctccattcaggagaacggcggtaaagtgcaggagtctgggcaaactgcttcttgaatgcgcgggtaaatgtctgttgagagtcgaagcggtattgcagcgcgatgtccagaatcggacgcgcagtcaggcgtagtgcgaccgccgatttcgacaaacgacgagcacgaatatacgcgccaatagcatggccagtgacatctttaaacattctctgtaagtgccacttggaataacctgctttcgccgctacattgtcgagcgacaggggctgatccagatgaccttccagccagattaaaaggtcgcgaataatgccggcctgatccataaaatatcctcatcctttcaacaacgagcacctgacatcaggtaattggataatagcattttttgctgttttagcattcagtgtttttttcttagtagagtatgttttagggcttgacggaaataaaagtattgagattttgttcttaatcaatatgttatttaccgtgacgaactaattgctcgtgtaatagataaaaatggtaacaatatgaaatacaagcatttgatcctgtctttaagcctgataatgctggggccattggctcatgcagaagagattggttcggtcgacaccgtatttaaaatgatcggcccggatcacaaaattgttgtggaagcctttgacgatcccgatgtgaaaaatgtcacctgttatgtgagccgggcgaaaaccgggggtattaaagggggattgggcctggcggaagatacctccgatgcggccatttcttgtcagcaagtcgggccgattgaactgtcggatcgtattaaaaacggcaaagctcagggcgaggtagtattcaaaaaacgtacgtccctggtctttaagtcgttacaggtcgtgcgcttttatgatgctaaacgcaacgcgctcgcttatctggcttactccgacaaagttgtagaaggttcgccgaaaaacgcgattagcgcggttcctgtcatgccgtggcggcaataacagaggcgatttatgcaacgggaaacggtctggttagtggaagatgagcaagggatagccgacacgctggtctacatgttgcagcaggaaggttttgccgtcgaggtctttgagcgaggcttgccggtgctggataaagctcgccagctggttcccgacgtcatgattctcgacgttggtttgcctgatatcagcggctttgaattatgccgccagttactggcgctccatccggcgttacctgtactgttcctgacggcccgaagtgaagaggtcgatcgcctgcttgggctggaaattggcgctgacgactatgtggctaaaccgttttcaccccgcgaagtgtgcgccagggtgcgcaccttactgcgtcgggtgaagaagttctcgtcgccgtctcccgtcatccgtattggtcattttgaattgaatgaacccgcggcgcagatcagctggtttgacacgccattaacgctgacgcggtatgagtttttattgctgaagacgttactcaagtcgccaggccgcgtctggtcccgccagcaactgatggatagcgtgtgggaagatgcgcaggacacctacgatcgcaccgttgatacccacattaaaacgttgcgtgccaagctgcgcgccatcaaccccgatctttcaccgattaatactcatcgcggcatgggatatagcctgaggggcctgtaatgcgtatcggcatgcggttgctgctgggctattttttactggtggcggtggcggcctggttcgtactggctatttttgtcaaagaagttaaaccgggcgtgcgaagagcaacggaggggacgttaatcgataccgcaacgttgctggcggagctggcgcgtcccgatttgctctctggggacccaacgcatgggcaactggcgcaggcgtttaatcagctacaacatcgcccgtttcgcgccaatatcggtggcattaacaaagtgcgcaatgaatatcatgtctatatgaccgattcgcagggtaaagtattgttcgattcggcaaataaagccgttgggcaggattattcgcgctggaatgacgtctggctaacgttgcgtggtcagtatggtgcgcgcagcacgttgcaaaatcctgccgatcccgaaagttcggtgatgtatgttgccgcgccgattatggacggctcgcggcttattggcgttttgagcgtaggcaaaccgaacgcggcgatggctccggtcattaagcgtagcgagcggcgaattttatgggccagcgccattttgctggggattgcactggtgattggcgcaggcatggtttggtggatcaaccgctccattgcccggctcactcgctatgccgattccgtcactgacaataagcccgttcctcttcctgaactcggcagtagcgagttgcgtaagcttgcgcaggcgctggaaagtatgcgcgtgaagctggaagggaaaaactatattgagcagtatgtttatgcgttaacccatgagctaaaaagcccactggcggcgattcgtggcgcggcggaaattttacgcgaaggtccgccaccggaagtggtggctcgttttaccgacaacattctgacgcaaaatgcgcgaatgcaggcactggtggaaacgttactacgccaggcaagactggagaatcgtcaggaagtcgttttgactgctgttgatgtggcggcattattccgccgcgtcagcgaagcgcgcaccgtgcagttggcagaaaaaaacatcactctacatgttacgcccaccgaggttaatgttgctgctgaaccggcgttactggatcaggcgctggggaatttactggataacgccatcgattttacccccgagagcggtcgtataacgctaagcgccgaagtggatcaggaacacgtcacgcttaaggtgctggataccggtagtggtattcctgactacgcgctgtcacgtatttttgaacgcttttactctttgccgcgtgcaaatgggcaaaaaagcagcggtctggggttggcgttcgtcagtgaggtcgcccgtttgtttaacggcgaagtcacgctgcgcaacgtgcaggaaggtggcgtgctggcctcgcttcgacttcaccgtcacttcacatagcttcaaattcttcccacatagccttcgtatcctgctgccattgcaaaggagaagactatgttgaaatcccccctgttctggaaaatgaccaccctgtttggtgcagtattgctgttgttgattccgataatgctgattcggcaggtgattgtcgaacgtgccgattaccgtagcgatgtggaagatgcgattcgccaaagtaccagcgggccgcaaaaactcgttgggccgcttatcgctattcctgtgaccgagctttatacggtgcaggaagaggataaaaccgtggagcggaaacgaagttttatccatttttggttacctgagtcattgatggttgatggcaatcagaacgtggaagaacgcaagatagggatttataccggtcaggtctggcacagtgatttaacgctaaaagccgatttcgatgtttcgcgtcttagcgagctcaatgcgccaaatatcatcttaggcaagccctttattgtgattagcgtcggggatgcgcgtggtattggtgtggtgaaagcgcctgaagttaacggaacggcactgaccattgaacccggtaccgggttagagcaaggcgggcagggcgtgcatatccctttacccgaaggggactggcggaagcagaacctgaagctgaatatggccctgaatttaagcggtaccggcgatctttctgtggtgcctgccgggcgtaatagtgaaatgaccttaaccagcaactggccgcatcccagttttttaggtgattttttgccagccaaacgggaagttagcgagtcaggttttcaggcgcaatggcaaagcagctggtttgctaataatctcggtgagcgttttgcttcaggcaatgataccggctgggaaaacttccccgcgtttagcgtcgcagtgacgacgccagccgatcaataccaattaacggaccgggcgactaagtacgccattctgctgattgcactgacttttatggcgttctttgtttttgaaacgctcaccgcgcaacgtttacacccaatgcaatatttgctggtggggctttcattggtaatgttttatttgctcttgctggcgctttctgaacatatcggttttaccgtggcatggataatcgccagtctgattggggcgttaatgaacggtatttatttgcaggcggtattgaaaggctggcgcaacagcatgttgtttaccctcgcgctgttgttgctggatggtgtgatgtggggactgctcaactctgccgatagcgcgctgttgttgggaaccagtgtgctggtggtggcgctggccggcatgatgtttgtgactcgtaatatcgactggtatgcgttttcactgccgaaaatgaaagccagtaaagaagttacaatggacgatcaattacgtatctggaaataaggttgaaaaataaaaacggcgctaaaaagcgccgttttttttgacggtggtaaagccgattaatcttccagatcaccacagaagcgataaccttcaccgtggatggtggcgatgatttccggcgtatccggcgtagattcgaaatgtttacgaatacggcggatcgtcacgtctacagtacggtcgtgtggtttcagctcacggccggtcattttcttcagcagttcagcacgagactgaattttgcctgggttttcacagaagtgaagcatggcgcggaactcgctgcgcggcagcttgtactgctcgccatcagggccgatcaacgaacggctgttgatgtccagttcccaaccattgaacttgtagctttcaacgctacgacgttcttcgctgacagtacccagattcatggtacgggacagcaggttgcgtgcacgaatcgtcagttcacgcgggttgaacggtttggtgatgtagtcatctgcaccgatttcgaggccgagaattttatcgacttcgttgtcacggccagtcaggaacatcaacgcaacattcgcctgctcgcgcagttcacgcgctaacagaagaccgttcttacccggcagattgatatccatgatcaccaggttgatgtcatattcagagaggatctgatgcatttccgcgccatctgtcgcttcgaaaacatcatagccttccgcttcgaaaatacttttcaacgtgttgcgtgttaccaactcgtcttcaacgataagaatgtgcggggtctgcatgtttgctacctaaattgccaactaaatcgaaacaggaagtacaaaagtccctgacctgcctgatgcatgctgcaaattaacatgatcggcgtaacatgactaaagtacgtaattgcgattcaatctgtcaatgcaacaccccttttcaattatctctttcggtgttttgaacttcagtgtctttctcggtctgttgtttagctgagcagcaaccagatctagttcatgttgagtatattgggcaagacatgtctttttaggaaagtactgccgaattagcccatttgtgttctcatttgttccccgctgccaaggactctgaggatcgcagaagtaaactttaacgccggtgctgacagtaaattctagatgtctggccagttccattcctctgtcccatgtcagtgattttctgagttctgacggtaaactcaggaatttgtcggtaagagcctgatttactgagacagaatctttgcccctgagtctaaggatgatcgtataacgtgattttcggtctacaagtgtggctatatgagagttttttgtacctgagactaaatcgccctcccaatgccccagagagcgtctgttatcgatatttcgggaacgttcgtgaattggtgttccgttcactatgttaatcgtacctctttcgcctttgcgggtatgacgcctgccatggcgaaggctatgcgaccgtcgcagatgctgtatattcaggtggtgtagcgcttcacggctacgaaagtacagcgttttataaattgtctcaggtgatattcgcagcgttttttgacgtggttttgttcgccttaaccatcctgatatttgctctggagatccatttcatctccagcttttccagaacaagctttcgcaatggcaaattttgatccagtaagcacggttttggccttttcgccattctgttggctcggttattagcatcaacagctttgtaatagcgtctgccccgattacgctgaacttcacgtgagatcgtcgaaggactgcgattcagcgcagtagctatcgcacgaatgctcattttggctgacaaaccagctcgtatctcctcgcgctcagacagtgtcaggtgagctacagcccgcttacgctcatggggttttatgccgccagtatcccttaacatagtgaagatcgttccgggttttgaacccaggatattcgctatttcactgaagcctgttccgttcttccatagttcaaaaacagaggctttttcctctgctgtaaatgttcgtctcattcaaaaaacctccgcaaccccatgttttcacataactgttgcgttgaccaattgaaagtacgtaattgcgttcttgatgcactttccatcaacgtcaacaacatcattagcttggtcgtgggtactttccctcaggacccgacagtgtcaaaaacggctgtcatcctaaccattttaacagcaacataacaggctaagaggggccggacacccaataaaactacgcttcgttgacatatatcaagttcaattgtagcacgttaacagtttgatgaaatcatcgtatctaaatgctagctttcgtcacattattttaataatccaactagttgcatcatacaactaataaacgtggtgaatccaattgtcgagatttattttttataaaattatcctaagtaaacagaaggatatgtagcattttttaacaattcaaccgttagtacagtcaggaaatagtttagccttttttaagctaagtaaagggctttttctgcgacttacgttaagaatttgtaaattcgcaccgcgtaataagttgacagtgatcaccctgttcgcggttatttggtcaagaagagtggcaatatgcgtataacgattattctggtcgcacccgccagagcagaaaatattggggcagcggcgcgggcaatgaaaacgatgggttttagcgaactgcggattgtcgatagtcaggcacatctggagccagccacccgctgggtcgcacatggatctggtgatattattgataatattaaagttttcccgacactggttgaatcgttacacgatgtcgatttcactgtcgccaccactgcgcgcagtcgggcgaaatatcattactacgccacgccagtagaactggtgccgctgttagaggaaaaatcttcatggatgagccatgccgcgctggtgtttggtcgcgaagattccgggctgactaacgaagagttagcgttggctgacgttcttactggtgtgccgatggtggcggattatccttcgctcaatctggggcaggcggtgatggtctattgctatcaattagcaacattaatacaacaaccggcgaaaagtgacacaacggcagaccaacatcaactgcaagctttacgcgaacgagtcatggcattgctgacgactctggcagtggcagatgacataaaactggtcgactggttacaacaacgcctggggcttttagagcaacgagacacggcaatgttgcaccgtttgctgcatgatattgaaaaaaatatcaccaaataaaaaacgccttagtaagtatttttcagcttttcattctgactgcaacggcaataccccccccccctgtctctg

SEQ ID NO: 625 - DNA, 72573 bp, Escherichia coli
tgtattaagtaatacatatactgcagtaagttaatgacataaactatggtcagtacgccagactctgttgttaaatacagactgcaggtttttcttcagtcagttagcggggctctgacatccgatttgctgtttattcttttactgtccacaggcaggaggctttctggaaaacgaaaattcagacatcaaaaaactgttcggcgaggtggataagtcgtccggtgagctggtgacactgacaccaaacaataacaacaccgtacaacctgtggcgctgatgcgtctgggcgtttttgtaccgacccttaaatcactgaagaacagtaaaaaaaatacactgtcacgtactgatgccacggaagagctgacacgtctttccctggcccgtgctgagggattcgataaggttgagatcaccggcccccgcctggatatggataacgatttcaagacctgggtggggatcattcattcctttgcccgccatagcgtgattggtgacaaagttgaactgccttttgtcgagtttgcaaaactgtgtggtataccctcaagccagtcatcacgcaggctgcgtgagcgcatcagcccttccctgaaacgcattgccggtaccgtgatctccttttcccgcaccgatgagaagcacacccgggaatacatcacccatctggtacagtcagcctactacgatactgagcgggatattgttcagttacaggctgatccccgcctgtttgaactgtaccagtttgacagaaaagtccttctccagcttaaggcgattaatgccctgaagcgacgggagtccgcccaggcactctacacctttatagagagcctgccccgggatccggcaccggtatcgctggcgcggctgcgtgcacgcctcaatctgaagtctcctgtattttcccagaaccagacggtcagacgggcaatggagcagctgcgcgagattggatatcttgattacacggagatccagcgggggcggacaaaactcttctgcattcactaccggcgtccccggttaaaagcgccgaatgatgagagtaaggaaaatccgttgccaccttcacctgcggaaaaagtcagtccggagatggcggagaaacttgccctgcttgagaaactgggcatcacgctggatgacctggaaaaactcttcaaatcccgctgaacataaactgtagtcagtgaagagtgctcctttactgactacagcttatattatcaggtgcagtgagtggtctgctcactgcagtttatattcagtttcctgcagtgctgcctgtggctgagctgccttctgccagttctttacgtaagtgaccccgtaacctgatactggggcattgctcccttcataaaacatggcctactcactacagcttatataccagctccagcttatgttatgtctgctctgcttaccactgcttatataaggaagcgtgtatgccgtcacttcaggggaggctgtgtacgcaggatctccgcagcatcccgcccgtcacctgtgaaaggcactgccagcgtggcagccatatccagcgcaaacactctggtataaacctccatcgaacgtggatccctgtgcccggccagtgcctggatgactttccggggctggcggtgatagagcatgtgcatgatatagctgtgtcggaacgtgtgtggtgtgaccggaatcgaaaagtgtactccgtcagcttcggcccgtctgacagcctgcttcagccagttgcgcatggtttcgtcggtcacggcccataatggttcacgacgacggggccgggtggtgatcatccagctttccatctgcctgacatagcttatatccgtcagcggaaccaggcggacttcatcttttggcgggcgtccgcgtcgcgcacgcactttttcggacaggatccgcacaaacggtcttactccatccaggtcaaatgattccggtgtcagcatccgggcttcgccaatacgcattccggtattccagagggtggcgaacagcatatggtgacgctgatccggcatatagaaaagaagggcactcacttccggggccagcaggtaggccggtgtggcccccgtggaagtggccattcttctcagggagagcgctgttgcaaaatccacccctggcgcaatgggtaacagggagacgcgttctggtgaattctgcaggggaatgacattgttcatgagttatttttcacgtagcacacgcactgtttatggatacagttattctgacctgaacgcacggatccttccacgacaataaatcgcagcgcgcggatccttttgtttgcttatcacgcattattgcgggtaaaaccaaatacgtaaaggcgcgttttgccgcagggatcctgtcttaagccagtcatggcgcgggctgagagctggtttgccgtttttgggagaaatggggtaatgccagggcaaagatgatcgcaaggaaaggagaaaaatacacagagaggggagttgcgctacgtgaattctggctaggtacacccctgtaaccctgccagttttcacgcaacgcaatgtggtggctgattactgtcagttgagatgacggccggcatcctgatgctgacttaatatacgaataataacaatttcagtatcagtctgcagaaaataaaccatatgccgttcaacgggtagtgcgaatgtgtattcccccagttcaggacggggagtaccgatattatgattactcataacctgaaaaatgtcggatatctgattaatatatttatcagcctactcttcaccgaaatggtggtacccgtaatgctagatatcctccagttcctgactggctttaggtgtgagtttaacggttttcaccggaagccctcgcgccagctttcacttttttcagaaacgcatttttttcccacgacacaggttcaccgctgctcaagccttctgccagtaaatcccgcaggacacctggagacgtgactctgcctgtttctctcgaaggagacgaagtgactcgcggattacctcactctgtgtacgataatcacctgattctatgagagattctatgtactcccagagttcatctccgagagcaactgtcattgttctggccatatcaagcctcgtgattgtaagtttaaattttacatgcagtttattcgatactcaaaggtgcttccagtacagaacatttgggagaattggggtaatgcctggaacagacagatacggagaaaaaccctgcagataaccttatacgacaactgaaggtgtctgatgccatattcttagctacttctctgtcttcaggcggcttagtcacaacataagaccgatgcataataagcatattttttcatgttatggtcttgttcatgcatgaactattatctattcagtcacttttaaagttttatatcatactgcatatgatatatatcatctcctatattcagactaaaaatattatgacgatggtcaaatgaatttagtgaaaacgctacctaaaacaatatgcttatgatataacttatcaagaatatgcgacaatcttcttgaaaggttacggagaagagtcagataatgaagtgttataactcattcagcttttttatgttctctttatagtaaaactaggagattaagatgaatcagaagtggaagacgttaattatttcattattaacaccatcaagtattatatcagggattgcgttgatagttctctggggatatttcagtcgcctgggccgactagatattttctttgatgtaatgaatattaaaagcatcttggtattggtttgttgtgcaactatactatcattggctatgatagtatttatcttttttataacctctttttttatacccgtagttattcctcaggatataaataatcttcctgcttacaataagattcagggtaattttttatctgtgatgatgttatctggcatgttccccatggcctttatatatgtgttatactgtgcatttgattttgatcagaatgttaaagataactctggctggttatctattgcaagtatgggtgtactgatagctgttattttagccatagtaaataagaggtatcttgaatatgaattatcgtttaaaaacaatagaatgaaactgttgagacgtgttcagatctatcttgtcattccgttgtctattgctttactggtgcatcttcagttaattcctctggagatagtttttaggaatattgcaacttcagataagagtattaatttcaaagtgatagctgaactggctttcatgtcatattttatctttcttctgacaatgcttcctggagtcatttatctgaaaatgaatccacagcataaattttcaaaaagaattagctattcatttatcgcatccttgatgttattattaataatatcgactcaaataaccgtgttaccagtgatttttacccattccgttattaagctatcaggtataagtgacttcaaaatacatagctacattattaaaacaagtgaatatcctgaagagtttttttccaatgcagcatgggataaaaaaatataaaaccgggggattattactctgtgcaggctgtttctatgtttacgacaaaccagtttattctcctttgtcctaaggatattataaagttttatcgggaaagctggaagttcgagttgcttaatgtagacttcgatataaataccaggaagaaactccaggaagaagctgcatattgcgtaccaatttctgcaatatctgtaaaacgatgggatatgcctcttcagggctcgaaatcctcaagttagaaggcaactagggcgactgtattctgtgacgaaatgaatggctggctcactataataatgagcgaacccatcagggaaaaatgtgcaatgggcggacgccaatggaaacgttactcgatggaaaacgcatctgggccgagaaaaatttaagccagatgtaatctgacagatacctgtataaataaccgataactgtcagatcaggtctgagctaatacatttcaataaaggtacttgctcgcgctctgtcattttctgaaactcttcatgctgcatttcgattttccttctaagatcataactcgcatacctgttctttttatgtatatctatatctatttttgtgacgagttcaaaccacaatgttcgcactccccaggcagcgttatgaaacatttccgcaacggctatagagtctgtattaactgcttcggtcatgtagtcgctaatacgttcagcggtaattttcgttatttcatcgtaattcattttatctcctacaagattatttaatggaatgcaaaatatctggtctgataataatgttccagaattaatatctgcaggctatgttaagttgtccccacacacaatctacctgttttctcgtgtgtgccacaggcgcaatacataaatagtctggccattaagttcgtaacggatttcgtactcgccagcaaaaatccgtctgacctccctgggttcaaactgaaacaactgttctcccatacgtggatgagttaacagaatgaccggtgcctgtgtcagggactgtaccgttctggcggcagcaggtttactggccagcaccagaaaatcatataaccgcgacaaatcagaaagcgccttactggtccacttcagttccatcagcgtggcaccggtaacggattgtcagtactgaggctgtccgcccaggcctgtacagcctgatggtcgatgacctgtccggatgtcacatcgtccagggcttccagcgtcaggcgattacgctcctcctcctgggcaagccatgcagaaagcgcctgtttgataacccagccccgggaacgttccagtctggcggccatctggtcgactttatcagccataggtaatggcacatgcgcggtaattacttttgttgcttgtgcggcattgtttttcatttgcatatccgattagttgttaatcatatttaatcatagtgattactttcagacggaacaaggcaaataatgcgcgtcagcgcatgtaaggcggcatacggaggttacatgtagcacaggtgtaaaaccgccgaagcccggcgtcagccggtactgattgatagatttcaccttacccatccccagccctgccagaccatacccgctttcagccatgagagagcttctgtgtgcggtcggagtggtcccgacgagggtttacccgaagtcggggcgtatctccgcgttagcgggccgtgagggccgcttacgagcgtgtactcaatacttccagcgagaagactgacagcgatgacggagtatagttacaacattcataattaaaagcgactctgttccggccctttgggccggggcggggctgcttttcagttatgagggaggggcgttgtggtttcagttttgcgcggaaccggggtttttccggaggttgtctttgtgtgttgtaactaaagtggctccggttggggcccgccgcttgcggtgggaggtgcttttaaattctgagcggcgcggccttggccgctgcaagcgaaggcctctttgtatttgttcacagtggtttcagagataaagactttccctgcggcgaagcaacgcaggggattaaatgatggggttaagaatatattgcaggtttgctgtttctggtttgcagcttcttaaagttctttgtttgcggatttatgtgggtaactgaaacaacgtggacacgttcagatgactgatgcgtggttttatgggcagatgtgcccctctgagagagatttaaggtgattgtggcggattttgggctgaacggaaccagcgccggaagcccctgaggggctggcgatgattcagtgctgaagggatggtgctgtttagtgcggaggcggggcagccagcgtcagttcaagctgatacagctccctgatggccagctgctgtaagcgttccggcgtgcaccagtaggcttcatccggcggcatacgcttcaggatgtgctgtgacatctcgtaaatctgctggtcggcaggtaatttcttcagacctctggcgcgcttactggctgccgcttttgcacgacgstgtttcagggcatcctggctgcgctgcagataccagcgttttctggccgcatgaacggagatatcttcatcctcacgcaacacgccttcccggatgagttgctggcggatttcactttcacacagccgcttctgctgctgttcgtgaagtttaaccatgtcgacgcccagcatctgccagccagccggtgttatccagacatagcgtggcagacgctggcggtgttcacggtcccacattgtttcctctgacacccccagcacaccaaagcgcacctgttcggccagcagacgggaaagacgggagaccgtcacttccagttccggaataacatgtcccttgctgtctttcgggctgatttctctggccagacgggaaacactcatccccacggtgtgtgtgcccgcatcactgaagctgatcagaaccggccagatggcatcgaggaggtgctgtttttccggacggaaagcatatttgcgaccagcgaacgtccgtttctgcacgtaaaaaggatgtcgcgacatgcgcatacgcaggctctgttcgccagtcaccgggtcctttttcaccagacgattataggcatacccgagctgcccgytcagcgccttatagcgcgcaggacgataccaggtcggatttttcgcatttgggtttggtggagtgctcaccacgacggcgtttcgtgcgcttcctttccggttcaaccaggaaagaggtcgcccttcccgcttcatagtcttcccagaagcggatttgttcttcgggaggcaactgagcccagtggcctggacgggtatttttaatcaccatacccactccgtaagacagccagacgtgcttcagtcagcgccaacggaaatatccctaaaaactcaaaaaaacgaggcgtcaacgttattgtgcagcgcttattgtaaaaatctgatgacggggaacagactataaacccaaaatcttcttccagtgatttaattgctctgacagctcgctcaatggctaaatgaccatgagcattttttctggctaatccgcaatcaagtgcaagttcggttatagaacgatgcacttgatttgaaacaggatcgtaatagaagcacataccttgcaacagtgcatcaatagctctgcgacgaagaacggaaggcttgcgtttacgtttaccattagcgcgcgcgcacgcagaagctatatcgaattcaaatgtttcggtaaaccccaccgctttgcccattagcttctcacagaacggcagcgtcctggcaccttcacgtggtgtgaataccggattcgggttctttacctggcggtaataagtttgctgaagatcagtcacaccatactgcacttacaatgcgcagaaggagtgagcacagaaagaagtcttgaacttttccaggcatataactatactccccgcatagctgaattgttggctatacggttttatgaggccccggtaatctttctagtcgccaaacttgaagaagattatcggggttttcacttttctggctcctgtaaatccacatcagaaccagttccctgccaccttacggcgtggccagccacaaaattccttaaacgatcagtaatctagcactgacagaaaaaaccagcaagaatgtgatcccatcacatcatgttcctgtgacaggcctctttctcgataagcctttctatcaactctgcctgagttaccccttcctctgcacacagactggtaaggtagtttttcagttctggtctgacgaaaaccttgatctctttacatacagatcgtttgcgcgcagaagctgctctctgtcgttctgcttcactcaaaggtttaccctttctgtatgctcgttttgcgccagatgaggaagtcactgcattttctgtctgcgacatctcgcctcctcaatactcaaacagggatcgtttcgcagagaatactacagttttttgaaatcagcgacttgagaattgtgacgaagatctgtgttggcgcacaaatcaacggggattactgtcgtttaatgtgatttaaactgtgaaatagtatggttttcagttatggaaacgccgggagcggggaaaacttgctttttcccgtttccggggttggacaactgagcaacgcgaaggcgtcagctacgatgttccggggactgctgatcagcccctgttgttttcagccattctccggtcatctgcagcagttttctggcatcgtggcttctgagcaacggaataccagcctgcctcagaacctcttccagaagaatatcccggcgtctgcgttccggtcgtaaatggctggcatcatccagctctactgctgcaacaatactgaacgaacgccgctcaacgataaccacatcaacatgccactgagacaccatcctgaataactgccaccactggcgtgatcgtggccggatattcccgttcagctggacgatatccgcgacccgtacctgcggacacagataccaccgcttcatatccacaattctgaacagtcctttcataaaactgacttccctttctgtcagcagcgtcttctgacgttgccagtattcaccgccggacagtattcgctctgcatcaccggtccgtatacctgccgcatgcaactgcatcagcaaaggagaatgctgatttacacttctgaggataatccggataagtaacgctgcaataatcagaacaatgagaataaaaataatcagcttcattatttatctgctcctggcaattaattattgctgaattattaccttacatatttccatatctcttttggtatcctgtcatataactttccggtgattaattccgctaaccggtggtctgctgcttaattaaatgactcacgttcactgtttgataaactgtctctgtttttatgaataattttttccagcgtattgactgatgaacatcgccgtaactgatacagccattcctgttttgttttcgccatttttattcccgctgagaacaaatgaatgataggattgccatcgctttatttacggtgcctccatatccaggggggaaccggatcagcatctgaccagagcccacgtttttgttgtctggcttcgttttgaaggacaggcagcacgggatctgtgttgtactgctcatatacccaggcagccccggcccggaccataaactgattaatattcattccgtctggtgcataaacctgcccgagaatacgaccatagcgatctctctgaaaatatgtgacggtaaccgtttttcctgcgaccagtgattttatcatgtctgttgaccaccggccataatcctgtttcttttccggtgcatcaatatttatcagcctgatccgcactgccttccgtgagtccatgacctcgatggtatcaccgtccagtacacgaacaacccgtccatgaatatctgcacacaataccggccatgaaaagataaataataccagtggaatatatttcctcatgttattctccatatcagataaatggcacctgtatttcaggtaatcctgaatatcgcagcacacactgaataacaccttattttgtgaaattaatcacaaaatataaaatcacgacttaatacggaaaaaactctgtgctactcagaactgtccggtcatactgcccgaccggatattaaaaaaagcaaatctcatgcattattcagccttctgaatccctggagtaatgaaggctgctttttcgttacacccttccccggcagcgccggtggcagtgttcagccctttttcgggcaaactgctgccagtctgtccggggtgcaacaccggcagcccgtcgccatgcttctgccgcttccatccagcgtccactgacttccagaataacggcccggcttccggcactctggtaacgccagacctgaccgttccgtgaactgtttctgaatccattcattttcctgtcccccctttagttgtcagtattattgtgataataaaaataatcagtttcaccatactctttcccttttttatctgataaacggatactgaattaataaattcattttccttaccaccgacttattctgtttcttatcaatgcatttcctcacagaagaattaatgctgccggggtattcatacacaccatatataccgctgatgtttcagtgattattcccgatgctgaaacggaaaggcgcttttctttcccgtcttcttacgcgctgagcacccgaatctgtgattcaggcaatgtttttctcctccatatattcacttttttcaccatgtctggcaaagtgaataatgctcatatcagatcctgctcagggtactggctaaatggaccggaccggggaagcaattccccggtttttctttgccgcgcacattttttgaattaaatcacacattttattgttcctgcttgtcctgccaggaaaatatgttacaggtattatgtcgtttagtccgattcagcttacagacagggataaccttctggttcaccataataacaatcatccttaatgactccccgacgaaccagttcattccttatcgccactgcccgggttttgttccattcgtcacgcatgtgtgactttaaataattattaaatgtttcgacggacacaggcatattaccggctccgctgccggctatctgctgcagctttcctgcccaacggctgacgatatcactttcaggaacagaaggttgtttcaggcagttacttttgtctgcaccagactcaccggcagcagcaatactttccggtacatcacgacggatgcaggtaataccggcttctttcagcgtcctgataacaccgtcatatcccttatccgatgaaatgatgtggtatgttttatctttccctgctgcacaacagcttatccgccccagctccagaacaagatgaaaatcgacattattcctggacacaccactcacctgcctgatagtgattctcgcaccttcaggaaaagagtctgcaggaagaacaacgacgttctgctgtggcccgacaaaaataatcagttccccatactgctcaagggaaatatttttcaggctgccacagttttcataatcaataagggctgtcagggtgtttttatctgtactcgtattattttcttccatgtttttaccttttattcataaccgggtgagcaataacacaaaatattttatttccgggaacaccatataaaaagaaagacttccctcgtgaatattcaggcgcatattaaacgacgtcttgttttatgaaatcaatcacaaaacagcacgccattacttaatacagcaataatcctgtgataatgaatgctgactggtcatactgccaggccagatataaaaaagaaaaatctcatgcatacttcagccttccggttccctggagcaacgaaggctgttttttcgttacacctttccccggcagcgcctccggcaccgttcagcccgctgttgtgcaaactgttgccagtctgtccggggagcagactgcgcagcccgtagccatgcctcagcggctcccggccagtcccccctgacttccagccggacagcccggcatccgacctgccggtagcgccataccccggagttttgcgaatcacgccctgttccgttcattttccttccccctttagttgtcagtattattgtgataaatagttcagtggaatggctttctttcgggtacggaagttatttccttttaagccttatttccctgcctcccctccctgagggaggcttttttttatttctcatcaagcacggcctgaagttctgcctttatccggttctggcggcggattttatccagacgcgctgccgcatacgcttcctcctcctgagaaatatgctccgtcacatacccttccgtgtcataccggcaggcaccggctttcatggcacacagatagctttctgaacgggtgatggccttcagcgccctgcgcagttttttatgcgagagcgggatattccgctgcgccacgtcttccagtaacacgtcccggataccgcaggccagaagtcggggtgtgtcaccgtcaaataatcccggccaccagggtttcagggtgttcacggcctcatccagcgagggcaggttcagataaatggacagcgcctgtctggcctgcgctttttttgccgccagctccgcttcccgggctgctttctcggccagcttctgcttttttcaccttccactttggtggcgtggtgacattgatgatggttttccgcctgcggacaggcgtctccccttccgtttttcgcttcagtgtcagtaccggtcgcttctgctctgtcatgctgtgttctgcctctgacgaatcatcctgttacggtcaaagataccacacccgtcacagcgccagaacgcccagcacagccagatgacaggcgtagaataccgggaaaaaatccccgggccagaaacggggtaatgattttcctgcacacgacaccagaccaacggtcagcaccgtcatcacaagaccagccaccgccgctgcatcactggtggcaaggttaagcgccggaataacagccagcaggcaggcgaccagcgccagacgttccgctctgtcttctgcccggtacagccggtggctgactgccagcatcagcagcccggcaatgccgtaactggtgccggacaaaggcccccacagggccatcagaagaatggccgctgctgtacgccacccactgcgcgtttcacaccacgtcagcacctgtgctgagactgccaaggcacacaggatattgccctcataccagggaaagccggccagataatacgagaactgggcaatcaccgcccatccccacaaccggttaacggcggactgacggatatgtgcatgacgggacaaattcagcccccataccctggctgactttgatactgcccagcgagagcgggaaaatacagctccagcagatatccgtgatcgggtttacaaaacgcccctcacaggcagaatccgcagacgccgcagggacatgaccggcgagaaggaataacatcagcagccacagtcttcgcttcattttctgccctcctctgccggaataaattccaccttcaggaagcgagcgccgggaacggcgctcacccgtgccgggacctgatcaatgccgaggcgctggcagagcacaccgttctggtcaaagtaaatacggctgtccagcgctttctgcatctccgggatactgccctgcacgaggataattttgctctccagtgtgggcggcgtctggcgtttcatccaggccacctgcgccggatcatcgccattgatgaaatacagcgtctggttaaaaggaacatactgcagcggattcatcacttcaccctgacgggcaaacacctgtggtggtggcgtgacaccattcccgggataaaacgccgtcggcggtggaacagcaacgctgccctgcggcgggaaggatacgggggtgtttcctggctgtggttcgccttccggcccgggcggtgaggctggcgtctgcggtacaggctcaccggtcgcggtgacgggatttgcacccagggcttttacctgctctgccagggcagcattatcctgtcccagcttttcaatacgacgctggtcatcaccgcgctgtttgttcaggacatccagttcacgacggatttcctcatactgcttctgcatctgcgctgccgtcacctgcatctctgtggtggcatgctgacgcaccttgtcatcaaaggtcgtatccaccacaccggtcatatccggcacaggctcctgttcagccaccgcctcaccgttaccggacatgtccacatcagacagatacagtgcaccaccaatcgcagaggctgcaccgacaaccacaatccccagccacaggtactgcttgcgtttcacaatggtattgatactggccatcagttgccctccccgtcacggatgacatacacatccatgcgcgcacctgccagtaactggctggcaggctggctgaacatcacggcacgggttcccggctgccagaaatcactttcccggatattcagggcagacagcgttttattttccacggcaaagcggaccatcttcaggtgattccccgtccatacggcatctgccactgaagacagccccgccggggcctgcagggtttcctttgtcacaggaacctgataccagcctgcaggtaattttccgccacggacagcctggctgatggtcacaagcagggattcgtaaggcgtggacgtttcccacgcaccggcttcttctccggttccgcgcaggtcactgaccagctgaatggtacgccccgcgccttcacggggaacggcctgaatggaaagattcagaccacgttctgtttccagaatgaacgtaaagggctttttgttgacggtggcaaccaccacaccgccggaggcggtctgctcattattggtcagggcaccatccagactgttcacggcgataatccggtcaccgggaacggtaaacagattcgggctggtattgctgatggcaatactggcctgaccaccgttcaccattggcaccacggtgggggacagcgtaccgtttgcggccatcacgctgcaggaaaaaaacaggctgccgaatattattgccgtattattttttctcatcgtctgtttccccgaaattatccagccaggtcaccccgttttcccgcttcagaataaggatgtaatgtttgatatcagtgaaaggttttgaatcaccaatccaggttttaagcacaccacgaatttccacacggccatactgaggccagacacgaacactggtctggaaaaaggctgagttcacgttatcgtttttaatacgcttcgcttcttcagccagaataactttcatctggttctgtgcgcccgggcggatatattgcagaagcgcctgatgtgaggcatcgacggtttctgatgaaacattcagacggagggcaataaatgacagcgccatctgctgtaaataagaggcgtcggcactgttctgtgacacggcaaagggggcattaaatgccattggcgtcacggcagtgcgttgctcattctgaagacggtagttattcaccccctgaatgacgttaacagagaggctgagaacaataagcactgacataaatataaaggcgatggccattacacgactggtacttaaacgggcaccgtgttccatataacaatcctggtatcagttctatttaatccactgccggaaacacgaatcgggaacattatgaaaaataccgcgcagcagggctgttggcatataccagtaaatcaggtctcgtaaccaggaactgccccgcccttttttcagttttttaatcccgaaataaaccagaaccgctgcaccaataccgaacagatattttgatgttgtgataccccagccaatacagattgcggcggggatcagttcatccagtggcaggccaaaccagcggctctggttggtcagtgtttccgggaaacgatatttcttaagtttattctcgtctcccgacatcgttttatttcaggccaacgacggccatacccacagcaataaatacagagatgatggcaaaaccggccaggaacttgacgtttttggtcatcatgtacatgaccgcaccgaccagaacttcagccagaacaacccatttaacaacactggagtccttaccgaaggtcgccttaaccgtggtgttaccgcttgccatcaggtcctggccctgtgctgccattgccagttgcgggaagaacatcatcagaacagcagcagggatcacagcgcgagccaggcgaagcatattcagacgagtgaatttagaaaaaaacgatttctttttgacgggcgcagaagcaccctgaacacttaaaaaggcgtccatatgattcctctgtttaatattgatagataaaaactaaagttctttaaatgttgactcgttctcttcgatcacctccctgaatatttcttcattatagaaatcaggaaaccgtttcagatgatctctgagacggatctgaacctctatagttttacttctaccgctacgatctttggcccgaataagtcggttatttgtatcttcatcgagatacactgagactgttctgcttatcccgcctctcgcgttacgcctcctcactcaattcacctctgtttcctgaccaataaaatcatgattgcacagaaatggcctgtcgaaaatgggcccaaaacgagccctgctttattacatttttttaacacccatatattcactcaaaacgtttaatatttcgtacattacacctgtcttaatacatttattcctgaacaaatcgaaggaacccaatcttttattgatatccgcattaatctttttaatcctttttttagaagccacttctgtgatttttaattctttagctatatttatatgtttataccctaatgcatagaaacaaaaaacaaccaataattttgctgtcatattcgatataacagactgtacatagctatcacgatgataataattttctttttccacacgaaagaatggatagtcaggaaatatattaatttgccatagaacaacagattcttcattataaaatgaaacattttccatccttatttgatagatttctccatgaaaattaaaacgacgacaaaatgcggaaccatgcccaagagactggcattcaagctcaagtgatgaaagaaaaatttcaacctgcagacgtacataactttcaccagagaagggtttatcttctttggaaaagagttcaataaaggccccattggcataaaggattttcctttttttgttacggacacaaacaggaacaggagaattcctgtagatattttgaacgttaagaatgtatttatttacagattgactgttaagtggcctttctctaggatccagtgcacacataggaacctccgttaaggattctatggacagtcgatgcagggaggtaagagctccctgcatcggcgatttttaatatcaagttttaacgtggcattaaccacataattaatataacctttatgcggttaattgtcatcaaattgaaccagatcaaaatcctgttatttgaagcaaatcaacttttaattcttttttaaccctcatcattttctggaaagaacctctccatctcagatgacaccttctccctgatatcttcgaccatattcgcatattcaaactttggatttccggagacatgaggactgagagactcaatacccaaaattttcgctactgatgattgtgtttttacaacgcattcaagaagcaatttattaaactcagtctgattaaatgcagactctttacgctccatctgagtctcatatacacgaagccctaattcgagaagcatagtggatatgcttgagaaacttacatctgtacttttagctccttctgcacgtcttctttccacaattttatttattttatagacaatttcgtcactgacataagcctgcactttcgccatatgtatacctctttattttcttatcgcatcaaatttatttcacatataaaaaaatgacaattcatcgatgaatcgaatcgtgacgcaagttacgaaaattacgattcatgcagcaaatcacatcacgaattgaatctagagtcaattcgctttaactcgttgttttattattactgattcatctatgagttgtgttaaattcattggtgaatcatatgcgattcaccaatgaatcctttttataatgtaaaataaattaaaatacattatttaaaacataagttaatgattcaagtagcaaatcagcaaaaacttgtttttgcgtagtgtgtggtgcttttggtggtgagaaccaccaacctgttgagcctttttgtggagtgggttaaattatttacggataaagtcaccagaggtggaaaaataaaatggatgttagccatctgcctgatgtttataaatgagatctgccatgccactgattgctttgatcttgcaggccgggattacaaaatagatcctgatttactgagagcaatatcatggaaagaatcccgttaccgggttaatgccatcggtattaatccggtaacgggatatggcagcggactgatgcaggtagattcccagcattttaacgaactggcccgctatggaattaagccggaacatctgacaacagatccctgcatgaacatttataccggtgcttattatctggcaatagcctttaaaaaatggggcgtctcctgggaggccgttggtgcatacaatgccggattcaggaagaccgaacgccagaaccagagacgtcttgcctacgcatcagaggtttaccggatttataccgggataaaaagcagtaaaggtatccggattccggtcacgaagaaatcacttccagaaattaacagcgtgcagaacaattaatcttacagacattgtcagataccggttatgccgcaaaagcggcatgaaggccacacacaaaaatatcatatgagtgacaatgctgactggccgaagccccgcgaagcgggaacccatcttatatatacccggtaactgcgcagcctcctgccagaccatttttcgcaggcacaatatttacagacaaccggaaagccggttgatggaattgaggtatatcagacgacacagcgatgccgaagaatgataatataagtaaagccccgaaaatttttcggggctttacttatattatcatgacttccactttctgaactgttcggcaatcacccataacgccttgttgattcttatatcaccatcaatacctgtaatggctcttgtcctggtatttttcccggaggcacttcgccccgataatccaccttttatcatattctcctgaacccgctgccaggttgtccagagatcgttctgtttatcttcccgacgacggggagtaattatttgttcaggcgtcactggcgttttattttcatcttcatacctgaccatcagtgcagctctgccaaataaatgttgctcgtcactgttaagatgaatttctttcatcgcctccatattatcagtgaccttatcaaagacaccgagcacttcatacgctccctcgataacctgcccgacaatatcacctttatgtggaacacggatttcgccaaaattatttccgcacaccaggccatttgtgcagacaaaacgaaaatttccggggatcatctgataactggatgaaccatcatgtgaattaagcaggataatttcaggaacttcctgcccgttaatatgcccttccctgcgaagacgtaacatatgtttactgtattcgcggcgtcccaaatcacgaacccgactctgacaggcaaagaatggctggaaaccttcatcacgtaacttattgatgatattgattgttggaatatacgtataacgttcactccgggactcatgtttatcaccggaaaataccgaaggcacgaactgcattaattcatcatccgttaaaggacgttcacgacggatggaattataccgaccaaaacgggaagctaatcgcataacagctactcctttatgaaagaataaatttaataaaaaatttttccgcttaatatcatccctcccgatctccattaacaagattgcaacaatcaggagggatattcatcacatccggtcagcagatcgcccggatatcgaggccggcacgcttaatctgacgcaggaactgtttgaagtgatcggcttccgcaatgttgatatggcggaactgcgtatccacaccccggctgagcgcgtagctatagctgaaggccatcttttccgggtggcttttgcgatattttttcagctcagtcaggctgctgaattccaggacgtcccactcttccccggtgtttttttccctcccggcaacaagaatcgtgtacgacgcggtgttaacgtggatatttcgggtactcatccagctttctcctctctctggttttcagcccccatcatctgttgagtttcgggacccgccgcaacgacgtgaagcgcggtttgcgaaacggcgttgcgccttacatcccggcggccttttgccgggatgcagggagcgcaggccacggcgcgacagaggcggcgcgaccggaacggtcgctgcaagcccggggtttcgcgtcagggatggaagcccgccagggggacgcccggaaaagacactgccaggagaacaacaaaacagacaataatcagggcagcagtaatcagagtcagaacaggaggaaaaagagaataatcaaagggaaggtgatgtgatttctgacaggtcataaacagagaaggcgggggaaaagaacgggcgccgcaggcgcacgttcatccccgttcccggagggaaacggccttcctggcagtctggttgttcatgcccgtacaatgccagcaaggagaaaggggccaccggcgaaccagcagcccctttataaaggcgcttcagtgcagtcagaccagcatcagccctgaaaaggcgggcctgcgcccgcctccaggttgctacttaccggattcgtaagccatgaaagccgccacctccctgtgtccgtctctgtaacgaatctcgcacagcgattttcgtgtcagataagtgaatatcaacagtgtgagacacacgatcaacacacgccagacaagggaacttcgtggtagtttcatggccttcttctccttgcgcaaagcgcggtaagaggctatcctgatgtggactagacatagggatgcctcgtggtggttaatgaaaattaacttactacggggctatcttctttctgccacacaacacggtaacaaaccaccttcacgtcatgaggcagaaagcctcaagcgccgggcacatcatagcccatacacctgcacgctgaccacactcacttttcctgaaaataacccgctcattcaggctgtttacgggtaatctgtgtgattgttgccgcatcacgccgcctcccggagtttgttcggcaccatccaccgctccatctcacggacagcgtgaccggcctctcttgctgcaagactggcttccgcaataacctgccagaacggcatatcctgccactgccagcgttccattccggccagtgacgggaaacgctcgccccactgccagaacagggtttccaggtcatgctctgccacccggtcactccagcgtgcatgccagcttccgactgtttccggcgaatggaatgccagttcgatttcagcctgagcgaccagcgcctggtacgcacgggctttctgctctgcctcccgtgcctgctggcggctgtacttctgcatgaccagcgcggatttatggcgactgcgctccctgacgcggaaccgcaccgacggaaacaaccgctctgctgcatcaccgggaaggggaaggaggcagacctcgccctgtgtttcaatcagcacatcgacggcatacagccactgaagacggttgccgtgcagttcttctgcggtcagggacggcatgaaaaatcgcaggtcagacagcgatatcctgcggcttccgttcagacagcggaaaaacgcccccgcatattcaccatcacctgtttgagaaccttcgctgcaaggggcatcactgccacggcctgacgcacctgtcctgggcagaacgcaaaattttttaccgggttttgggtaaaaaattttgtgggctgttcatttaccctggacagtcagtgcggcaggttgtggctgtatcagcccccggcgacaggggcttaaacaggtgaatggaaccggacacaacaacgggcagggacccgccgcaacgacgtgaagcgcggtttgcgaaacggcgttgcgccttacatcccggcgtctttttgccgggatgccgggagcgcaggccacggcgcgacagaggcggcgcgaccggaacggtcgctgcaagcccggggttttcacgcatcggaccgtagcggcagcccgaaaccgcgccagcgggttcggcggagactggcgggtgcgccagcagctgcctgtcggagtcgggcctgacgaccggatgccgccaggcagccgggagccgaaggtacccgacccggcagacaggacaacactgcagtagtcagaatcagagcggcaggaaaaagaagagcagtagcagtagcagtagcaggaacaacaacatcatcagtaacagacaaatgacaggtctgaaaagacagaagcccccatcagaacgtccgcgtaatgaaaggggcggcgcgtgagcgcggcccctttcagcgccaccggcgcgcggtcttttccctgcgcgggcagacgggcatttatcctcccgccagccctgtgtcatcaggcacgcagacgaataatcatcgtcgggacatcggtataagcaaacgtgccgcgcggcagctcctcgcggacgtcagaaaacggtaacagcttctcctgctggcgcggcccgttcagacagacggcaaccagcacgccacccggacgcaacagggaaaaagcccgcaggatatgccggatacccggagggcgttttcacacaggttattgtcgatctccatccagccattgcggcagtattcgttcagggcatcccattgcttcagcagataggtgaacgctttcgccgtatccgagtgacgcgacagcgtgctcatctgcccctggagccactcatacaacgactgcattagcggtaccgttctggcttttctgaccgccagtcgctcttctgccggactgccgcagatctcagactcgatagcgtacagtgccccgatacgacggagcgcttctcccgttactgtcgttggatggcggacatgtacatcgtggatcttgcgtcgggcatgtgccatacaagccgcttcggttacctgaccgctttcgtaaagagcattgtaacccgcatatgcatcggcctgcaggatacctctgtagtccgccagatgttgctgcgggtggatacctttgcggtcgggagagtatgagaaccacaccgctgccggcatggtcgaaccggcgttgcgatcgtcacgaacatagacccacagccgtcctgtacgggttttaccctgacccggctccagtacatttaccggcgtgtcatcggcatgcactttacccggcatcagcacatagtgcttcagttcatcatacagcgggcgaagctgctctcccatgatgtcaacccagcgccccatcgtattgcggtgcagctccacgccctggcgggcatagatttccgactgacggtacagcggcagatgctcggcgaacttcgccatgattatgcgggccagcagagccggactggcgtaactgcactcgatgggttttggtggctgcggagcctgaactatacagtcgcaccggctgcaggccagttttggacgaaccgtttcgattaccctgaacgcggtgttgatgatatccagttgttcagagatgctttctcccagcgatttcagtttgccgctgcagacggggcattcggtttctgccggggagataacctgcctgccacggggaagtgttgccggaagtgctttgcggacgggagaggctgatgttttcggcgctgtctatccggccattgaagtgagttgcaactacgcctcaccaagcctgttctggagctcggttatacgcgtttctgcccgcgcgatcttcttttctatcttctcgcgacttttctcgctgctgcgaccgaacaacattctctgcagtttagcgaccagcgctctgagtgagctgatctcgcgggcatagccggttatttcaccagacagacggacgataacagcctgctgtgcgatcagcagggccttcagttgctcgatgtcgtcggggagtgtgttgttcattcccatgttttatcacgggttatatccggatgccaggcagttctgtccgtttgggatgttgccacgcgatcccctccagtagcatagataacagagctggcgtcaggtgcactttcccttcccgggttaccggccagacgaagcggccccgttccaggcgtttggcgaacaggcataacccgtcacgatcggcccacagtatttatatgaacgcatcccgtttgcaaggcatccattgttttgacatgacgggtaggttgcagctttatatccggctttattgcagccgtaacgctgcgagcccctatgtaattcgccgactcaccccttattttcacggcggacttcaagcccaaaatactgttcaggtttagtgagtcacggtcttacctgtctttgtcatcactctggccgccatagcaacctttcagcattcacccttttgttaagagttcattgtttaatggtatcagcgattaatatggtctgatactgacgtggttcctgtcatacttacggtcatgggcggttatcgcccatactgttcgtgccagcttgtttgccatggcgacgattgccacactggctggacgacgttttttcagttcggttatccacgggccaggctctttagctactaatgccaccgctcttgcaccgtggataaataatgtcctgagataagtgtcaccacgtttgcttatccccagcagacgtactttccctccggagccagtttgttttggaaccagaccaacatatgcggcgaactctcgccccgatttaaacgctgatgcttcccccatggtggccaccgctgccgtcgcaataagtggtccaacgccaggaatatccagcaaccgcttacaggtttcattctgcctcgccacgctggtaagctgtttttcaatatcctctatcagtgagtccagctcattcagtcggttgtactggttttccagaaccataatgagatacggtggcagtctctctttcatccgttccagtgcttcggggaactcccgctccatcgctgcccggcctttgtggatggtttcaccaaactccagtaacgtcccgtgcagggcattaatttgtgcggtccggaacttcaccagttgcatgcgggtacggtgcagaaccagtaccgactgctgttcttctgtttttacggcgatttctttacccggctgctgaaccgccatccagatagcccgggcatccatcacatcattcttattgcccatgacgaatgccttaacgaagcgggcctgcaacaaccggactttatgaccaagttttgtcagttcccgtgcccagtgctgagaacctccacaggcctccataccaatcaggcatggctcacggttgccgaagaacgtcagaaaatcctgtctacgcaactgtttatcaaccacttcacctgtgtgctcattgatgaagtgaatctgaatgacatgttttgcgatatcaacgccaaccggtgtatatttcatttgtggagtctccagtctgagggagctttatgcatcccgtattgggcactatgatgccggaaatctgcgaggctccacacctgccagtttcacccttttaaccatcatactgctccgtgtttaattgtgtgggatgcgttcattacattttcaccattttgccattgcggccccggaagacaaagatatgcccggagaacgggtcatctttcagcgtgttctgcaccttcgaagccaggccgttgaagccacaacgcatatctgtgatgccagcgatgatccagattctggtaccggtcggcagcgttatcatcggatcccccctttcatttcgcgaatgagcaccctaagaagttccggagtgaggggggcaaacagttttaccacacctgatttaagatgcagctcacactgtggtgagtctacggtagtgtcattctggctttcatcagacttgtttcgccagaaaggatttgtcaccggtttgacggggtcaggagtctcagtgattgccaccggaacggcctggcattcctggagatcctcatcattcagtaagccctcttcatacagtcttttccagttaaacaacagattgtcattaatattgtgctctctggcgatccgtgcaacgactgcaccaggctgtaatgcctgttttaccagcctgattttaaattcacgactgtaggaggttcgtcgttcttttcgccatgtgctttcgctgatttgaggatcatcaggtaattccttctttctattggcataaagtatggcatcgagttgggcgactgaaagtgattcaggtaatggccaggtaataccggaggcattaaatcgttgaaagagattatgaatggtggaatgactgagacctaactgcagggcgatagcccggacagataattgctcgtcgaatcttagacgtaatgcgtctggcaaataagagcgaaagccggtgatatcttttactgtctgagaattcatcgttcgtgtccatcaatagatggacgcgattgttgccagacaggacaaccatcacaagacgtcacagacggagcgcttacaaaccagacgcaatctgtctatgttaaaaaaataacaaagccgggtggaatatattctgcccattttaatttaaaacaaagattagcgagtgctctggtgatttgcacatgcgcaaatctttcagctcaaaggaggctagtcatcacggtgattacgttcaaatcccctgcgccctcttgctgcccattcagcattgagtatcacataacgctcccagcgttcacgcaactgtgcgagctttatcggtaattctttggtgacaaaggcttcaggtatttcaaagtcatcaagatgcccttccaggaatgcatggacgccttccaatacatcaaccagagtgatgttgttactttgttgcccttcaagaagtggcccctgccaactatgccagaaggtctgatggcgcagacaactttcgtcattcgcgagccgccataaatccataaagattcctcgagcaactttgaacggctgttcatcaaactgttcgatgagaaagaaataacacggaatcttgagcgcgttaattcgcgcaatttcaatttcagcatcacggcgcaaggtaatcagattgctaaagcgcgatcgcatacaggcgatagggttcaacacccttaccttttcattcatttcaggcatactggggccggttgcttctacataaaacggggctgtatgcaggtaaagcttttcccccagaaaatcagaacggtcgaagcctccgggccgatcgataatatccaccacatttggctcgtcaggcgcatccggtacggcaaataaacgtccatcatcccgtttgatatcgtgtgtgtcctgatcgataagcataaactgcgcaagggatgggggctgaccgtctttgttttcccacgttttcacgttgagcgtttttgctatagccgcaatatcatctttccgggcactgtagtcgcagtcaacagaagtggtgagacgctcatcaggcaatctgtcgccgtattgtgcatgataataggatatccaatattgcacagcctggccgccaactgtgataacggcatgtttgagctggtcagcgttgcagatcaactgctgatttagcagatacatctgctcataggggggaataacgtcttgaactggcataaaaaaaccatcagcgaatgatggtttattgtgcctcaaagtttaggatcaggcaaaagcgatagtatgggagaatttgctattggctgacttactgaaacggcttttcacggcaggcttgtaaccggcacgaccacgcaaaacctgcaccgctacggcttcgtagcgttcatgctgcttttgtttagcttgtgcgggagacataattttgtacctgatggtggttatatacaaataagctgtagtaactatacgtcacgaatctacgtcacgcaatagcgtactattgttgcaattttgatgtacttccagactactgtctcatcctgcagtgcttcccgttctgcctgcattccttatttaccgtatgtccggctcagttaaccggattcaaattccggtgtccctcccgtcctgaccggtagcagacaagcccaagcctcctgtaacaataaaaggggtaccaagccgcaaccaccgaaatttccggaatgcacaaattttgcgctcggcaacctgtacgtaagaccgctgttaaccggacagcaaagaaatagctgtctggcgcgaaaaatcactgcccgtaacgtatccatagctggtacgaataaattctggggtctgaagtccaatggaacgaaaacgtacgttagtgaagtcactgtctgatatatcataaattatcagacatatgaaaacagtgccgttaatgtgtctattaaatctattttttattataacagacactagttgtccgatatttgatttaggatacatttttatgcgactttttggttacgcacgggtatcaaccagtcagcagtctctcgatattcagatcaaagcgctcaaagatgcaggtgtaaaagcaaaccgtatctttaccgataaggcatccggcagttctacagacagggatgggttggatctgttgcgggtaaaagtagaaaaaggtgatgtcattctggtgaagaagctcgaccgtcttggccgcgataccgccgatatgatccaactgataaaggaatttgacgctcagggcgtsgccgtcagatttattgacgatgggatcagtacagatggtgatatgggacaaatggtggtgaccattctgtccgcagtggcacaagctgaacgccggaggatactggagcgtacaaatgaaggccgacaggatgcaaaaatgaaaggtattaagtttggccgtaaacgctcagtggacagaggttctgtgctggcgttgcaccagaaaggtacaggagcaacagaaattgcccgtcagttaagtatagcccgctctacggtttataaaattctggaagaagggaaggcagaataggccaatattcacacaattaactaatattttctacgcaatacgtgacacctttcgaggagaggtgctcgaaatttcagacataaaaagccccgtagggccttagatgatttcttccaatgctgattccagttcttttacttgcattgctctaagacgaggagctaatgttcgatgggcgtttaagtaatcaatggctcttgttaccagctttcctccgccacagacaacgaaataactctgatgttgtgtgtgttgtgcatcaagaactgtgtggcctagcttctctattgcggtaccactcacttcctgccatttagccgttatttgaacggtaccggtattagtgaacaacaggaagtgggctatttcattctttcccgcgatcagaccaggataactgacattttttttaaacgtcatcggagcttctgagttacttagctcaaagcctgccccagaaataattgcttcaatatcacgcagtaattctgctctggacatactttcaccttatcgtgttgtatcttttttgatcttgggggggaggcagaattttcaagatgtaggcgttttattttatggttaataatcaccgccactcttatggtgagagatcgggataggggctgatctcacgattagcctcctcccacaccaccgtacatacgggtccgtatacggcagttcggttatgtttatcgtcgcctgcctataactccggtaggcccagtctgacgaacaggcgattgggaagtgctatgctcagtgccggactacagcttatccgccattgcttatggcaactccctaccgtttgcgctgcaaggtctttgcttactccccgtctgcgcaactctttgaagcgcttgctgcccgttttccactgtttccacaggacacttcgcaaccttcgccttatccacctgttcagatctctcatcagcgtttgccactggttcagtccatagtagcttttccatcccgtcagatatcgctttaacggttcgataagctgctctaggcttttgcccgtgttacgccccgtcagttctcttatccgggttttgaaccgcttcaccgattccggcgacaccacacaccacacctttctgcccctcctgaagctgtaacccaggaacttacgcgtctccggaagcgctaccgcgctcttcttcgcgttgagcttcagcttcagtttccggttcagccagtgcgtcagccccgccatcatacggttgcctgcccgttcactcttcacatacacattacagtcgtctgcgtagcgggcgaacttcaggccgcgtttctcaagttccttatcgaagtcatccagcagcagattcgataacagtggcgacagtgggccgccctgcggcgtcccttctgtcaccggcattaccagacccgcttccatcacacctgcattcaggtacccgcggataagtgacagcacccgtttatccgatactcgtttcgctatccggctcatcagtacatcgtgattcacccgatcgaagaacttttccagatcgaggtcaaccccccagctgtagcccgactcgatgtatttctgagcctgcttcactgcctgatgcgccgagcgtccgggccggaacccgtagctgctgtcgctgaacgtcgcatcccactgtgcctgcaacacctgcatcatcgcctgctggataaagcgatccaccaccgtcgggatgcccaacagacgttcgccgccgccgggcttcgggatagtcactcttcttacaggggatgggcggtagttgccggacagcagttgcgctttcagttccggccagtggtgtctcagatagtccggcagttcgcttaggcgaaccagaccgccggaggttctggcgaagcggcatttcggtcatcccggacatacgtccagatatatcctgttttcgccttcttcctgcccggtgccagtacttttactggtgtgtcatcagtgtgaaccttgcgggtgttcatcacataactgtacagggcatcattcagcggcgtcattaactggcagcacgcatcaacccagttggagagtaaggcacggctcagttcgacaccctggcgggcaaagatttcactctgacgatacagtggcaggtgttcgcagtattttcccgttaacacgcgggcaagtaaccccgggcccgcgataccacgctctatcggacgggatggtgccggtgcttcaacgatgcagtcacattttgtacaggctttttttacccgttctgtgcggatcactttcagggcgctgctcaccagttccagttgttctgcgctgacttcccccagataatccagctcaccgccacactccgggcaacagctttcttcaggctccaggcggtatatttcacgggggagatgtgccggtaacggacgacgatggcgcgactgtcgcaactggcggggaaccagcgggtcatcctcacgcccactgtaacgatcgctttcctgctcgcgttgtttcagcagggcttcagcctgttcaacctcacgacgcagtttttcagaacgggttccgaacagcatccggcgcagtttttctatctgagcccgcagatgctctatttcccgttcatcttcttcgatcttttcttcggcacgtgccagtgcagagcgcaggaaggcctccgtctcttcaaccagactcagttgctggtctttctgacggagggcttcagcctgctcagagagcagcctttccagctcagcgatgcgaatgaggtatttctgactcatggccgtttttataatgcggtcaggagttttttacaacattgtcagtgcgttaaggcgggatgtttttggctgacgccagtccagcttatcgaggagcattgccagttgcgagcgggtaatggatatcttaccgtcacgcaccgcaggccagataaactgaccttcctcaaggcgtttggtgaacaggcacagaccatcagcatcagcccacaggattttaatcgtgtctccccgtcggccacggaagataaacaggtgaccggagaaggggttatcatccagcacatgctgtatctgctcccccagaccgttgaaggatttacgcatatcagtaacgccggcaacgagccagatacgggtacctgatgggagtgaaatcatcgtcccctcccggtcagctcacggatcaacaccgtgagcagctctggtgaaggattttccagcatcattttaccgtaatggaattccacatggcaggaagctgcacaagcaactgataatgcctccggagcaggagcatctgtagcacagcgcggggtgtcgataagttccactggaaccagagtcggagaggccggaaaagattgtgatactgtagggcctacaatagttggaggcattctacgagaaatacgtccttctctttgccagaggcgtagccatttaaaaatcaggttgttatcaacgccatgttcccgggccagttgtgcaacattggcatttggtttcgaagccagttcaaccatatgaagtttaaattcattagaaaatatccggcgggttccggagcgccagtctgtaggtttatccatcaatagaactccgtctaatttagaaggagctctaatttagtctgcaaggagctggtgttacagacggcattggctttacgcttacttattactaaattcaatacaaacaacaaattatgctcttaacgtacgttttcgttccattggccctcagccccctggtattgcttgcgccagagaaataactggctggctgccacaccgtgttgccgggcaacaagggaggccgtcattcccggttcaaagctctgctgaacaatagcgctcttttcctgtgtagtacgccgtctgcgtttctcctgtcctaagacatcaatcatctgttctccaatgactagtctaaaaactagtattaagactatcacttatttaagtgatattggttgtctggagattctgggggctagtctatcttcagcttacgggctatctgacgatgtgaccagcagtatggtggcaaagccatatcagtcctttctctttgagttcacctagcattgttatctccttaaaaaattgaggcgacaactatgctgacacagagggttattacccgacccacgtaatatggacacaggcctaagcgaggttcttgttttcaaattgttccggactgaggccgccacaccaactgtgccgccgccaccgattgtaatcacattcgatataattaaacaccgttgcccgcattatttcccggctgataaagtgttctccatggatacattccactttcagcgaatgaaagaagctttccacgcaggcattatcgtagcagcaaccttttgcgctcatacttccacgcagattatgccgcttcagttgcgcctgataatctgctgaacagtactggcctccacggtccgtgtgaacgataacgttccggggcctcttacgccgccacagcgccatctgcagggcatcgcaggccagttgcgccgtcatgcgtggcgacattgaccagccaataacggcacgtgaccacaggtcaatgaccactgccagatacagccagccttcatctgtacgtaagtacgtgatgtctcctgcccacttctggttcgagccactggcgtaaaaatcctgctccaacagattttctgacacaggcaggccgtgtgcgcggtagctgaccgggctgaacttccgggaggcctttgccctcagtccctgacggcgcaggcttgccgccacggtttttacgttaaaggggtaaccctgagcacgcagttcatccgtcaggcgtggggcaccgtaacgctgttttgaccgggtaaaagccgcgaggacaacgctgtcgcagtgttggcggaactgctgacgcgtgcttatccttgtccgccgctgacaccacgtataccagccgctgcgggccacccggagcacgcggcacattgctttgatgctgaactcagcctgatgtttttcaataaagacatacttcatttcaggcgcttcgcgaagtatgtcgcggccttttggaggatagccagctcttcatcccgttctgccagctggcgtttgagacgtgcaatctcggtagacatctccagttcacgttcagaagacgtctgctgattttgctgtttactgcgccagttgtagagttgtgattcatacaggctgagttcacgggctgcggcagtaacaccgatgcgttcagcaagcttcagggcttcactgcgaaattcaggcgaatgctgtttacggggttttttactggttgatactgtttttgtcatgtgagtcacctctgactgagagtttactcacttagccgcgtgtccactattgctgaggtagagatttattacccgatctcgatggacgttattgagtgatctccttccatgaagctcgccacgggaatatctgcggcagcgggccagtaatggggtaagtgatagagttaactctgtgttttatgtggggatgatatggaattaaaacaagacatcgaaaaagagattataaaattaataatatcagaatacattagtacactttattatatacatctaattgtacaattgatgtataacaaaagaaggaagtaaaatatcattagaaatgaactcatatttcttgagagagacgttaatatatcagtaaagtgcaaggatattcaggaaggacgtatatcgcaatcagattaaacagcgcttgataactcgtatcaatatctatatgatagggtttttcagcacattatattcatcaggattttattttaaaagctaataaaagctattttatattgctatgacataacttctatgtagccatactaatgataaactctcttttcagagagttttaacccttcgttaatattgccagtcagcaaatcatattcaccacgatattggcgttattgttcaacgccaatatttattttattatttctaaaaatccccctatacattagttaatatagtagcactccccattttcaactgaaaattagcgcattactcatatctgtgtaaataaaaaaggctccgtttttgacctattaaataagtccatatcaattttccaattcttgtctataagaactgttccaccataattttgaatattaataagaggggtattcggcgaaacagagaatttcgataatatgcttccattaataagggtgttgtcatatttgtgattgtcactcaaccatgaataatcggattgaacaatggagatatcttttcttcgagattcaccctcaggaaataatccctcataacatatatgaatactcattttaatgttgttgaaatccaggatgtcctgctcattatatttctttttataatatagaaaaggtgatgtcgatggttctggtgagttataaaaacttttcttctcaaaaaaaggtatcaatttgcttttttggtggagaagaaactcttctttatgccagaaagcagacactacgttattaatgtcttgatatccataaagattcattaatatcccatatttatagtggaatcgattatcttttaattgctttaagagatgtttagttctttcctttatataatcattcttgtaaccgaaaaaaacattttctgagaggataactagatcaaccttcttatttctgacgaattcattgagatcagtataaaaattacctctgacacctacttttttaaaataaaggccaacctgtacaatcacaatgttcagagggggatgtgttatattaaccggtgttttccatattagcggaaataataataacataagagaacggagaaaaaatgatatttttagactaaatgtaactgcaggaataagatttaatattaataaatttaaaacaggaatatctgttcttggtaagatgtcaggaaaatcataatataaaacaatcaatggatttaatggtataaacatcccgaaggcggataatgaggttaatgaaagggcatgtagacatgctccaagtaccccataagaactcaggaaaccatatatgacaagggttatcatattatagcagagtaatccaaatgaaaggtataaattagaactgccataatattctaaaaaaccactagaaaaatacatcccagagaaaatgatagagtataaaagaatagtaaaaaaaagactcactcgtctttttcttgctgcgagataataggcaaaaaatacaataagacaatagcgaacttcataaactgtaagcctatgtatttaatagttggattaaagtcatattctcatcgattagttcaagatcatgagttaccataacgactgttcctccttgattattgtattcagataatatgttcatcactaattttttattctttatatctagactagcagtaggttcatctgctaaaagtatactgggtttttttatcaatgccctagcaagtgccagtctttgtttttctcccccggagagaaatgatacattattattaatatttgacaatccaacggacaccaagatatcattaattctttcccttgcggctattatgttttgagagtctacagaacatagtatatttcttaagacattttgctttacattaatcagagaatcctgaaagatgaatccaaaatattttcttctgatatatgtggtgatgctattatcttttatttccacttttttaccgaaaaattcatactctccaacaaaggcattatccaatagaccaataatattaagcagtgaagtctttccaactccagacgggccagtaataatattgaacgacccctcttttatctcaatagtgctattattcaggatggttctgttttctataggttttttatgtatttttactctaatcatctattataatctcaaacgcagtatctaatagattcgacaattcattccggtcaccatcaattaacagcgtaatagatcgcagacctgatgtatcttcaccttgagttgattcgccactggcacggatatttttgactactgttgcagtccccattagagaattaaccaaagaacgataccttattctcttgtctcttatattccctgtaatactgaccggatcgaatttaacatctatataaaaattatccagaagttctacagacattatatcatcgcctgcatttacatactgctcatttgttacgaagatatttcgaataatgaaaggagtatgcaaaaatggtgatgacaactttaatagttgttccagattctttgactctatgtccagtcccataatagtcaattcagtattgctgattttctcatctatatcatgcaagctttctcttgaaattaacccttttgagaacatagaggttgaatgtgtctttactccttttaatctagctagttttttctcttccatatctcttttcatggccacaatatctttctttgcagtatattcatgattcaggacagaaaatagcttcctttccacagtgaccacattaccttcaatcatgtcctcaagtattacaacccctgcaaaaggactcttatattttacgtttttacttccatgtagaacaccatagtagttatcacattttccctgtattggaaatgtgctgcagaagaaaataatgatataaactataatattcaatctcatatccaattttctgaaattcattttctgtttcatgtaaattctctacactagacaaataagtgataacgtcgtcttgtccattctttaagcgataatttatatactcaactttcctttttttcagagttagttcatttttcatcatcgcaagatttttctctaatctatcaattttctggcgaatttctttttccaatagatctagttttatattttctttcaatgattcatttctggttcgagacatagaaataatcttttctttttgatttactgaagaactaaataatcccattaaaggaaagctgatacccagactagcactataatccattttctgagactcatattacccaatgcacctccttgtttaggtgttaatccaaatgataaataaaaagatgggatctcagatagtttccttatatcattatctatatcagcagccttaatcttgagttttttgttttcagctaataatgtatagaaatccgctgttttacactcttttaacttatgatatgtaatgtctgggattgcastctcaggaacatgatattctctcgagattttatctgacagtaaactttcctcctcctcaaggacatcaatatcaaacctgattttttgtaaaatattatatatcatctctacatcaagagcagatattaatccaattgacattttacgctttgcaatttcgtattctttattgagcttcctatatctctcgagcatcaacatcaggtgagattttttatcttatagttaataatttccgagaacaaattaattatgtagttgttcctctcactaagcatttcaatatattttaaataattagcaatatccaatttattattctgcatttttgcttcataagccgatagaagattataggataatgataaataaaaatgactgtctgtaatagatgagaaccattgattgttgtttatatactgccctaaccctatatttatatctggtaacatcgtttttatattgttatgtttattaatatctaactcttcgatatcaagagaataagaattaaactgaatgcttttctgaaagaaattatcaatgatacagtctttcgccagagtctgtgtcgaaaacagataagcatttattgcaagaaatgagtataatatgtgtctcactcgatctttccttttatcgcattaacagggttaatgctgaaaaacagcctactgaaaatgatatttgcaaatataaacaccaataggacattggcaagtgatattgtaatcattgttgtcctaatacttattgttacatctaaaaaatacttaataatatgcattattactcctgcatggatgagtgaaataaaaagacatacgctcagcattattaatgactcaatgataattagaactgtaatctctttcttttctgtaccatggattatttttaatgctaactctacccgtctcgaataaaagctgcgtttcgataaaataaaacatgtcacggacgcagacagagttaatatcacgtatacagagttagtgagtaatgaaaaccgctctaacactctgtccacagcttccttggcgtttaaagatgtgacaatatcgaattttcttatatcattgtcatataaaactctctttacgttgtttatatctctctttgttactatgttatcaagaaagattttaacagcattgactctgttatcgagtttcattttaaacatagtttccagtggaatgaaaatgtgttcatctgattggtttgctttcaatccaaggctgtcaagaaaatccgtttttgagtttaatctgacaccaataattttaaacggaacaccattaataaatatttgtttcttactgaaaaacggactagattcattaacaatagcaacattgccattgtacttatcatttaaatctccagaatattccgtgttcaatcccagcttgtcaattccgctcaccgaaaatagttcaccggaaaaaggtgtatcgctgacatagaggaatgcgttcttcgagaaagaaagaactttactaaccgtaatgaatttttctgttatatatcctaccgttttaggtcgatataatttaacaaatattaccttgtcactatgaacttttagttcttcttcagcttttaaggaaacactgtatatcaaagagtcagtaataattatccctataaagctaagagataaaaaaacaagaaatgcaaaattctgtcttctattttctatgatattaaggagcgcctcctttagataatagtgcaaagttgtcatgttgaatgataacacaagaatcctcagccacacttacaggcgcagacatgtacagttattggaaacattatatataatgtacctgactattaataactaagggatatataattataagtttatgataataatcgaaatctgtgtgactaaacttagtataaatatatgcacttaatgctgtggagcatcccctgcacgttatgcagagatattaatgatttgattttacccagcaatagtggacatgcggctaagtgagtagactctcagtcagaggtgactcacatgacaaaaacagtatcaaccagccaaaaaacacgtaaactgaaccgtcccggaaatcctggagactaaacttccagagaaagaggtaaacaggatgactaaaaatactcgtttttcccccgaagtcagtcatagggcgattcgtatggttctggaaagtcagggcgaatatgactcacaatgggcggtaatttgttccattgccccaaagattggctgtacaccggagactctgcatgtctgggtacgccagcatgagcgggatcgagtaggaggagggataactcccgccgtcctctcacaccaccgtacatgcggctccgcatacggcggtttatgttaacactggaagtgatcaggaaaatcgatgactggccgtcaaaccgtgtgcatgaactgctgccctggaacctctcggctgtaaaataatccttacgccacgtacttctcggggcgcttacttttcaaatgagtttaaacttcaaatggttaaactggctttacaaccaagggattctgttgcccgtattgcccgggagcacgatatcaatgataatcttctgttcaaatggctcaggatctggctgatcaaagggcgtatatcacggcgtcttccgctaacgaattcttctggaattggcgttgaattattacctgtggagatgacgctggatgagcgtccttaccccgtttttacgcgaggtaattatgaagatcaatgactagccgtcgaaccgtgtgcatgaactgctgcactttcaggatgtaatattgcccggtagaagtgtcataatacaggtctcccggcgttcctttccccccaaagatactgacagtattaaccggtacattgatgtcactggcttttaatgtctgaaagtcgagtgttaccgttgattttttctcactgttattggtgatgatggccccgtagtcagccgcctgaagacgggtaaaggtcaggttattaccattcagatccagacgtccaccacggtatccccacgaaatattatccggattaacctgctgtgagtcagaaagcacaactgtcggacgaccgctggcaatatcaacagagctgaaagcctgtacctttccgtcagcatccgcctgttggttgagaataacagtaccgtcccctaccttgagtccgcctatattcacaccggtcccgtttactgtcagggtaccttcgccagttttatgcaggttatcaccggcaactccgttcacctgccacagaacgtgggttcctttatcggtgataatcccgccccccatccatgtctggccgttcagggcggacaccctgtaatcgccggcaaactgcagatacccgcccccctgattaacggaattctgcagaacgacctcgccattattgccggtgaacaggaggttttttcctgcgttcaggtcatttcctttctttccatgcatatcccaggtcgtgtttccctgagtcagtgtgccggtgccattagctgcatcatatttccactgcagtactccctcaccagaggtgtaggctatggttttgtcaaaatcattttgcggttgctgaccaaggaaatcctgagtggtgacgactcagttatttccatagttagttcccgaggaaagtacgccaatcagtacccatttttttgcagggaatcataagcaaacaggggggagccgctgtcccccatattcagataattagccagagatccattcgcgggattaaaaatgtcaccggtctgagctgtaatcatctatccgttattataggagttcagcgcgctgacggttcccccaacaagaaatccgccattggtatacacatgggtgcaattaccatttttgtctttgacgtactgcatccccccccaaggcgatagaatgcagtaaagcgtccgccggcctgataggcaccgctcacagccccgacgtcagacacttctgccggcgccacctctgtcactagtttactcaggcggcgggttttaatatcaagaccgctattattatttgtaccaaccgtagtataggtgtttttggcgtatccgaagctcatcgtgtcagagccgctgacatgtttggcggtaaccacatactgaggggagtaaagagtatggtttcccggaggcaggctaccggtagtaatagtggcactactgaaatcagtcatcggggctttatcaagtttaccgaccagatggccctgcttgccgtaaatgaaaatattcgtggtccccggcgtaaactgacctttattctcggcaaagtcgcggaatatctgataagggatctctgcactgaccgttgccgacagagctggtcatgccggagaaagtgataaagctgcaacagacataagaataacccgacgtgaaagtctgcgatggcttttgcaggtgaccccgcgagccagttcggagacagcaatcaggtttttggttatatggcaatatttaagacaatatattttgttcatatagaaacatcaacctaattttgacaaagattaattacattggatgtggatggagcagtccgagattatcctcacatataatatcaattactaagtatctgttttttttagttggtgtaatataatttttattaaggtaagcgggaaaacaaccaaaaaacgaaaggtgttatttttttatcgttgcgagcaagtttggttgggggtatgctcctcttttaagtttcttgctcaactttaaaaatagttatgctagttcagtaccgataggagtcagtttagatatcgaatagactaaataactgatcctaatgccgctacactttagccagcccatgttttccaccggggaatgggctgagggtatccataaagtgacgaacctttttcaacaactgtcacattgaacggcgctggtaatttcgggttattgtctcatgaagcgcctgccacaacccttcgacatgattcacccacggcgagtaaactggctgataaatcaccctgaacttcggatttgctttcagccagcgcaacgtttcacggcttttgtggatgatgtagttatcgacaatgagcgtaatcttttttgcccgccgacatgtcgccttcagatgttttaagatcctgataaataatgataaatatttactgttcccaccaatattgctgactttacccgtaccgctgtgcagtgcaccggcaagataatagttttcattctggcccggtgtgaaaacgcgcttttgctgcccgcgtaactgccagtcagcaccgattttcgggttgagatgaatatccactcatcttcgtaaaacacggggttttccgcactgcatttcgccagcgcttcatgaatagcggccattttttcttctttgtgtgggtaacggatacacagtgtcgacgcgactctgcgctatacaagtccggcagcaggtaaccatcgccggatggttgaaacatgtagcgggcaaccggtgacatcacggatttttatcgccagaagttcggtactccagcgggaacgctgataaccgaaatcgccaggagaatacttaacaagctcacgcagcaatgcgcaaatatgttcgaacggccagcgcctcccacgtcctgacggcaatgacttcaggccttcaacacccgacagcgtgaaccagttaatccagcgacaatcgatgaacggtcacagcagagcgttctggcaacataactgacggcgtcaccacgatgcagcatcagcatggcggtgagccgccgggcgtggtttttgtcctttgttttatgatagttttctgcatcaggcatcgttcggttctggggattggtgctatgatcggcatcgctcagtccgcttggtaattttttcttttgggcgattgatcagatcgcacaatccgggctgagttccctcaaagtgatctactattccgcgcagctatttagactggtcccctgaaataccagacagtagatgtatcttaaaataagagattaggccagtctagacagtttttgttgactactacagtttctgaccgtcctgatttctgcttatataagcctcgcaaaacattgctctattcatgcaccactctatgttctctatttcttacagaataaagaggccagtttccagagctcaaaagcaagagcaagatccatattcttctctgcagaagctgcttgtttcgacaaggaatgaaaattctttccagccttcatcaatacctcccaatacaatgttctcttttctgaaatttataacatgataagatatcggaaggatagaataatgacacaatggagatattcaaataggggccagaacgctgctgcaccagaaaaatccggaattaagagattatggaaaaggacttatctccgttttttaaagtgattgttacgtctattgctccgggctggaagatacctttattctgtgcaagatcaagatagtctctcgcccatacatttgatatattaatattcgctgcatttactgtacctgcaacagtcagagacagcattgttgctacaagttttcggtttgttttactcgaaattcttctagttaattcagatacagcgacaagtccagtccatcagtcaatgaactgtatttaagcgaatatattatgttcataattatctctaaaaagaaatattagtattgttaaattattattcaatattatggaaataagaatgcaaacaataacaaatggatagttaacatgtattataaaataatataaaaatagaagtggatatcctcagtcgaaacgagcaacactcgatatatgttgctattttttatctgaccgcaactctttattatgctaacctcctaaaaggaggggcagcattggctgaattataacctctaaatctcgtaattatttattgtgaaaaatacctctatatacatggggaatatctagagagaagtcatatgaaaaaattaagtttgttatcttttctggcatcttgggtatcagcctgaatgcctttgcgggtggtagcggttggaacgcagataatgtggacccgtcccaatgtataaaactgtctggagtacagtatacttataacagcggtgtcccagtatgtatgcaaggccttaatgaagggaaagtaaggggggtgtctgtctccggggtattttattataaggacggcacaacaagcaacttcaaaggggttgttaccccctccacacctgtaaatacgaaccaagacattaacaagacaaataaggttggagtccaaaaatatagtgctctaaccgaatgggttaaataatatcgagctctagctaaaatttcaactctccacgctggattcctatccagcgttttgggaatgacatttcttgtgattgatcccaccctcgtaatatggacacaggtctaagcgaggttctggttttcaaattgttccggactgagaccaccaggtgccagcgattgtaatcacattcgatataattaaacactgttgcccgcattatttcccggctgataaaatgttcttcgtggagacattccactttcagcgaatgaaagaacctttccacgcaggcattatcgtagcagtatcccttggcgcgcatcctgtatattattggcgatagccaacatacgggtatcaccgtgtctgggcgatactcaggcggcagtcccgaaatgaaggactaccgttcgtgaatgcaaagcgtgtttaccggataatgagcgaaaatagtctgttgttgttacatgacaaaccatcacgacagcagcgggaacataaaggccgatatcggtgaaggaaagcaaccagcgttggtgttccgatggctttgagtttggttgcgatgatagcgaaaaactgcgagttacgttctccctggactgttgcgatcgtgaagctatagactgggctgcaattaagatacaacccctgtctggaaataagggggcaagaacacgataaataattgcttattgtaattataagcgtaaaaatcatatcctacatgacgatgtggaaattaataaacgtatcttatatgagttaaaaatttatctttttattgataagagttaggtcactctaacgcagagttgcctgataaagacattttttcatgtgagaatgatatgaaattaaaacaaaatatcgaaaaagagattataaaaattaacaatatcagaatacatcagtacactgtactatatacatctaattgtacaatcgatgtatacacaaaagaaggaagcaatacatatcttagaaatgaactcatatttcttgagagaggaataaatatatcagtaagattgcaaaagaagaaatcaacagtaaatccatttatcgcaatcagattaagcagcgatacattaagacgcctaaaggatgccctgatgataatatacggaatatcaaaagtagatgcttgcagttgtccgaattggtcaaaaggaataattgtagctgatgctgacgattctgtattagatacattcaagagtatcgatcataatgatgattcaagaattacttcagatttgatatatcttatatcaaagatcgaaaacaacaggaaaattatagagtcaatttatatatcggctgtaagcttcttttccgataaggtcagaaacacaatcgagaaggacttatcaaagagatggactctagctattattgcagatgaatttaatgtatcagagataacaataaggaaaaggcttgagtcagagtatattacttttaaccagatccttatgcaatcaagaatgagcaaagcagcattgctgttgcttgataactcatatcagatatcacagatatctaatatgataggattttccagtacatcatatttcattaggctttttgtaaaacattttggcataacaccaaaacaattcttgacttattttaaaagccaatgaaaatatgttttatatcattatttgagattgctataaacatattggtgatgcctctaattagttgaatctgatgtataatacgggcttttgaggttatctcatgtccagcgttaatattcattgtccccgttgtcagtcagctcaggtttaccgccatggtcagaaccctaaaggccgtgacagatttcgctaccgtgactgccaccgtgtgtttcagctcacttatacttatcaagcacgtaagccgggtatgaaagagctgataactgaaatggcctttaatgagccaggaatgatgctggcccggatggctcgtttacatggaattcagccctgccagttgtttaagtggaagaaacaatacctggaaggaactctcaatgctgttgctgctggtgaagacgttgttcctgcttctgaactggccgctgcgataaagcagattaatcaggttcagcgtttactgggcaagaatctatggtccccaccatttttgcaacactgattttgattgatgttggcttgcctaaatctatccggcgtcattatgggcatggatgcccgcgcctcgatgagttccacacctgatgagcccaaaaaaccatccggcttcagtgagccattttcttgctgaggcttttcatcaggccgatatgccgttcatgtcatcaataatcaggcagtattttgagaaagctgtgtgagtggaaaagtgtacagattctggaagctgaatactgtgcagatcatatccataacaacatttaccatcatcgcggatatggccaaaaaagtggctgaagatgatgcagaagtctcatccataaccaagccgggtgcagaaattcatgagtcttagcccacctctggtgatattaaacgtgcgcagggggcataactgattctcgccaatggtatgaatctgaattatggttccagcgcttttgccagcatctcaatgaggttccagaggtgattgtctcttcgggtgtgacaccggtagggctcaccaaagggccctatgagggcaaacctacccccccaatgcctggatgtcgccagataacgctctgatttacattgttaatattcgtgatgctttaataaaatacgatccggaaaatgaactgcccgggaatcctggagactaaacttccagagaaagaggtaaacaggatgactaaaaatactcgtttttcccccgaagtcagtcatagggcgattcgtatggttctggaaagtcagggcgaatatgactcacaatgggcggtaatttgttccattgccccaaagattggctgtacaccggagattctgcgtgtctgggttcgccagcatgagcgggataccgggggcggtgatggagggctcaccaccgctgaacgtcagcgtctgaaagagctggagcgtgaaaatcgtgaactgcgccgcagtaacgatatccttcgccaggcttccgcttattttgcgaaggcggagttcgaccgcctctggaaaaatgatgccactgctggataagctgcgtgagcagtacggggtcggtggatttgcccctatatttccagacacctgttatcacttaatccattactgacctgctgccgtagatattcccgtggtaagctttatcctgaggagtttaaagttgaagctgtcaaacaggttgttgaacgtggcgattcagttagaacagcaatcaactattgctataataatatctattttttgttttattttgttttagcatgtaaaaatttagaaaaaggaggtgtataatgattgatatagttacatatgtaatgaatgctgattttgataatataatcaaaatagcctcagatatggatttaagtctaataaaagatattgtgcgagagactcaggaggatatcaatagcaatggacctgcatggagttcttggtcataaatatagtatctgacaatgtcaatggcatgcataaatgtcgttattataatgacactatggatgtcattgataataaaatagagcctatttatcattctgtgtaaatgtcttttcttagaaatgaccgtcaaggcaatcactaaacttgataataaagcggctcatcgccatgatgacattccttaaggggtattacccatttctgtaacgctaccgggatgacaccgctttttactaactcatctgtcggtaacaccctgtgtttcttgattgagtgacggatcacactgttcagcgattcaatggtatggtcgtataaatcaccttatgaagctcctgtggataacgcggctcccatacacctctgaacgtctccggcgcctgagggacagcgtcttcggttggagccaagtaaacagctttaagacctcgtgttaccgtcacgggcagaatatagaattcaacaaattgaatacataaccctcaaatgcaccatcatatactaaatcaataaattggtataattactctcattcaggaaagcatttttaatatatgggaaacaatagacgaaccaacgagaaaaagcatcgttattgaattttatttcagaacttaactctgtcaaggaaacatatttataactcatagcttccaaactatttaaatctggttcatcatcactaataccatagaaaatatgtgcaatctcatgttctgttaaatcaccgccgacataaacattatagtagatctttaatagtttagataaggggcattctatccccatttcctcccttaatcttctgttagctgcagataaattcgattctcccgggaagggatgtgtacaagaggtattgctccaaaggccgggagaatgatattttccaagtgctctttgctgtaacaataattttccatcgctattacatatataaacagaaacagcccgatgtaaaataccttttttgtgggtatataatttttcggcaatccccgtttcacaatcattatggtcaattaaaataacattctccataaattacccctgttgtgacagaaaaaaatgtaattcatctctaactgctttaaatgaatccaatttgtcttttgtttttaatgacattctttcaataacttctaaccatgattttagaggatgatttatttttttacagcagtaatgatatcttcaacatatttattaatgagatcctcgcatctttcaatacctccaccgagataaaacttaaggagcacagctttttccacattctcatcaatactttcaatgatcttaccatcagaaatccaagggtagaaatgcgatggttgctgcttttgtatgtcttccattatatcgagaacatcatcctgaagggtaagatacataataaagcttttcatcatattatcaaattgatgtgttaactcttgtttttttataatatgaagaaccatatcgctaacaagtaaatgcagtatagattttccaactgcgtactttttaaacgccccctcatccatgcctattaatggtgaaatatctttttccattaacatggtgttaacatactcgttaaaacgacgattataaaaagcatagaaactactaggctctataaatatttttgaggcaatattattaatttctacatctattatttgcaaataatacccaagatattctttctttaaatctcccatgtttcttgaaattagttgctcgtactgttcatcgacaaagaggtctgtgaggattgctcttcgagcaataagcgttgatataataccgacgtatcttatcctttcaatatactgtcctttatcatggagatcacttataaataaaaatggcataaaatagtaaaaagggtaaacattcaaaggctcaaataatgattccaattctttgaatggatattttaatctaatttcttttagagtcctaaagtaaaaaatgatgtcagtataccttattgtttttcgattataattaataatatccattgtgtcattaaataacgacgtttatgcatgtcattaaaactatcagaaactactttcatttattaccttgaactccattgcatatgaaactatattaaaaaccaaaaaattattttatctataaaatcaaatgataaatcaaaacaaaaaaataatagatattattatagcaatagttaattgctgtttggatttgcccctatatttccagacacctgttatcacttaatccgttactggcctgctgccgtagatattcccgtggtgagcgataacccaacgcactatgcggatgccattcgttataatgctcgaacgcctctgcaaggttctttgctgccgttaacccgtctggtttgggcatgacaccatcttgggtatgagaaaaatcagtccagaccaggagctaactcccgcaacggttattccacaaagaccgttatcacaggcgacggtccactggaactgcgtactccgcgcgatcgtgacggtaccttcgaaccacaactggtaaagaaaaatcagacccgtattaccgggatggataaccagatcctctcgttgtatgccaaagggatgaccacccgtgagatagccgctgcgttcaaagaactgtatgacgcagatgtttcaccggcactgatatcaaaggttaccgatgccgtgatggagcaggttgtagaatggcaaaaccgaccactggatgctgtttaccccattgtttatcttgactgtatcgtcctgaaagttcggcaggacagtcgcgtcatcaacaaatcggtgttcctggcactgggcatcaatatcgaaggtcagaaagaactgctgggtatgtggctggccgaaaatgaaggggcgaagttctggctcaatgtgctgactgaactgaaaaaccgcggtctgaacgatatcctcatcgcctgtgtggatggcctgaaaggcttcccggatgccatcaacgcagtatatccgaaggcccgcatccagttatgcatcgtgcatatggtgcgcaacagcctgcgcttcgtgtcatggaaggactacaaagccgtcactcgcgacctgaaagcgatttatcaggctcccacggaagaggcaggccagcaggcactggaagcgttcgctgcggcctgggacagtcgctatcctcagataagccgaagctggcaggctaactggccgaatcttgccacgttcttcgcttatccaacggacatccgcaaagtgatctatacgacgaatgccatcgagtcgctaaacagcgtgatccgccatgcgatcaaaaagcgtaaagtgttcccgacagacgactcggtgaaaaaagtggtgtggctggcaatccagtctgcgtcccggaaatggacgatgccgttgaaggactggcgaatggcaatgagccgctttattatcgagttcggtgaccgcctggacggtcacttctgagaaaggcatttacacagaatcttaaacaggctccagaagggcggggcgactccgtccggccagtgaaccgtgccacactccgggcagtacatgcctccagcgctgataccggcaagaatggtcgcaaattcccgctccgtgcagcgggcgatttccggatacccttcgtcatcaacacgtacaaaccagaagaccagctttttgtttcccgcatccacttatgcgatcaaaaagcgctaagtggggcttagcgcactgtttttaatttatggtaaaaccataacaccatgggctgttatagagtaacttccaggtttaatatattggtctggaataacaacttgaacgttgtaattaccgcttcttgtcactgtgcccgaaaaatgtccagtatttgttcccacgcggtccaagttacccccaacaaaatactcgctaagagtatatttatctccccgctcattaattaattgaaatttattattaatcccatccccccaaatatgatacttagcatttatattcttgcaattgttatcaaacgttggggtgaacgttactcttaatgctcctcgtcctggctgagcctgatattcatcgtttataccacttattgaaagatttaagctacatttgtttacaaactttaattttgcagtagcactagctatatttcccttgttacctgtaataactggatccgctgctatagataacccactgtacaagctgaataccagactcgcaatgatacttatctttttcatatgaaaaatctcctaaatattgtattcactttcagtttttatttagcgaaacattttgaataaaaataaacatacaccaccaattaactacatcacgtcattaataccccgtattcatgctactgaatgacatatacgtttagtctatttaatatcttcgacgataatatactgttatcttcccaaaactatacactcaccgcttattgaaagcatatattcgccaggaataactttctgatctccatcaactatcacatcaaatatagcctgttcttccttgcccagcctaaatattccccgttgagcctctccaaaagaggaaatccagccattaccacctatcctgacccgtagttcatgttggatccctttgctgttttgtacaatataatgttccggacgtcctccatcctgacgggcattcatccatacatgaaaccccgtatgagtttcccgacaggtcattcgtccagttgccagtttcataccatcacgtaactggctttctgtgtttctgtggctaaccaagttaatctccgcagccgctgacaggctactcactaccatcagacaagctccacaggatagcgacactatcccctttttcatcatcagattccttctgctatatgcatactgcactagtaagatagagccctgctggtcctttttttacaggaaggcggtagtttgcatagcaatggctattcattccccactgtgccttcagtttgccagcttctgacaatccactcagatacaccatccccttgtcatccactacccctgtagaatttgatacttccgtttttccttctaaggtaacgactgtaccaaatggtaaaggtgttccatccgcacgagccagcctcacgactgcacgattacccactcgggtcttgaatttagcccgtacaacggctcctttcgtcggaacgacacgagtatcagtttgaagcacctctgcattttcagggaaagttgtcgggtccagtgtaataatattttcctgatatggggttatataactcactaatgcatatccacgagaatcagtcgaaacgcccggccagcctccaacagaagccccccgtacacctggtgctgcaatcaaagccatcgtatcaccgaacctctgaccaaatgttataccttcactatgcatagctatgcttcctgacatccctgcattcatctggcgagtatgactattgtaactatacatccccactagttctccatagcttcctgaccaacgcatattcaatcggcttgtatctgcatcatacttgctaccaggcactatctgttcacggatgtcccagtatagcttctggtcaaaggcacgtccgtttagtcccatttcataacgagtgttttgtctcgtggaatgctgtatttgtgcagtggcatttacatcattatcattttttcccagccaatgcttcaatgggatactcatccacataccaacagtgtcttcattaaaggttcgattactaaagtagtccccaacattgcgattgcgtgtccagttaactgagaaagatatatctttccatgacatactatatgatgctccaatataatcctgtctgtccccccccttatattcatccctccccccgcttagtcctataaatccccatggaccaagagactggtttatatttattgtaatcctgcgcctttttctatcagtatcattaaatacaaagttagctccactgcgataagtatccaaaatatctgatagttcatgatatccttcatttgaatactgataactcgcagctgaaaaactagtgtctgtcagttcaaaggatttgtcataacggatgcgccaactgtttcccgtatcaaaatcatatcctttttgctggcctcgggaataaatcgtatccaatgatgctgcacccatatttcctagcgacaaaccaacccctagtgctgcagcctgataatgttcagcagtctgaactccaccaaagactgtcaatgcccgtggtaagccatacatagctgttgcttgccatagatatgctttttctacagattcatccgatgaacgatactgtccagcacttatattatactttagatacccctcacgcagagctatggctggtgtagtaaatggtacattaaaagactgtatggctccatccgactcaaatatggtcacctgaaactcaccaccggatcccgttataggtagatctgttaaagcaaaaggtcccgctgctacagtttgactctgtattagataaccattttgacgtatttcaatccgggcttgagtacgtgcaatacctctaattacaggagcaaatccacgctgatcataaggtatcatattctcatcagttccaagcatcacccccctaaaagggacactggcaaaaatatctgcaggggtatagtcttcccccagtgttaaacgactttttatattattcaacccacgttctgcacggatgtatgagctttcccattttcccacttgaccagaagacttattcaaagttgtcaagtttctgatacgccacggcccaatgttaattcccggttccaaactgacccagaaattatctgacgttgttttctcataatgttgaaattctgaatgtcctgcctctacctgccaatttagcaaaaaagttgatattccgtcttcccatatcaggtcggaagcaactcctctcaatggtgaacgaattgctacttgagggatactaagcactaatttctgcgcttcaaacagaaactcttcggttgcttgaggaattacagataaatctgcacattgtctttcatctttttttccataatgcgagaggaaaagtttagggtatttctctgtcttcaccccataacgcattaacaactcctcacttaaacaagcctttaaataaggttttccattactatgttcggcatggaaaaatatatcctctgaacccacaatagttccatttagaaaaatatcgactggataaatgccgggaagctgccctccattttcaaaaagagttaggtctactccctcccctcttctctttagcaaagatgcatcgaatgaatatgtctttccatctgaatttctcgtatggaaaagtgaaaatgcgattattacgaaaaaacacacttttaccatgctatttatatgaagcataaagatattccaccacaggaaaatatatataaaaaatgctccagctattataattataaatttatatcagtttcaaaaaactcactaaccccaccgtaatcagttacaattttccattgtactttactactcttactcacaggaatcggatattcaaaagaggaaaacggagctatataatgatgttcagatatttcttccccccccacacgcaactctgataaatttatataaaaaggtgttgggttgactccttttaatttattgttaaccctctgccactttacttctccggcaacatcttcaggatgtccttttacacttgatggacggacaaacatcttgatacaagtacttaatgagacttgcacattcaaagttacattgtttaaactatttttattactctcagcccatttttcatcagactttggcggaattcctttcacacaaatccattgtaaagtttcccgatctttcggaaaatcaccacctgttcgaacaatacgaagacgactggattgtaaggcatcaagccgaaataacggtggcgttatgataaaaggtgctggtgttttttggtcttctaataatacctctgactgaactaacattgggtaatcataatcattaataattgttaatgtttctccagaggaaaaaatgttataaatcacacgagtagcccccaaatgcagagaaaacatttgggtcttatttccctcgttttcaaacgtttttgcatttgcagatacaaaaaaacatagcggtaaactacttaccagcaaagctgttcgtattttcatatattttcttagggtagtcatatgcatttctaatatagagtatatagtgcgccaatttattgtgagataaaaaaatatcatacattgatagtaagagttaatagagcaccgtattgacgcttttttgctggttgatacagattttgtcatgtgagtcacctctgactgagattttactcacttagccacgtccactattgctgggtaagatcaatctgactctgcccacgcttgagattttctacaatcgtcagcgtcgtcactctcgtctggggaatatctccccggcagccttcagggaaaatatcatcagatggctgcttaaaaaaagaacaaatggtagtgtccgctattgccagtacacctcaccagttgttacgggaaggaatcagggtggccagatgtatagtggcgcgcctcatggcggttatgggacttgccggtgttctccggggtaaaaaggtccgcactaccgtcagccggaaaaccgttgccgcaggtgaccgcgtaaaccgtcagttcgtggcagaacgtcctgaccagctgtgggtggctggttttacttacgtcagcacatggcagggcttcgtctatgtggcgttcatcattgatgtgtttgccggatatatcgtgggatggcgggtctcatcgtccatggaaacgacattcgtgctggatgcgctggagcagtctgaaccgccccgggaatcctggagactaaacttcctgagaaagaggtaaacaggatgactaaaaatactcgtttttcccccgaagtccgtcaacgggcagtccgtatggttctggaaagtcagagcgaatatgactcacaatgggcgacaatttgttccattgctccaaagattggctgtacgccggagactctgcgtgtctgggttcgccagcatgagcgggataccgggggcggtgatggagggctcaccaccgctgaacgtcagcgtctgaaagagctggaacgtgaaaatcgtgaactgcgccgcagtaacgatatccttcgccaggcttccgcttattttgcgaaggcggagttcgaccgcctctggaaaaagtgatgccactgctggataagctgcgtaagctgtacggggtcggaccggtatgcagtgaactacatattgccccgtcaacgtattaccactgtcagcaacagcgacatcatccggataaacgcagtgcccgtgcgcagcgcgatgactggctgaagaaagagatacagcgcgtatacgatgaaaatcacaaggtatacggtgtgcgtaaagtctggcgtcagttgttacgggaaggtatcagagtggccagatgcactgtggcacgtctcatggcggttatgggacttgccggtgttctccggggtaaaaaggtccgtacgaccatcagccggaaagccgttgccgcaggtgaccgcgtaaaccgtcagttcgtggcagaacgacctgaccagctgtgggtggctgattttacttacggtgtgcccggagttcagggcgggcatggatgcttaaatgaaccgcgagtctgtctggaatattgaaccggtaactcacgatgagaaacccaacaatcccaccgggtgtgacggtggagaacctgagcggcagtgacctgcggcatgcccgcagggtgatgtaacccgctgacaacggggattgaggcgagatcactaagccgagatgatcctcaaggttaagtactgaaaggctgaagaacatgaacccgttaatccgcctctgtgggttgaaaacgtcaccacggcctacgtgatctgacaggccgtgcaggaggaactggcagtgatacgtaagcactgccggtcgaaggtgttttgacatgtatgcgaaacaccggggcagcagcgtctatcacgcttgcgttgctgacttctgccaacttgcggcaagcaaggataaagagtgcgacgggcagcctcctcagtatgcctgagtccaggcaggtaaaccggggaaggtcagcgacggatgttaagggggcatggctccgatgacgcgctggctggcggagcttccgtagtagtccgcgatggggaaagcccattacatggcgaagggaagcagtttgaatgtgtttgcgacgtgaattaactgacctaacgaggtgaagacctttgataatcagcgaaatgcaacgcaagcttgccacatgggcagccaccgatccgtccctacggattcaacggctgctgcgtctgataacacaaccagaatggctggctgaagcggcgcggatcacgctttcatcaaagggggcccatacccccggcgttgatggcgtgaacaaaacaatgctacaggccagactggctgttgagctgcaaatcctcagggatgaattactctcaggccactaccagcccttgcccgccagacgggtttacatccctaaaagcaacggcaaactgcgaccactgggtatccccgcgttgcgggatcgtattgttcagcgggccatgctgatggcgatggagccgatatgggagagtgattttcatacgctctcatatggcttccggcctgagcgcagtgtccaccacgcgatccgcacggtgaaattacagctcacagactgcggtgaaacccggggacgctgggtgattgaaggcgacctgtccagttacttcgacaccgtacatcatcgactgctgatgaagctgtacgccgcaggatcagtgacgcacgtttcatgactctgctgtggaaaaccatcaaggcgggacatatcgatgtcggtctctttcgggcggccagtgaaggtgtgccacagggcggtgttatatcgccgctattatcgaacatcatgctgaatgagttcgatcaatacctgcatgagcgctacctgagcgggaaagccagaaaagatcggtggtactggaataacagtatccaacggggccgaagtacggcggtcagagaaaactggcagtggaaacccgcggtggcgtactgccgctatgccgatgattttgtcctcatcgtcaaaggcaccaaagcacaggcggaagccatcagggaggagtgtcggggtgtgctcgaaggcagtctgaaactcaggctgaacatggataagactaaaatcacccatgttaatgacggctttatctttctggggcacaggatcattcgcaaacgcagtcgttatggcgagatgcgagtggtctcaacgatcccgcaggagaaagccagaaacttcgccgcatcgctgacagcactgttatcaggcaactacagtgaaagcaaagtcgatatggctgaacaactcaaccgaaaactgaaaggctgggccatgttctatcagttcgttgattttaaggccaaagtcttcagttatatcgaccgtgtcgtgttctggaagctggctcactggctggcccgcaaataccgtacaggtatcgcttccctgatgaggtggtggtgtaaatcaccgaaaccgggtcagagcaaaacgtgggttttatttggtaaaaccaatcacggcaagctcagcggcgaaatactgtaccggttggtggggcaaggcaagaagctgttccgctggcggctacccgaaggtaatccctatctgaggacggagaccagaaacacgtatacatcgcgctttacagaagtggcaatggcgttcgccagcatttaaatggagagccggatgcgctgaaaggtgcacgtccggttcggggaggagaggcagggaaatagtccgactacgccctgcctcttactctactcagcacatggcggggcttcgtctatgtggcgttcatcattgatgtgtttgccggatacatcgtggggtggcgggtctcatcgtccatggaaacgacattcgtgctggatgcactggagcaggcgttatgggcccgtcgaccgtccggcacagtccatcacagtgataaaggttctcagtatgtatcgctggcctacacacagcggcttaaggaagccggattactggcatcaacaggaagtacaggcgactcgtatgacaacgcgatggcggagagcatcaatggtctttacaaagcggaggtaatacaccgtaagagctggaaaaaccgtgcagaagtggaactggccacactcacgtgggtggactggtataacaatcgacgattgctggaaaggctgggccatactcctccggcagaagcagaaaaagcttattatgcttccatcggaaacgatgatctggcagcctgagttcacagataaaacactctccaggaaacccggggcggttcagtgggcaacaaagcaatggccacagttttccggtgtggtcgcgctgacggcagaaaaccgtaatcggatcttgaagctactggggctgcagccagttggtgaggtctggggagtaggacgcagactgacggaaaagctgaatgcgctgggtattaacacagcactgcagctggcgcaggctaacacggcattcatccggaaaaacttcagcgtcattcttgagcgtacggtacgcgaactcaacggcgagtcctgcatatccctggaagaagcaccaccggcaaaacagcagattgtctgtagtcgcagttttggtgaacgaatcacagacaaagatgccatgcaccaggctgttgttcagtatgctgagcgggccgcagagaaactacgtggggagcgtcagtattgccggcaggtgacgacatttgtacggacatccccctttgcagtaaaagaaccctgttacagcaatgccgctgtggaaaagctttcattgcccacacaggacagccgggacattattgccgccgcatgcagagccttaaaccatgtctggcgtgaagggtaccgctatatgaaggcaggagtcatgctggctgatttcacaccatcgggtatagcgcagccgggattatttgatgaaatccagccccgtaaaaacagtgaaaagttaatgaaaacactcgatgaactgaaccagtcgggaaaagggaaagtgtggtttgcggggcgaggaaccgcccctgaatggcaaatgaaacaggaaatgctatcgccttcgtatacaacacaatagactgagatccccattgcttcattctgatatatcagaataattttttcattttaagacgcacatcattcattgcctcctgcaccgaatcagtagcagaaggaggcattttttcagcagattgcgaagcaccgagttcagtcaacacagctctgatatcggcctgagaaggcttccatccagtcgtctgactgagtaaggttacaacctgatctgctgaaaactcctcgctcaaaatggcagtcagcaatacaggcaggcgaggatcaagttggtgtaacgccattccagaaataaatgcattccggaacagctcaccacgctcagaacgcggaacggactctatcgcttccaaagtttgaaagtctgcagctttttccggatgcagataaagtgtgtattttttccttttccgttcatcgtccacaatattactcctctttgaaagccgcgatagcttcaaccagtgctgtctgtggcgactccatcatcactactttttgcccaagatggtgccatgccgtttttatcgaatcatagatcaacggccccaccaccgacaacataaacacgattcacatgatggaaatcaccgagctcattgactacttgctcccccaaactggcaatagccccctcaatggtattaaggaccagatcagtttttgtttcgtcatttataacctgccgaacaaagtccgggtcattacgacgtttaatcaattcatctgcaacgaggaaactggtatcactggatgccatgcgcaatgcactcattgcagctttcgtaactgaagacacaccaatgccagaattaccatgaatggcacttacagagtcaaattgaccaacgataacaccaacatcaagcgtagtgccgccaatatcaactaccagcgatttttcgaactgaccaactttatccacgaccagacgagaaaacacagctggcaatgattcaggcatcacatcaacgtgttcaatggtgaaaacatcgcctttattaagacgaatcggcctcattaaattctcaattttacgctgaatgttgagttcatttttttgacactctttcgtatagaactcactgataggcaaagtcacagtcaatgatacaggctgaggcgctaatccactattcagtaaagcgtgatgcacagctaacaggttaacatccgtatattgatactcaatatgagtcgtaagaatagattggttgctaacttcatcatacgtgtattttttaccatccagttcatagttaaatgtctggcgaattcctaacccgtcaaccttccatccatgacgaaatgagttttgcgacaacgacttacagatttccccattatcattccatgccaacttgattgttgttgaaccatcatcgcagtatacgttcatctatagccccttaaatactcaatctgagtaaatcattgtttctggttgcaaggtaatactcaatttgagcactatcatagttatgaaatcacaaaacacaagtattatttattacatcacatgacatacttcatatttcatacttaataaatatgaacacatattgacacctcaggttaccgtgtcaaaatatcatcatacttcacacatcacatttatgaggttgcaatgattactgtagttggtgggaacaaaggtggttcagggaaaactaccattgcatcaaacctggctattgctctcgcaaataaaggaagggaagtctgcctgttaaacggagatctacaacgaacagccgcaaaacatcatgcggaacgagaagctgcaggactgttaccagcaataacccttgttgagaaatttgataacctgacacaaacactacaggctctgaatgaaaagttcgatgatgtaatagtggatgtcgcaggaagaaactcaaaggaattcataacgagtggagttgtcgcacatcaaataattgcgccactacagtgttctcaaccagatctggatactcttacagaactagaacaacagatagacgcaatgcgtaaccttaacccggaacttaaggtttattgtttacaaagtatggcaacaaccaatccggttttgaggggaaatgagagaaaagaattccttgaatatcttgaagaattcccaacaattcaagtccttgattcagttatttgtttcagaaaagtctatcgcgattgcatgagcaacggcaccggtgtagtagaaacgaacaatacagcagccaaagcagaaattgaacatttaatgaatgaggtatttggcccatggtgaagaaacccagccagcaagcattaaacagagctgcagttacggtagaacaagcagaggctctggctcagcgccttgcggataaaccatacggcgcgccggaaaaacccgaaccagaaaaacaatgtcggacgacaatctctcttggtgaaagcatgcttgtcacaatagaagatctggcattgaggaataaacgcaatggtaaagatccaaaaaatgtaagtgccatcgtcagagtagcccttgagcaatacttaaaaacactaacgtaataatcaataagttattacttatgaaatcacacttgtgaattcatactgtttaagcacccttgcatacaagagatcacatattgcagtggtctctttttttacagaataaatcacaattcataattatgatttatgaattatgcgtgtctgtttttcagcattgtgaccgcatcggactcaggcatcgaaaactgcacccggtgccgtgcagccacatccagcgcaaacaccttcgtgtagacctccgttgagctgatggacttatgccccatcaggctctgcaggaccttcagtggtataccggcatacagcatgtgcatcgcataggaatggcggaacgtatgtggcgtgaccgggacagagaacgtcacaccgtcagtagcagcggcggcaaccgcctccccaatccaggtcctgaccgttctgtccgtcacttcccagatccgcgctttctctgtcctgcctgttcgtttattacgccgttccagaggaattttcagtgttgccaccatcgtctgcagctgactgacgtaccaggagtcggagagcggaaccagccggtgagtctgctgtccggcaggcgttcttcctgccgtcctggcggctttttcggtccgctgcttcagagtggccagctgcacaaacggatacggaggcgcgagcgaaaaatccccccgcgtcagcgccagtgcttcattaatgcgcgcaccggtgttccacagtgtggccagcagcatcttgcggcgcagatccgggacgtaatggagcagggcactcacttccggagccagcagatatttcggcagttcatcatgaaccatcgacatctggcgaagtgccagagctgccggataatcaatgacaacaggaagttgtggagactgtccggcagaataaactgccggtaccctggctgcagactggctgtgtataacggagcctgacatttatattccccagaacatcaggttaatggcgtttttgatgtcattttcgcggtgactgagatcagccacttcttccccgataacggagaccggcacactggccatatcggtggtcatcatgcgccagctttcatccccgacatgcaccaccgggtaaagctcacgggagactttgtctgacagcaggcgggcactggccagggggatcaccatccgtcgcccgggcgtgtcaataatgtcactctgaacatccacaaacagacgataacggctctctcttttataggtgtaaaccttaaactgcatttcaccagtccctgttctcatcggcaaaagagccgttcatttcaataaaccgggcgacctcagccatcccttcctgattttccgctttccagcgttcggcacgcagacgacgggcttcattctgcatggttgtgcttaccagaccggagatattgacatcatatgccttgagcaattgatagctgtcgctgtcaactgtcactgtaatacgctgcttcatagtacacctctttttgacacacttcgggtatgcatataagtatatattattatgatgcaaaaatcagcgcgtaaatacacatactgttatcttacttttagtaagccttatttattttaccttgcgttatgttaaccaataaaaatcaaaatctgacttataaaaacaaaccgtaattatcgcattcccgtttccgtcagatccgactttcatgaatatcacaactttccggaagtgtaccactctgagaaaatcatcatatcactgttttccgcccctgcgcggcgcatcacaggtcagggagatgacacaacatatagtgtcattaacagtaagcgtcaacggagcaccgtattgacgcttatttattggtgagtactacgttccatggcaggagttcatcaactcggttggaaggccattccggcagtacgctcaggatatggcgcagatacgcttccggatcgataccgttcagacggcaggtgccgatcagcccgtacaacagtgctccacgctcgccgccgtgatcgctgccaaagaacataaagatgatatgacctttatatactcactatagcattggtgggatattccagaggaggtcatcatgcattcggaaaatattgcggcttacgtcgggctggatgtgcataaagaaacgttggcggttgctattgctgcacctgaacggcttggcgaagttcgttattatggtacgattaacaacgaagcccaggctgtacgtcgattatttcagaaattgcagggactttacggaaacattctttcctgctatgaggctggcccctgtggttttgggctatatcatcaactcacagcgatgaatataaaatgccaggttattgccccttcccgcataccaaaatcaccgacagacagaatcaaaaatgatcatcgggacgcaatttctctcgccagattactgcgggctggagaacttacccctgtctggatccctgacctgactcatgaagctatgcgggatctaatcagagcccgtgcagcagctaaacgagacagcagagttgcccgacagcgaattctgagcatgctattgcgaacagacaaacattatgcaggaaagcactggacaggaaaacatcgaacctggttagctaatcaatcatttagtcagccatctcaacagattgcttttcaacactattgtcagagtctggagcagattgaagatcgcatacttcaactcgaccaggaaatatctcgcctgttacctgagtggtctctgtgcaatctggtctgccagttgcaggctcttaaaggtgttggtcagctaattgcaataactctggttgctgaactgggtgatttttcgcgattttccaatcccaaacagctcatggcttttctgggactggtgccaggtgaatattccagtggaaacagtattcgtcccagaggaataacaaaagttggaaacagcgaactgagacgtctgctttacgaagccgcctggtcttatcgtacacctgcaaaagttggggcatggcttatatattaccgaccggactctgtaacacaatattccaaagatattgcatggaaagctcaacaacgattgtgttctcgttaccgaagtctgacagcaaaagggaaaaaatcacaagtagccattacggcggtggctcgtgagttgactggatttatgtgggatattgcacttgctgcccaatcatcattcagtcagcagaagcaaaattaaaccctgaagcagtcagacacggaatgagtgatcctcgtaaaagaattcagggaagccagaatgcgctaatacctgcacgtagaaagaggccagctcactgcgtaaatcgtcatggggctaaaatccccgaataagagtttgtaaaatccaagatacagtctgactgtttcaggttctttaatccgcgatataacgaagctcccggagctgcgtaaggtctttttgggcttaatatttgacaaaggtcataagagtttttctttccgagacagactgcacgaagcgctctttccgcagcattattatccgcctccgccagaccgtcatcactgtaataacagagggcatcccactgattcagtacatagctgaacgcttcgcccagtctggattttttcgacagcgtaccattcttctccaccatccattcatgcagcgacgtcagtaacactttgcttcgctgctgcctgacggcaagacgctctaactccggtaatccccgtatttcatcctcgatggcgtacagttcactgattcgcttcagggcttcttctgccgtcgcacttttgctgctgatgtatacatcgtggatttttcgccgggcatgggcccagcacgcaacttctgtcagtgcaccaccttcacgttctgcactgaacaacctgtcgtaacctgtgaacgcatccgcctgcaggataccccggaaggggcggaggtgttgctccgggtgtttcccctgccggttcggcgagtacgcgaaccagaccgctggaggagatgacgaacccacattgcgatcatcccggacatacgtccagatacgccctgttttcgcctttttctgacccggtgccagtacctttaccggtgtgtcatcagtgtgaaccttgcgggtgttcattacataacggtacagggcatcattcaccggtgtcattaactggcagcacgcgtcaacccagttggagagtaaggcccggctcagttcgacaccctggcgggcaaagatttcactctgacgatacagtggcagatgttcgcagtattttcccgttaacacgcgggcaagtaatccggggcccgcgataccacgctctatcgggcgggacggcgccggtgcttcaacaatacagtcacattttgtacaggctttttttacccgttctgtgcggatcactttcagggcactgctcaccagttccagctgttcagcgctgacttcccccagataatccagctcaccgccacactccgggcaacagctttcttctggctccaggcggtgtatttcacggggaaggtgtgccggtaacggacgacgatggcgcgactgtcgcaactggcggggaacctgaggatcgtcttcccgcccactgtaacgatcgctgtcctgttcacgttgtttcagcagagcctcagccagttcaacttcacgacgcagtttttcagatcgggtaccgaacagcatccggcgcagtttttctatctgagcccgcagatgttctatttcccgttcatcttcttcgatcttttcttcggcacgtgtcagtgcagagcgcaggaaggcttccgtctcttcaaccagactcagttgctggtctttctgacggagggcttcagcctgctcagagagcaacctttccagctctgcgatgcgaatgaggtatttctgactcatgaccgtttttataatgcggtcaggagttttttacaacattgtcagtgagttacggctggatgtttttggctgacgccagtccagcttatcgaggagcattgccagttgcgagcgggtaatggataccttgccgtcacgtaccgcaggccagataaactggccttcctccaggcgtttggtgaacaggcacagaccatcagcatcagcccaaagaattttgacggtgtcaccccgtcggccacggaagataaacaggtgaccggagaagggattatcattcagcacatgttgtacctgttctcccagtccgttgaaggatttacgcatatcggtaacgccggcaacgagccagatacgggtacctgatgggagtgagatcatcttcccctcccggtcagttcacggatcaacactgtgagcagctctggcgatggattttccagcgtcatgttaccgtgacggaattccaccttgcaggaactggcactgactctggtctgagtggaagtggataaagacggcgcaatggccgccacaggttctttctgctcatccggcgttatttctacaggtaataattcaacgccagtgtcagaagaggtcgttaccggaagacgccgcgaaacacgcccttcgttctgccagagcctgagccatttgaaaataacattatcattgacgccattttcacgtgcaatctgtgcaacacaagctccaggttgtgatgccagttccaccatacgaagtttgaattcattcgaatagtttttacgaggttcttttcgccagtcctgtaattccatacttagatgtccgtctatatcagatgggcgtctaagttaccaattctcgtctgatggctacatacggctgtcagtttacgcttacccaaagtcaataactgacagggtttattctgcatcctccggcaacaaaggcatatacgatattcacttattttgtcggtccaacggctttttacagtagctcgttttgccctactgatgctacagctctttggtttgcttcatcgcggatatcagctccgacacaggcacagctgactggatgcaacgtctgcacttctccggatctgaaacgtcaattatcaggattctgacgattagtcttaagactgtcggtaaattaagtgatgccagttgtcaggatattcatggagccagtctgtatgcgcctctggcgttgaaacaaacatatgaagtgtatttcggatatgactgtacgctcaggaagtacggcagattccgtcaaaaattacctgtaaagacagacttcagaaaaaacagtgctcgccgcagaccggtgaccgggcgaagcccgcgaaccggcgaggaagcgcaatggatctgtagttacagtgagcaggtacgccctgaagccttcataatcggtagtgtatgctgtttttctggaatgatttatccacatatccagaggcccgatccagtaaacagatccatgaatgatcaacaaaggatccattaaagatccccatatcgctgtaaaccttgtcattaatggtccgggagcacgatcacataagctgtggcatgttactgataaactgtaacaagttaatgataatctgtattaagtaatacatatactgcagtaagttaatgacataaactatggtcagtacgccagactctgttgttaaatacagactgcaggttttcttcagt

SEQ ID NO: 626 - DNA, 10482 bp, Escherichia coli
agagacgcaaagataaagggcgctaacatgcggattataagaggtttttaaatacttgagtagacttggggagacattagaatggtgccgataataggagtaaaacactcgattaatctcgtgttaatgccatcacctacgaccattactaattgattgaatcttatagaaaaatcatcattttctatgcgtcacaatcaattttcacattacaaacgctccgacactttagccggagattttatgagatacaagcctaaccaatacttaatctgtgattcttacggtaactactatttaaggatcacgctgcctgtgtatatgcagcccttttttgaaggaaaaaggacgtttgtcagaagtctacacacaagtaatcttcgtgttgcacgtagaaagcgtgatcagattgcagatgaataccattgcttacgggagagtgttgcccctgtaaacagcacaatagaaaacacgctggaactgttacgcagtaaggctaaatacgccaaaacagctaccagagtgcaagatacagcgtcttcgtgtccgtcattgcttaaaattcttgaaatctacctgacaattaacagcacgaagaagaagccagccactttagctaaggcaagaaaagcggtagagatgtttctctcctaccgtaaaaagcctgatattgcattgcaagatgtaagccgcaccactgttacaggctggattgaacacatgcaaaaaactctttcacaacaatcaattgcaaattatatcagtccaatggcccagctatgggaattagcttcatcacgttaccacgatgcgccagaaagggcgctctccccctggcgagggcataggcttgatgtggcacaaagtagagagagctacgaggcattttctaacaaagagctattgcaggtgttgcaagtattttccggtaattcagcagaaaacaaagaaatgacggctttgtgtcttatcggtttatatacaggtatgcggatcaatgagatagcaagtctcacaatagacgatgtgaaagagatcgaaggtgtgctgtgttttgaaatcacacagggaaagacgaaagctgcggcacgtgttgtgcctgtgcataaccttatcactccgttggtgttgtcgctgcgtgaaaagcctcacaatggctttttgttctatcacgccagcattacagaacgtgctgacggtaaacgctctacgtggcatacacaacgatttacaagagctaaacgaaaggctttaggggaaaagggaacagaaaggaaagtgtttcattctctgagacacggagtagcacagcttcttgatcgaaatcaaattccagaagacaggatcgcccttctcctgggccatacacgcggcaatacagaaacattccgcacatatagcaaaaatgcagcttctccaatagagcttaaaaaatatattgagcttttacgctaccctgaaatagagaaaggcttatcaatcaataaaaaatcaaatttaaggcgtaaaacaacgctatagacgtaataaagaggcttcaatatagactgatgcctcttttatgattatctcgttacagagcgtttcataggcgtttaaggctattgtttaaatactggcgttacaacgtcttgccctgggcttttttgatttttctgttctgttgtatttacctgcattttaacctggcctcctacagatttatttggtgctgtttttaccgcaattgcgcttgtagttgctttagagacaagacggatttgctcaaaatcaagagtaaacaataggctttcgcttgcttcttcttcgtaagacatgccaactaacacaacgttgtcataatttttaactcagtgacaagtaggaaaggttggcgactgtccatcaactgatttaggtattcaagcataagcatacgtcgattgccgttaattccagcattcttaatcatatcaggattgagcttcaatacggtttcagagatacgcccttgtaatgtgaacttgttattccgtatttgaacatgatcactaacttctgatcctgattcgacggcatagcttgtaacgtccgcatttctgctaactttcgtcgattccacgctatcaaatgataatgcctggtagtcattgtaagcagcatttgcaccactgccgagattagaggtaatgatcgcaaagccgttaccccctttggttgttctaccgttgctatcgttgcttgtgctgttgattttcgcctcagtcgggcgaccaatggttaacggacccattgccataatttgtaatccttatttaagggggctaaacagccccacagtgatgattaataggttgacccgcctgacataacacccagcgttaatagcttgctaaactcagcggaggatgcctttgatttgaagtcgataaattcgctcaatcgtccggtgtctgattcgatagttagcggcacttctgcatttacttgtaattctggattgaagttaataacaggtgcaaaggtgtaagaaggagccttgaaagcttgttgtgctgcactctgtttcagatttgcaatgttttgtccttcgagactgtattgatttacagcctgcgccccacctaccgtttcttctggcataaaccagcttttaatagtgttaaccagggaattgctgttatctggcttagttgttccggtgccagcgcctttatattgatcaggagtgagattagaaagattctgcttcattccttcgttagatagtggcggtgcatcccctaaattcttctgaatagcttccgtcttctcgtcgtttttcatcagccagttgattgttttcattacggcgttaaccaatccgccgatagcctcgcctaatttggtaaacattggcagcattgcaaccatgctctttttaaactcttcaatcactttcggatcaagagatttcataaagccatcaacaaaggcgatcccttgtgagtcagaaagcccactaagtgcattattcagttcacggaatttaataacgctttcctgttgtgcctgtgttacccagcgccctgattctcgttgttctcgtgctgattgttccacttctttagcggagcgtgtccagtatttagaggtgagcatcaaatcatcagccagatcttccagacgactaccgatttgtgcatctgaatagcctttcttcaccattccctgaactgctttactaaccagaccagccggattatcagcaaagtcttttagatcctttttagttaagaatccttcattcattaaagtattgatgccgctatcgccgcccttccattcacctttgcctgtttttttatcgactacatattcagcctcatcatagcttttggttgcacgctcacgcacatctttcatctgatcgagatacttacgtttaccttgatcccccatcattgaatcaacgccgtttttgtaggcccattgctcaatattgttcatctggttaacgtctacaccgcccagcttcgcacggctatacaattcacccagcgtttcagcattcgcaaagctgttagtaacaaattcagaggctttgctcatagccatatacgtagcgccagcgcctaagccacccagcataacagccgcagcaccgccgccaatactcccgctacccttaacaggtgcataggctttagcgtgagcgttacgattgccattaatcttacgttgttgctgttgtaggcgtttcatttggctattcatacgtgccagactaatagctcctctttcatattggagggcaatttctctagcctgtgcaatagctttatattgttccgctacagaaaggcggtgcaatgcactaatgcttgatccaacgtctaacagttttaagtctgccttctctttgcgtgctgccagggctttttgttctcttgcaactacacgttgagcggctaattgtgctttagcattggctttatctgcctgtgcttgctttttagcaatatcgtctacgtctttttttgctttagaagttgattgtttatgtgtcttaacacgcaattctatatctttcaccgccgccatttgtttacgaagtttttctacttctgcttttgctttctctaatgatggtcgatcaacctggaaggtgacaacgtttgataagcggctgacgttaagttctaacatgctaattgtttccctgtattatgattgttgtttattattgttttttagagcaatagtattgaattgcttcgaaagtgctgcacccagtctgaaagacacgctggcgcacattatttgcatcaatttctaaaaggcggcaaagcgccgatgtgtttataactgattcctcgctaatagctgccagttcttttacagccttaagaataaaggattgtgggttttctgtattcattggttttctctcacatatatatttttatttgggtttgtagacagtagaaaaacaaaaagggcaaagagattcgttactgtatttgcgcctacaggttagttaatccctttacccttattgccccgatggggaatcgtctattaacgctttattacgcagcagatccgaagatgatagcttgcggaatgttgtttactggcagataagatgtctcagtaaccacagatgggaattggaattcatccttgattagatattggtgatgcaacacggcatcttgacctaactcagcatgacgcacaccaacgccgctatgaagctggtaacactgtgccgctttatccattaccggaacaattgcgaaaccgttctctccgatgtgagcaacaatctcaggaaacattgacacatcaataacagtgatcccaccaatctggaaagagtcataggctgggttagaatcaaccatacgggtaaacagggccgtagcactcgcatcgcctgcatatttcaccatgtcactgatcagcgggttagatgacaaaccatcagcagcagtgccagcagcaaagataattacaccagttcgctttgcagcaagaccagaccccagcttttcactctgtaagcgcaccgctttacgaatagcaaggaacgggttaacagtagtcgatgcaaagtcgatagcgggtaccgtggttttagcctgaccgtcgaggaagtcgagatcaccttgtccggcatattcagattcaactttcaggcccagcagcgcggtaatcagatccacttcaacacggtttgcgtgtgaacggtaatgagcctcagagaaatcattaaccgctaccagcatagcatcagaacggtttggatattggcggctgtattgttccaggtcacgagaagtaacagcgttaatactgccgacgtgtttcatctggaaaagtttgtttgaccattcctgacgtttagaggcgttccagtcgctttgagcgtaaggcgaggtttccccagctacctgcacaaactgatcaatcaggtcggtaagaagaatgctgttttctgtatgatattgcacatcgaacagatcgagattagtaatcagggtattaagtgcattctcataagcaaatggagttactaccgcagtattaacgccaaaatatgttgataaatcattcattattattttccttgttaagtcgtagggatcgcaagttcttcataaccagcaattacaaagccgagagattgcagttttgcaataacacttgccttttccatgctgttaaattcaatcccatcttcagccagaataacgaaagtaggatgtgcaaccactacgctttcctgtccttcataagccggttcaactactacgtgagcaatatcagatgcggttgttgctttggtgccatcggctttcagcaaagccccgacaataagatcgtcagtgagaggtgaagccagtttgacgaggcgatcttgcagcactggatcagcagcgtaagctactaccttacagcgtgaacgggagttatccgcattcactgcttttaattttccatatgggttagccataagattattttcctttcagttgtttaattttagatttaagggcatcagcaagactaaccgcatcagccgatttaaataattgagcagtggtagaacgaagactttcgggagtaactcccaacagtgcggcaaccttaatgaggttttcatcactaacaatcatcgtttccccgtctttgctgataatcatttcttgtttcataaataatgttcctgttagtgccagacaaataaaaagccccaatgccgtaagaggttaattctgaccagcaaaggggctttaacgtgcgggcaattacataattgataagttaaactataagaggattaaacatatcagcaaatacactttttaaatatacttgatgatatgcttaaagggtgaatagatactcctgaaaacatgctcttaggaaaacatgcggaatcaatcaggaatatctattcggggcgcggtggccaaccgctatctttcatggtgtggatgcaccagtcagattttaaggaatcactattccaatctactcacggattaaatttttaataatgattaactacaccaacagtaatctaccgtttcagaaaatcgtttttacaaccaaagcttatagatccgcattctataaaacccgttttgctatcaatatttccaaagtttattgcaccattcttagctaaactctctctgcttgcggctaacgctatgcagatgattgtttttgacaacaacttaatagattattctgttactaacttctgtcattaaataatagtttaatgatgttagtaaatagttataaaatataactatcagtgtaaggctctttaatgttttctgacaaaataaggagctttaggataagcatagatgaaaaataagagcgggaagggcaaggagataacacctacccgcttttatcaaaattaagcacaatgcctaacaacattcatcaacacaacgtagaaacaatcaacaatcaacaatcaacaatcaaagagggagttatgattattctaaaacttcttgagagatggaaggtaatatttgttagaggttaatgccactcaacctttgaggctatcaccttccatatgcagggatttatgacagtagaaggattaacaccaactaaaatctttttatctacccctaaaattattatataacaaaatcattataaatgcaaataattttcattatcatttagagaaaatagcactttttgctaaatcatctactaattgctgaatctcttcacttgcaacctttaacgtggtggcgatgtctgtgatgatttgattacactgttttgcatcgtcctctgatacgctcaccagagagataaaatcgtcaaggcttacattcaccttcattaagctaataacgcattgagagagcgtgtaatcgcataaatctgaataggcttgatttattcttgtttgtagtgagatagtcagatctaaaagttgttccattgcattgctaatatcttcttccattatgcgtattctccttgtaatgcatcattaatcatattcaatacgatgttaaaaggtgtcttgagcgtcagcacttcatcacggtaacgctctaatgcttcgtagtcttctgtttcttttgccagccgaattaactctgcatagttttttgcatcagacaggatcatctgaaataattgtgtttcttgaatatagccaatcattatttttccttttttgaatattttcattgggcgcttatacatacacccatcattttattagttagaacgtttgttagaagctaatgtatcttctaaatgagccatcagatcgacttccgatgcaccacctacacaattattgaaagcgttaaatcccaaaaaatgatgataggagctaaaccctaaaagctgccaacgtttcagagtgccatcagaaatgatagtttgttttcttgttcttgggcgaaagtaaacgcctggcattgattggattatttctaattcttcatcacttaattcaggggattctgtttcaagaataaagattatctcttcccctggaatttcgttattggtgtgtgtcggtggacgttgtctttttgaattgaaattactgtttttttcaatacgttttaagttgttctttttctttcttcccatttttccctctttttatgtggattataaaaactggacgccattgttacgatgaatatcgccataaatgcatttgccatatgtattgcccgatctgttgttattgattgtttgtgagaaacaattcaaaatctttgtttaatttcaaaagacgaaatgtagtgctgttaatcccttcataatccagcacaccgaacgatgtaaaatgatttaaccaatgatttacgtgttgtgcgctgtagccgcctaaactacaaaagctaaccactgtcggtggtgaaaactctatgtccaaaatagcttttaaaatgttgtatccgctttcagttatttcaatagttttgtttcctatagtgatgttataagtcatttattctccttagaagggtagtgaatcatatattgtgctctcacttttgagatcaattatcaaagagtcaaaatcattttcacaaagatagatattctttgaatctaatgctcgttttacaaaatcttctgtttcttcgtgcggtggtttcttcttatcaagggaaagaagccaagtaaaaatttcgggccgctcagggaactctggctcttgtgtttcttcttcaacgatgatttcggaaacattcaatatttcattagattcgtcttctttctcagaaggatcaggtagtgatgactctccagggggagtaatatgtgcatctgtgaatggtaatgctttatagagtgatgtttgcccgtcccgagcctctacagaaagaactcccatatcaacaaacatatttataatattgcgaacctggcgatcactaaccattccaatattagataatgttttttgagtggcgtaacattcttgcccttgttcattgaatccagctatatagctatagatttcaacggctggcagtgtagcggtgtattcattacctgacggtgagaaccactttttaaacatcttcaaccactgctcaacgactacatatttttgtttaccatctttctgatttagacatttggctttcgcttcggcaattgttttgatatttttgatcatttagttcctcctttgtaaggactgtaattagtaattcattaacaagttttggaattgatttcccttctgcctttgcacgatttaacaacgcgttataagttgcagaatcaaaattaatattcatttggttttctccttctcctgttattattctttctctgctcctgccttacgcagttcatcaataatttttagtgcatcgtcaaaacatttttcacgctctggataaccacagcgtcgcgctgtgttcctattcattcttaccctaaagcggttgatctcaccacgtttccaggcttcaactacatcttgagaagtgaaatacttcactaattaacctcctattctatttggttaaaagaaaaagacaccttgcaagcctcttgggcttcaaagtgcggtgcattggtttaattatttagaggataggaatgttttcctgcccctaatattactttaccataactaaaggcttttgtcaaccccgcccataaaatattgatcatttttcagtatgttatgattttgcttagcaattcgtgctcttctgtgtgatgctattcttccttattctctaaaacgcgttctaacgaggttttgataaaaacaatacattcccttatgtaatgacagtttagctcgccagaggtttatttaaggggcttattttgtatttgttaggtatatgaaaaggagatgatagataaactctaatttcagacaccttataaaatacctgtaaagctcctcagaagctctataatgagctaatctattaccgctaaggtttccctgccttatatacgtttagctcgcctacggcttgatttaagcggtagaaacttatttaaccttcaactactaaaaccattctttcttttttgtttgttgttggttgttgtctgtgtctatgtgctaacatcgctaacgcgtagcacacaaggttattgcactcgtcagagtattgcacaatagattttctcttaaatagattgatgatcgttagattggcgtaagcctcatcaatggaactattgaagcgcacagcgcaagactatttagccttacgcaagccgtaggctatttgcacatagtagattacatattcgttgtgagcggcattagcgaacatagatctactaactaacatcaacaaacaaaaactatgtgttatgacaagcagtctaacgactaacactctaacttgtgcaaggttctggcgaatgccaatagattaagggatagtcgttagactccctaacgggtatccctataattattcttataaagataaaaaagaattatattatata

SEQ ID NO: 627 - DNA, 15261 bp, Escherichia coli
gccgcaattccacatattccagaatggcggcaaccattaattgctttgttattacccgaaaaaccagaaattgcacatgaaattgcccagcgtctactggggcaaaaaaaattaccctcgcttgagtggttaaaaatagtggcgactgatgagcacattcttgcctcattagaaaaatatcacgagccatatgccatttttgatgattactattgtggtgcgatatggtcagccaccgtattacaggagcaaggtgttgcagccctgccccgatttgctccctatgccgcaagtgactactgcgccgatgtgttgcgtcatatcaatcatccgttcgcattaacactgcttatacgtgtagccgggcatactaaacgctgtcacgatcggatgacgaaagccattgctgcgttcccacatgcagcaatggcggcactgacggaacttcttgggcaaaaagaagagaacagttggcgcattatgctaatgacaatgcttatctcacaaccagcactggcagaacaggtcattccctggctctcgacacccgcagttgccgtactgaaatcatgccagcaacaactgacacagccctcaaaccatgccagcgccgatctactgccagccgtagtagtctcccctccctggctttcgaaaaagaaaaaatcgccgattccggtgctggatttagcgccattaggcattgagccaatctgttatctgacagaagaaatcagtaatcaacttttggcgaaatatatctggtattcaaaacacatcacggttagccatgaagaaagtactaccaacctgttggcaaggatgggttttcaacgacggatcgctggtacatatattaaagctcccgaagcggtagttgaggcatggctaaatgaagattattcaaccttactaagtgaatttaaggtgtttcattcacctaccgggcattattggcagttggggattttgacaacattgccgctggagaaagcagtaaaagcatggaatgcccttaccctatctccacataccgataccgaatacgccatgttacattttggactcaaagggttacctgggttagtaaactcacttgcacgctatccacaagaagccttgcccatcacgaattacttcgcagcgagtgagctggctcctgccgtcgcccgtgccttcaacaaactgaaaacgctacgcgaaaacgcccgtagctggctgttgaaatacccggaacatgcccttaccggcctgctgcctgcggcgctcggcaaagccggtgaagcacaggataacgcccgcgctgccttgcgtatgcttaccgaaaacggtcatcagccattactgcaagaaatcgcccgacgttataaccagccggaagtaaccgatgcggtgaacgctctgcttgcgctcgatcccttagataatcacccgacaaaaatccccactcttccggccttttatcagccatcgctctggacgcgcccggtattaaaagcaaatgcccaatcactgccagatagcgccctcctccacctcggtgaaatgctccgcttccctcaggaagaggctctgtatccgggattattgcaggtgaaagacgtctgttccgccgactcactggcgggatttgcctgggatctgtttaccgcctggcagaccgctggcgcgccgtcgaaagagagttgggcgttcactgcgttaggcgttctcggtaacgatgacaccgcccgcaaactgacgccattaatacgcgcctggcctggtgaatcccagcataaacgcgccaccgttgggttggatattctcgctgctatcggtagtgatatcgcccttatgcagcttaacggcatcgcccagaaactgaaattcaaagcattacaggagcgggcaaaagaaaaaattgccgacattgccgagagccgcgaactcacggtggcggagcttgaagatcggttagcaccggatctcggtctggatgataacggttcgctgctgctggattttggcccacggcagttcaccgtcagctttgatgaaaccttaaaaccgtttgtgcgtgatgtttccggcagccgcctgaaagacctgcccaaaccgaacaaaagcgatgatgaaacgcgggcgaacgatgcggttaaccgctacaaattgctgaaaaaagatgcgcgtaccatcgccgcccagcaggtagcaaggctggaatccgccatgtgcctgcgccgccgctggtcgctggaaaacttccagctcttcctggttgagcatccgctggttcgtcacttaacccgccgtctgatttggggcgtttatagcgccgaaaaccagctactggcttgctttcgcgtagcagaagataacagctacagcaccgctgacgatgatcttttcaccctgccggaaggcgatatctctatcggcactcctcacgttctggaaatatcaccaacggatgctgccgcctttggtcagctttttgccgactacaaactgctaccaccgttccgccagctcgaccgtaacagctacgccctgacagaagccgagcgcaatgccagtgaactgacccgctgggcaggcagaaaatgcccgagcggtcgggtcatgggactggcgaataaaggttgggtgcgtggtgaaccgcaggatggtggctggatcggctggatgatcaaacctctgggccgctggtcgttaatcatggaaatcgatgaaggctttgcagttggtatgtcgccagccgaacttagcgccgagcaactcttaagcaagctgtggctatgggaaggcaaagcagaaagctatggctgggggagtaattcaacacaggaagcgcagttctccgtactcgatgccatcaccgccagcgagctgattaacgatattgaagccctgtttgaataaggaaagagcatggacaaggaattaccgtggctggcggataacgcccaactggaactgaaatataaaaaaggcaaaacaccactcagccatcgcaattggccgggcgaaccagtgcctgttatcactgaaagcatcattcagacactgggtgatgaattgctacaaaaagctgagaagaaaaaaaacattgtctggcgttatgagaatttttcactggagtggcagtccgccattacgcaggccatcaacttgatcggcgaacacaaaccctcaatcccggcccggacaatggcggcgctagtctgtatcgcgcaaaatgacagccaacagttgctcgacgaaatcgtccaacaagagggactggaatatgcgactgaggtggtgattgcacgccagtttattacacgatgttatgagagtgatcctctgctagtgacattgcagtatcaggacgaggattatggctatggttatcgctcagaaacctataacgaattcgatctccgactgcgtaagcatctctctctggcagaggaaagctgctggcagcgttgcgccgacaaactcattgtcgcactaccaggaataaccaaagttcgccgcccttttattgcgctgatcctcccggaaaaaccagaaatagccaatgagttggtaggccttgaatgcccgcgaactcattttcattctaaggagtggttaaaagttgttgctaatgaccccacagcggtgagaaaactcgagcactactggagccaggatatatttagcgatcgagaagccagctacatgtcgcatgaaaaccacttcggctacgcggcctgcgccgcccttttgcgcgaacaaggactggcagccattccgcgcctcgcgatgtatgcccataaagaagattgcggcagtctgctggtacaaattaaccatccgcaagtcatccgcaccttgctactggtggctgataaaaacaaacccagcctgcaacgtgtagctaaataccataaaaacttcccccatgcgacgctcgccgcactggcagaactgctggcgttaacagaaccaccagcccgcccaggttatccaatcatcgaagacaaaaagctgcctgcacagcaaaaagcacgcgatgaatactggcgtacgctgttacaaacgctgatggcatcgcagccacaactggcagaagagatgatgcagtggttaagtactcaagccagggcagtgctgaatagttatttatcggcaccgcccaaaccggttattgatagtaccgataacagcaatctgcctgaaatcctcgtttcaccaccgtggcgtagtaagaaaaaaatgacagctccacgtcttgatttggcaccgctcgaattaacgccgcaagtttactggcaacctggcgaacgagagaggcttgccgccactgagcctgcccgttatttcagcacggaatctcttgcggaacgcatggaacaaaaaagtgggcgagttgtattacaggaactgggttttggggatgatgtatggctgtttttgaattatatactccccggaaaactggatgctgcacgcaattcactcattgttcagtggcattactaccaggggcgggttgaagagatcctgaatggctggaactccccggaagcacaattagcagaacaggcgctccgcagcggtcacatagaagcgttaattaacatatgggaaaatgacaactactcacgttatcgtccggaaaagagtgtctggaacctgtatttattggcacagttgccgcgtgagatggctttgaccttctggctgcgtatcaatgagaaaaaacatctgttcgcgggtgaggactattttctcagtatcctcgggttggatgcgctaccaggtctgatgttggctttttcacatcgtccaaaagaaacatttccgttaattttaaatttcggcgcaacagaactggccctgcccattgcccgcgtctggcaccgttttgcgggccagcgtaatctggctcgccagtggattttacaatggccggaacatacggctactgcacttatccctcttatcttcaccaaatctagcgataaaagcgaagctgcattacttgccctgcgtttactttacgaacatgggcatggcgaattgctacaaactgtagccaatcgttggcagcgtacagatctatggcctgccctggaacaattacttaaacagagtccaatagagatttacccggcacgcattccaaaagcccctgatttctggcatccgcaaatgtggtccaggccgcgccttatcactaataatcaacctgttaccgatgacgctctggaaattatcggcgaaatgctgcgctttacccaggggggacgtttttatagcgggctggaacaactgaaaacgttctgccagccacaaacgctggcagcttttgcctgggatctcttcactgcgtggcaacaagctggtgcccccgtaaaagacaactgggcatttctggcgttaagtctctttggtgacgaaagcacggcacgggatctaacgacacagatcctcggctggccacaagaaggcaaatctgcccgtgctgtcagtggcctgaacatccttaccctgatgaataatgatatggcgctgatacagctgcatcatatatcgcaacgggcgaaatcccgccccttacgtgataacgcggcggaatttcttcaggtggtcgcagaaaatcgcgggctaagccaggaagagctagcggacagattagtcccaaccctgggccttgatgatccgcaggcgttgagttttgattttggtccccggcagtttaccgttcgcttcgatgaaaacctcaacccggttatctttgatcagcaaaacgttcgccagaaaagcgttccccggttgcgcgccgatgacgatcaactgaaagcgcccgaggcactggcccgactaaaagggctaaaaaaagatgccactcaggtgagcaaaaacctgctcccgcgtcttgaaacggccctacgtaccacccgacgctggtcgctggcagattttcattctctgtttgttaatcatccctttacccgtctggttacccagcgattaatatggggggcttatccggcaaatgaaccgcgttgtttactcaacgcctttcgtgtggccgcagagggggagttctgcaatgcgcaagatgagccaattgacctgcctgcggacgctctgattggcattgcccacccgttagaaatgacagtagaaatgcgcagtgaatttgcacagctttttgccgattacgaaattatgccgccttttcgccagttggcgcggtgcacggtgctgctcacacctgatgagtcaaccagtaacagcctgactcgctgggaaggtaaatccgctaccgttgggcagcttatgggaatgcgatacaaaggctgggagtcaggctatgaggatgcatttgtctatgacctgggcgagtaccggctggtccttaagttttcacccggttttaaccactacaatgttgatagcaaagcgctaatgagcttccgttctcttcgagtgtaccgtgacaataaatccgtcacttttgccgaacttgatgtgtttgatttgagtgaggcgctaagcgcacctgacgtcattttccattaaaacacagcgggcagtgatgcgactgcccgttatctacacgacttaccagcggggaaagcgatgatcgtgcaaaaagagctagttgctatttacgattatgaggtccctgtacctgaagatccgttttccttcagacttgagatccataaatgctctgaattatttacaggttccgtctatcgactggagcgattccggctacatccaatatttcatcaacgtgatcgagaagatgctgacccgctaataaatgatgcgttgatttatataagagatgagtgtattgatgagcggaaattacgaggtgaatcacctgaaactgtaatagcaatttttaatcgtgaactacagaatatattcaaccaagaaatagaataatatactctagataattaaagtcgcagcacatgcaacttgaagtatgacgagtatagctttcttaaagggggaaacggtattcccccttagatgcgtttcaatttgcccgttacttcaacaaatcaatcaaccgtaacagagccactaataactccagtacggcaatgagcacggttaacttttgtgtcagcgtgtccatccgctctccttattaaggagcgcaacaccagcaccttacccttacactgcctgttgatactggtttacgtatgttggtacgaaacgttgctctccggatcagggcaccgcctgcggcaccacccgtccggcagccaggacttaaaattggtccgatccggcacaacctcccaacgggcaggattataaatctcactcactgaattgcaatggagtgtggatatggttataatttattcgttggtacgaaatgttgcacaatcagcaagttagcgtcactgtagtaaataaaagaacctgcctcaccagcaggtttttttattttctgcgatctactttccagatattttttgccaatagcccaacataaatattcacatcccggtcaaatggtgcgttgaatataaaatcgatgaatttataaataaaaatgagttatatgatgaattaataaaaacagtaatcattttattaaagggggaagcggttttcccccttagatgcgtttcaatttgcccgttacttcaacaaatcaatcaaccgtaacagagccactaatagctccagtacagcaatgagcacggttaacttttgtgtcagcgagtccatccgctctccttattaaggagcgcaacaccagcaccttacccttacactgcctgtcgatactggtttacgtatgttggaccacgatgttgcactccggatcagggcaccacctgcagcaccccccgtccggtagccaggacttgaaataggttcgatccggcgcaacgtcccaacggtctggattataaatctcattatcttaattgcaacggggtccagccgtggttataattcgttcgttggaacacgatgttgcacaggctgtggtgttaggcctgaaaatagtaaataaaagaacctgcctcaccagcaggtttttttatttactgcgatctgctttccagatattttttgctcaaacaactaatgcgccaaacatttattgcgcgtaaaatatcgtttatttcattaatacatttcagggatgaatatatgtcaccgcagaataatcatctgcagcgtccgcctgctgctgtgttatacgccgatgaactggcaaaattaaaacaaaatgataacgctccttgcccgcccggttggcagttaagtttgcctgcggcccgtgcttttatccttggcgatagcgcgcaaaatattagccgtaaagtggtgattagtccctccgctgtcgaacgtatgttagtcactcttgccaccggacgcggtttgatgttggtgggggaacctggcaccgcaaaatctctcctgtctgaattactggcaaccgctattagcggcgatgccgggttaaccatccagggcggcgcatctaccactgaagatcaaatcaagtacggctggaactacgctctgcttatcaatcatggcccatcaacggaagcgctggtccctgccccgctttaccagggaatgcgcgacggcaaaatcgtccgttttgaagagataacgcgtacaccgctggaagtgcaagactgtctgttaggtatgctttctgacagggtgatgacggtgccggaactcactggtgaagccagtcagctctatgcgcgagaaggctttaatattattgccactgccaatacccgagatcgcggcgtcaatgaaatgagtgctgcgctaaagcgtcgcttcgattttgaaactgtctttccgattatggatttcgcccaggagctggagcttgtcgccagtgcttcggcgcgtttgctggcccatagcggtattccgcataaagtgcctgacgcggtactggagttactggtccgcaccttccgcgatctgcgtgccaacggcgaaaagaaaacgtcaatggatacactaacagcgattatgtccaccgctgaagccgtgaacgtggcccacgccgtaggcgtccgcgcctggtttttagcgaatcgcgcaggtgagccagccgacctggtggactgcattgccggaaccatcgtcaaagataacgaagaagatcgcgctcgtctgcgccgttacttcgaacaacgagtcgccacacataaagaagctcactggcaggcttattatcaagcccgccaccgcctgccgtgaggaaagatgcatgagcgagccgttaattgtcggcatccggcatcatagtccggcctgcgcccggctggtgaaatcgttaatcgaaagccagcggccacgatacgtattgattgaaggcccggctgattttaatgaccgggtagacgaactgtttttagcccaccagcttccggtagctatttacagttattgccagtatcaggacggtgcagcccccgggcgtggtgcctggacgccatttgctgaattttcgccggagtggcaggcgctacaagccgcacgtcgtattcaggcacaaacttacttcatcgatttgccttgctgggcgcagagtgaagaagtggacgattcgcctgatacgcaagaggaaagccaggccttgctgctgcgtgccacccgcatggataacagcgacaccctgtgggatcacttgttcgaagatgaaagccagcaaactgcattaccctctgcactggcgcactattttgcccaactgcggggcgactcccccggagatgctctcaatcgtctgcgcgaagcctttatggcccgctggattggatgggcgatgcagcaaaataatggcgacgtgttagttgtctgcggtggctggcacgctccggtactggcaaaaatgtggcgcgaatgcccgcaggaaattaacacgccagaattgccgtcgctggcagatgccgttacaggttgttatctcaccccctacagtgaaaagcgccttgatgtgctggcaggatacctttccggaatgcctgccccggtctggcaaaactggtgctggcagtggggcttacagcaggcgggagaacaactgctaaaaacggttctcacccgtttgcgccagcacaagttgcctgcttcgaccgcggatatggctgccgctcatctgcatgcgatggcactggcacagttgcgcggtcatacactaccgttacgcactgactggctggatgccatagcaggatcgctgattaaagaagccctgaatgcgccgttgccgtggagctatcgcggcgttattcatcccgacaccgatccgattctgctaacgttgatagacacattagcgggtgacggattcggtaaacttgccccttctacgccacaacctcctctgccaaaagatgtcacctgcgaactggaacgtaccgcaatctcccttccggcggagcttaccttaaatcgctttaaccccaatggactagcgcaaagtcaggtgttacatcggctggcaatactggagatcccagggattgtgcgccagcagggaagcacactgacacttgcaggcaacggtgaagaacgctggaaattaacccgcccgcttagccagcatgcggcattgattgaggccgcctgctttggtgcaacactccaggaagccgcacgccataaattagaagccgatatgctggacgcgggtggaatcggcagtatcaccacatgtcttagccaggcggcgttagcgggtctggcgtccttcagtcaacaattactggagcaactcacattattaatcgcccaggaaaatcaatttgccgaaatgggccaggcgctggaagtgctatatgccttatggcggctggatgaaattagcggtatgcaaggcgcgcagatattacaaacgacgttatgcgcggctatcgatcgcacgctgtggctatgtgaatctaacggcagaccagatgaaaaggagtttcacgctcacctgcatagctggcaagcgttgtgtcatatcctgcgcgatctacatagcggtgtgcaactccccggcatttctctttctgcggcggtagccttactggagcgacgcagtcaggcaattcatgccccggcgctggatcgcggcgcggctcatggcgcactgatgcgtctggaacatcctaacgccagtgccgaagcggcgctgacgatgctggcgcagttatccccggcacaatccggcgaagcgctgcacggtttgctggcgctggcccgccatcaactggcctgtcagccgacatttatcgccggtttcagcagtcatttaaatcaactaagtgatgccgattttatcaatgccctgcccgatttacgcgcggcgatggcctggctaccgccacgagaacgcggaacgctggcgcatcaggtgcttgagcattatcaactggcgcaacttcccgtttcggcactgcaaatgccgttgcattgtccaccgcaagccattgcacatcatcaacaactcgaacagcaggcactggcatcgctgcaacactggggagttttccatgtctgaactgaacgatcttctgaccacccgtgagctacaacgctggcgattaattcttggcgaagcggcagaaacgacgctttgtgggctggatgacaacgcccggcagatagatcacgcgctggagtggctgtatgggcgcgatcctgaacggctccagcgtggtgaacgctctggtggattaggtggctcaaatctcaccactcctgagtggatcaacagtatccacacgctgtttccgcaacaggtgattgagcggctggaaagcgatgccgtactgcgctacggcattgaagatgtggtgacaaatctcgacgtgctggaacgtatgcagccttcggaaagcctgctacgcgccgttttgcacaccaaacatctgatgaatcccgaagtactggctgccgcccgccagatagtgcgccaggttgttgaagaaattatggcgcgactggcaaaggaagttcgtcaggctttttctggtgtccgcgatcgccgtcgccgttcatttattccactggcgcgaaactttgatttcaaaagtactctgcgcgccaacctgcaacactggcacccgcaacacggcaagttgtatatcgaatccccccgctttaacagccgcattaaacgccaaagcgaacaatggcaactggtcttactggttgatcaaagcggatcgatggtcgattcggtgatccactctgcggtgatggcggcctgtttgtggcagttacccggcattcgtacccatctggtggcgtttgacacaagcgtcgttgatctcacggcagacgttgccgatccggtagagttattaatgaaagtacagttgggcggcgggaccaatatcgccagtgccgtggagtatggtcggcaacttattgaacaaccagcgaaaagcgtcattatcctcgtgagcgatttttacgaagggggttcatcatcattactgacgcatcaggtgaaaaagtgtgtccagagctgcatcaaagtgctgggactggcagcgctcgatagcacagcaacaccttgctatgaccacgatacggcccaggcgctggtaaatgtcggcgcacaaatagccgccatgacaccgggcgagctggcatcatggcttgcggagaatcttcagtcatgaattcactacgtccggaattattagaactgacaccgcaggccctgacggcgttaagcaatgccggttttgttaagcgcagtcttaaggaactggaaaatggcaacgtcccggaaatcagccatgagaacagcgctttaatcgccaccttcagtgacggtgtccgtacccagctggcgaacagccaggcactgaaagaggctcagtgcagctgcggggccagcggtatgtgccgtcatcgcgtgatgcttgtgttaagttatcaacgactttgtactaccgcccagcctacggaaaaagaagaagcgtgggatccggcaatctggctggaagaactggctaccctgcccgatgccacccgcaaacgcgcacaggcgttggtcgctaaaggcatcaccattgagttgttctgtacgccgggcgaaattccctctgcccgcttaccgatgagcgatgtgcgtttttattcccgcagcagtattcgtttcgcccgttgtgattgtattgaaggcacactttgcgaacatgtcgtactggctgtgcaggccttcgtcgaggccaaaactcagcaagcggaatttactcatttaatctggcagatgcgcagcgaacacgtcacatcatctgacgatccgtttgccaacgacgagggtaacgcgtgtcgtcaatatgttcagcaattaagccaggcattatggctgggcggcatcagccagccgcttattcactacgaggccgctttcagtcgcgcgcagcaggcggcggaacgctgcaactggcgctgggtgagtgaatcactacgacagctacgggcaagcgttgatgccttccacactcgcgccagccactatcatgccggagaatgcttacgtcagcttgcggcattaaacagtcgattaaattgcgcacaagagatggcccggcgcgacagtgttggtgaagttcctcctgtgccgtggcgcacggtcgttggctctggcattgccggagaagcaaagcttgatcatctgcggctggtgtctttaggtatgcgttgctggcaggatattgagcattatggtttacgcatctggtttaccgatcccgacaccggcagtattttgcacctttcgcgcagttggccgcgaagtgaacaggaaaactcaccggcagctacgcgtcggctgtttagttttcaggctggcgcactggcgggtgggcaaattgtttcacaagcagcaaaacgcagtgccgatggcgagctgctgttagctacccgcaaccgcttaagcagcgttgtgccgctgtcgcctgatgcctggcaaatgttgagcgcgccgttacgccagccgggcattgtggctttgcgggaatatttacgccagcgtccccccgcctgcatacggcctcttaatcaggtcgataacttatttattctgccggtcgctgagtgtatttcgctcggttgggatagcagccgccagacgctggatgcgcaggtaatcagcggcgaaggtgaagataatctcctgacgttatcccttccggcatctgcctgttctccttttgccgttgaacgcatggcggcgcttttgcaacaaacagacgaccccgtgagtctggtttctggctttgtcagttttgttgatgggcaattgacactggaaccacgggtgatgatgacaaaaacccgcgcctgggcgctggacgcggaaactgcgcctgtggcaccgctaccttctgccagcgttttgcctgtgccgtctaccgctcatcagttgctgatgcgctgccaggcgttacttattcaactgctccataacggctggcgctatcaggaacagagcgctattagtcaggcagagttgctggcgaatgacctctccgcggtcggtttttatcggctggcacatgtgttgggacaatttcgtaatacagaaagcgaggcacgggtagaagcaatgaataacggtgttttactttgcgaacaattattccccatgcttcagcaacaaggatgaaatagtgctttttactaagagttctactccagttccggactgctcacgtcacggtattaggcatattctatatagcccctggtgagagtcaccagtttcttgattaaataaaatggagttttacatgaaggctttcaataagctgttttccctcgttgttgcatctgttctggttttctctcttgctggctgcggtgacaaagaagaatcgaagaaattcagcgccaatctgaacggcactgaaattgccattacctatgtctacaaaggtgacaaggtgcttaagcaatcttctgaaaccaaaattcaatttgcttctattggtgcaaccaccaaagaagacgctgccaagacacttgagccgttaagcgccaaatacaaaaacatcgcgggtgttgaagaaaaattaacctatacagatacctacgcgcaggaaaacgtgactatcgatatggaaaaagtggattttaaagccctgcagggtatttcaggaatcaacgtttctgctgaagatgccaaaaaaggtatcactatggcgcaaatggaactggtgatgaaagccgctggttttaaagaagtgaaataatctgtcg

SEQ ID NO: 628 - DNA, 4106 bp, Escherichia coli
cacacaatatggattttttatcgattccagccgctgtactggctgtaaaacctgcgaactggcgtgcaaagattttaaagttggttacgtatcgtttaaaatcaattagatagcccgtcatttctgcgctcacacgtcccaacattgaaaacatgcaaagctttgtaagccgatgcaaagctttgtgtgtctcacttttgtcccaataccaatccgaatccaccctttgtcatcattgagaaatggcaaggaagaaaaggatgttactgcacgatttgacaaatccgccagagctatcgcatactgaccgcactacaacgtcagcggtcaaccgcacccgatagctttgcggctttttttatgcctgtttacaggtatcgccatatcaatggcgggtcgagagagcctaatacaataccctttcgggaaatacgctccgccgtctgacgcggtagttgaagcccgccccccccactaaggtggcagtcaatactaaaacgtcaggagtcataattatgactaatcaactcattcccgttttcgatggaaccatcaacaacgaaccagttttactttgcaatgctcgcaatctgcacgcttttcttggtattggtaaaatgtttgctcactggatcaaggacaggctgggtgaatatggattcgttgaaaatcaagattttgtgattgcttgccaaaattggcaagcaaaaggtagaggcggtcacaaccgcaaggaataccacctcaccctcgacacagccaaagagcttgcgatggttgaacgtaacgaaaaaggccgccagatacgccgctacttcatcgagtgcgaaaagaaacttcgcaacattcagccagtacaaactgagcagcaattcacaaccgaggaaatcatcctcctctgctacatgcaactctggatggaaaaagcacaacaactcagtaagcagctataccccgtcatgagagaactgaattctgattactacgggaaactgtttgatctggcctacgagactcgtcatataaccaaccggactcgcgacacattgctccgcgaagcagcaaaacttgatcccgccaactatatggtgcatagggccagaagtatgctggcgcaactaagagcaagacaatttgaattctgaaaccaaaggagcttcggctccttttttcatgcctgaaggaaaggaaaatggcagatatcatcgacaatgccgctgaaatcgaagaattgcagcgcaatctctccctgcaaaaatacaaatccgatagtaatgccccatctgctactcattgttgcgagtgtggcgatccgatagatgagcggcgacgcctggctgttcgtggatgccgagcttgcgccagttgccagcaggatattgaacttatcaacaaacagagaggtgtgaagtgaacatcaacaccacgataacgatcgatacagccctgaacaccggcctggcgctccttggttatttctacatcatgttctgcagcggacgatggctgtcactgttgttcatgaaaaaatggaataaacgccgtaagcaggagcaacgccagaaggcaatggatgcatttttcgaagccttcgggattgacagcatggaaccaggggatccagctcgcgcaatcagcagagggggcgtagtaatccttgtatatcggagtgaagagaaaaatgacgatcacaaaacaacgtgtagaaaaaatcatatatcgccatgaaatgggactgaacagcgatgtcactgccgaagaggtttatgacctggctgtactggcgctgaatttatcaaatatcgcaaacctgaagcgatacgagcttgatatggattgttgtgactcgttcggtcaggattgtggcgctgacatgactgaagattctgatggcgattatgttctgtttgatgacgtggttaagttgtttgagtttgatacaaccactcaaaagttagaaatcccggcaaaggaggctgccagtgagcaagattgactatcaggcactgcgcgaggcggcggaacaggcaacgcaagatgaatgggtagcatatattttgccgggtcataacggcatttatcctgcgcgcacgtctgagggtaggcattgcggatactttattgactggcctggcatctgtcaggggcgggagagcatcaacatgagcatcagaacctacgcagtgaattgcaatgacgcatggctaaacaccgaaggtgatgacatctccggctcatacgttaagtacaaagaccatcaggaagtggttgccgctcttgaggccaagtgcgcggcgctggcagcggagaatgcgggaataaagtctgcaattccagaatcacgggatattgaggatgacaatgacaatatggatgacgtatctctcgcggaagacttcgggttcaatcatgcaatagaacggatgaggagacagatacctgaaacgccaaccactgatgctttcctggctgaagtccgggcgcagggggtggatgctgctatagaagctgcaaaaaatctggtggcccaagaatatgagtataaggatttcaaagcggcgcagagtgattgctgtatgcaccctggttcagacctggtagggaaggttgaaatgactgagtggttagttgactttgctgcccagcttcgcaaaggaggcaaccagtgagcgaaattaattaccaggcactgcgtgaggtggcggaacgtgcaattccagcaatggaacgcctgttaatgttgccagctgatgatgacttgttaagtgaacaggaacttaaagattacggtgtggatattgatgcgctcaacgccttcaaatttctgaccggaccagaaaccgtgctggcactgctggatgaacgggaaagaaacctgcaatacatcaaaagcagcgatcaggagaacgaggagattgcgttaacggtagggaagctgcgcgttgagcttgaagcagcaaaatcaaaactcaacgaacagcgtgagtattacgagggcgttatctcggatggaagtaagcgcatagcagagttagaaagtgattctcaggcacaaaagttagttgaagcaatcattgttgcgatagaaaacgaacaggaacgtctttttgatgaagattacctaatggattcgaaagaatgcattgacgtaattcgtgaagaagtaaagcgatggaatgattcccgcgccgctggcattcgcatcaaaggagagtgagatgaccacatcgcattctgcaattacccagaaaaaagccttccacatactcgaacgattagaggcgcttgctacggaggaggagatatccccggagaaactggttgagttcagccgtgtgatattgcgtcgcaagaacgatatggagcggctgacatctggcgctccatccttatcagtcaggcgaacactttgttgcagcttctgcaacaaatcccagtacgccgtcaaaaagttaattgctggggacgccgttttcatctgcgacgagtgtgtggatgtgtgcaacagaattatccggggagagaaagagggatcagcatgaaattttccaaattttctgagttggtgaatcgtattttgtccaacaaccacagccatcgtcgcgatatggatgtaacgatcgttgttcattcgcctggtcgcatcggttcaacaccatcagttgaggttcagtcaattcaggcgggttttgattgggatgccgggaaggtgatgatttttccagcacagccactgaccacgctaacaccggagcaggttgctgatatcactgatagtgtgcgcaaaggtcagtcttggcacgcgtatcaggaatacaagaagcataaagagcagttggaaaaattgtcgatggagttggaagccgctaaacagcgggaaaaagatctgtttatggaaaatgttcgacttaagtcaggtatagccggtctgatacacctcggtattcgatatgcagatgttgaggtcatgaaaattgctggagatgcccagctttctaccccatgcactgacagcatcataaacagcattgcaacaggcattcgcatcaaaggagagtgatatggcgttaacacaccacgaactctgtcagattgcgtacaagttc

SEQ ID NO: 629 - DNA, 15744 bp, Escherichia coli
gggaaaaaattttggggggccctttcagtactgctcttctgatgagmaygksggtatgtgatggtggcccttgctggatttgaaccagcgacctggcgattatgagtcgctcgctctcaccactgagctaaagggccgagccaaaaaataataatcagatgaaaatcaataatcaagcccttgcctggatacatatctgtctggcgggaagccataatagcggtgaaatacagaaataaagtaggacctgcttgaataaccgcatttttctgctatagcctgtccatatccatgccgggaacataacatatttacagcaacacgcatccgctcttccagcaacaagcgactgaacatgcccccttcatttttcagttttgtctttaacaaactctcactcatatgcaactgtagagcaatcgcaccaagcgtccagcttgctgatatatctgtctgaattatcgccctgactttggcacttatgctggataaacatccacttaaaaacaatgacatccgttcatctgtttcaaacagagacaggcaggccatcataagaaacatatccgtggcctctccggaaaatccctggctggtaattaaagccgcagccaacgcaggattgttgggttccagcaacaggtaaagcggaatgtcagtcagacgagtcctcgtcagcttatgctgactttccagatattgacttacgacggattcgcttatatcgacaattttaactttgccataatgcataaggaaaagctccctgatgcatttggtggccagaacaactgagcctggcttaagtgacaacgtatccttttcaagaaaaatattaattggggagcaaaccatgataactgaacagacaacagccattataattttactttcattagcaattggttagctcaattatagccccaaaaggtaaattatcatcaacacataagcaaaggactgacaggtgtcgcccccccaccagccgcccattcaccacaaataaaaagccttcaggactgaaggcgtctgtaacaaccgcactgatagtctgccagacccgccataacaagctgggtcagtattaactggcagcgttcgcgtgaaaggtaagtattctgcgcaatctccccgactgtcgccggttcggtaacgcttaattcatcaaacacaactctggcggtttctgtcatatcctgctgtttcagcatgtctttttaccctttccggttaacgtgacataccaataactcttgtctaaaaagccagcaagataaaaagccagtattcacgaccaccagcgtgtttactgtactgcaccaagtttacaggtacaaaaaacccgctcagtggcgggtttaagttgtgtggcgaagtaaccactcttaacacaatacaatactttttgcgtacgcgttagtgttttgatagaattttcagccacataaaaattcattcttataattcgggatatataatggatataacttgtttagaatgtggcaatgttcttgacgacccaactgtagcttgcgataaatgcggtgccacgcctcatgttgtagtgctgggcaaacaatcgtactttcctattggtgctgtaacagcaaatcttgaaaaaaatgattcaagagcatttgattatcgattaggtgaagtttgggatctaaaaaatgaagtcacatctgaattcataaccagaattgagaaaaaatttagccgaaaaaacaaatttcataacttcctagactcagatcacaacccttcatccattcctacgatcctaaaaaaatacattaataaaataatgaattcattgatttatctagagctataatagagaagcttaaacataatgctaataacgaatcgagagttgcccaacttcagggggggagcgttgttttcatccactataagtctaccgaaccagaggatttggggaaacttctaatcgtaatggttgataaacaaagcgcctatgactttgattcggataagttgaccccaacaagattaaatccaattaataccgatgccttacggcaggctgcgatgttcgatttaactttattcgaagccagttatccagaaaacaagggtgactcatatgtacatttcttgcaaggtaaatctaaaagcgattttttcaaagactcattaggttgccgacatgattcggacaataaaagaagcattcagcaattattcagtgctatagatatttttgctagtaaaaactcactcggtcgtgtactgcgtgatactattgacaatgaagttaaatccttactggaaaaaaatcaaaagataaacacggaaataagtccgttaagatagaggatatttcaaaaataattgactcatgcctgactgattcacacaaatgtaagggaacgtttgtcgattttgttaatcttaatggtttccagattgaccctcaatttgaaccaactcctaaagcagctgaaagcgcgcttacaattgaagtggcagataacgacaataattttaagttgaaaataatgcgtggagctattggagacgaaaagtcaaataagcctgtaattctcactgacaacaaatgcgaaattgtgataaaattgagtcaggcaaattatgatgaactcaaaagatatagagacagctaataatgacaattgctgatgacttatcaagattagcgcagattattaacggagcctcaagcagagttgagggctactacactgtcataagtcttgaagaaagcattgttattgtaaatagttctgaaataattagactgttacaatctataggttataaaaaggcaacaacctgcatcgaaaataatgaaatttggctagatcgccaagcttcatcttgggatgacgctataatttatgagaatgttgagtctttttggtctagagtaaacacccaaaacgctcttccgaaaaattatatcatcggaacgccgttaatactccctacttctaagaatgaaagcatcgaaaaaatccatattttctttatgtggaaagatatcctttcattaattgctgatcatcataacagtgactgctctgtcttatttttcaccaatgaagacaaaagttatacagtcgaactcacgcattttttacaatatagcgagattaatcgcttatcgaactcgtctcttaaatatgaaattataaaggagcttctcgacacaataaaaatcaatgatttacacaaaagcgagcgcaagctcgttatacgctcagccataaacgaagtatttaaagcaaatggtacgttcaatttctttgacttgcttaactctactgaactcgtcaggaaaaaatatgatgaactatatgagatttacacaaagaggttttctgtaaataaaattcttaacgaactcgatgagaaaaatcttgagttcacgagtaaaattaacgaattcatatcatctaatcagacaaaagcattgactattcccggtgcattaatagctgctggtggcttagtgaaggctaatgaaacaaccgaagcaatattgattatcgcaggactttggatgataaaaaaagtcaattacatttctattgagatattcaatgaaacattcgacaacttacgttctcgagtggagtccgctttcgataagtatttaaagtttgaagaaaataaagaaatcaaagataatgcagatagtattaagagtagcattacaggtttgattgataaagctaaaaaaaggatgagaactgttaaatatctcgcatcagccatgttttatggaggccttatttacgttggatataaacagttcccagtcttttttgaaaaatcggcagtaaatctattttattttttatgccatactataagctaacattgctaaacagccgtcaacaaaccccattgcagtttgcagttccttcctaattgtgccatcagagcattttctcttcttcgcaatagtacgtaatgagataccgataacaaagtgggcgatgatgagctcatattcctctggtttataccttctcaaccgagccacacaactgtctatcatgatgccttcgtcatcatcacactgaatccgtgactttttgccatgaggtaaaagtcccttgaaaccagccgctatcggctgccagtccactccgctattgtctgaagcagcccaagctccccaacgatccattacttcatacatatcacgcatcaactttctccacaaaatcaggccagcacaccaattgccagcgcacgatcgataaaacgaaatatcaactccagctgggagccatacttctcttcaaatgccacggtatccgcatgcagctcgtcgtgatgctttctgcacaaaggcaacacaaagagatcatgcgcttttgtacccattcccccctgaccgtggcctatcagatggtggggatcatcagcaggctttccacaacatgcacacggctgcgtcttaacccagcgcgtgtacttttcattaacccagcggcgacgtttggggcgtaacataaaagactccggcgactccggatccactttcagcgccagcacctttttcgctttatcctggatgatgctggtggcaggaaccgaaggcacaaggtcactttcccgggtgacagacggcacaacaggcttcggtaatctcagtgccttacgggctgcactttccggtaaggcatccgccaggtcattacgaatcagccaccagcacagttccggcattgtcacaacgtgactgtcatcaaaaccgagatcccgacgcacaacagacaacacccagcgggcacagttatccgttgccattgattccagccgttccgtgaactgatcgcgcagctggttatcgcagtgccagcacagacggattgcacccggagcgtgtcgcattgtggtcatgttctcgctgtgccatccggaatgaggccactggcagcctttttcacgaagtaaccagctttcaagacattccacgccaccagcacgacggatcactgcctcatggcggaacacggcccgaacggcaggatcatccgccagcggttgtgatgccgccggaacggcaccactggcgaaagatgaataacgctccggctcaggctccagcaggacacgcccctgcataaacaggggcatcagctctgaacctggcctgaacaatacgatccccatacgcggggcaatttcaggggtcagtagtgctctcacagtcacctcaatgaacggtatcgagcagctttaacagctcaggaaatcgggattcgaagaaatgcggctgcgtctcgcgcggatttgcaggactggtgatgttcttgccgaacatgcagcctttcgcggtcagcgaccagaattttttgatgttgttaatcgcggtacggctgtatcgttcgcgttgttcaacgatccccagcttcgccatctggtgatatgcctgattagccgtcaggcggataccatactgcttcagcagtgcactcagcgacagcgtagggcggcttgaaccatctggcgcatcagcaggtgcatcaatggcatagatcggcataagttcaggaagaccagctacctttgataatttctggtatgcaccaagtttcgaggagtttgacagatttagagtctttgctgctgattcaagcagaatgaccccggatttaattttgtcggatgtggtttcttctggtgatgaattatgaagcgcatcaaaagtacgtatcacttttaagctgaatgccgggctgatccacattgcatatgcatagaccagctctttacagacatacgtcccaccattgcgcccctgaatggtgatgacaggaatactacgggaatctcccgtagtttcttcttccaataattccacaagagccttcgtttcaggacgacgcataaactcgtgaacttccagcgaacgggaggagcgattctcaccagcggcaagaagagcagctttctgaaggtcgttaagacagtagttagattcgaagtactggcgcacagaaacgccatcaattacaagcaactgattcattggtttctccacaaatttttatccacgagcgggactgcactcccttttcgttgatgcaggatgaacttactgcgatttttaatagttatcaaggatacactgttcataaatacagtatctttaacgaggtaatacccaaatttagggtgttgctcaattccgttaccgagttgctaatttgcaactcgctttttcgtacttactgatagtgatctcgaccttcccctccgggataaccggtccccactccaccagcattcttttcacctgactgtcgtcttcccacacacccgcgtgggtcagggcgtcaaacagcgccttgttatagttgtccagatcgcggatccggttatccggaggaaacaacacgatctccactgaagcaggtgccgacgttggtttcggcagacgacgtaactgctcaactattgctgcacacgccgcgctctggaattttcgccccgccgcgcttatcaggctcttaccagcaaacgcccctttgttggggtgtcgccagtacgtgttcacgctgggcggaaaaggcagtattagcttcatactttcaggcccctctcatgtaaccagtgggttgcacgcagccttgcgttttcctcaccggcaagcagtgcgcggataatcccgaccgcctcgctgtcgtcgtccttcatcgcagtatgaagcgttatcccccgggccacgccacgctttatcgtgatgacgccttttttctccagtgcgcgaagatgctccaccgctgcattcaccgaacggtatcccagcatggttgccacctcctgattggttggcgggaagccacgttctttctgataagaaatcagcatatccagcacctgctgctggcattgagttaacgtcgtcatgccgccatctccctgaccagtttttccgcctgctggcgaacctgcgccagaaacgcctcaccacatgcctcaagttcatcgcgccctatgtagctgattgccggtcccttccaggtcttgtcgaaaacagcaatagcaccagcgaagaaagcacctgttggcacctgcttttcgtctttcgggataaaccaggcaggcagttcaaaaccaatacgcccgcgaataaaagcaatatgatctgcatcttccggccaccacacttcgctggtggcagctttgatcaggaaaacatagcgcccgcctttatcacgcatggcactggcatgtttcatgatgtaacgcatgccggtgatgtattgcccctcatgctgactggcgcggctgtacgggggattaccaaaggcagcacctttaagctccgcaagacgttcagaccagtcatgcgccagcgcgttgtcttccgcagtgtaataagcggcacatttggcgttatcaccatcagtgaacagatccagaacaaacgggccaaacagggtgttaattccccagaaaatgttgtccggcgtgcgccactgatcgcccacttccttcagttcatgggctggtttgttccgcagctccaccagcgcctggcaatatttattactcattaagcccccacgtaattccctgacagataccactcttcacccgatgcagcgcgcttgctgcttttccgtaagcaccgctcacgatgcgccagaaaattgtttcgttctggctgggagtggctttcacggaatgcctccatccacaccgttgcagctcgacggaataagcccctggactccagttcttccgcctggcgagtcaggcacaaaatcacctgcgggtcgttagtgccgacacagaaattgcgcacaggtctggtttcacgaactggttgtggttccggctcctgtgctctctcagtcaggcgcgggaaatgtctgcgtgtatctccttcacaacggtgagccacacgcccactctgacgtaacttgcttgctgactgcagaacgcgctgccgtgagtaacctgcaaaagcatccgcaatgtctccggaagtacaccccggatgggcttcaatgaatttctgaacttcattcaaaagactcatgatcaccccctgaatcctgccgggatctggctgtagtccacgttgtcgtaactggctttgaagtacgggtcctcgcgtctggctgcagataccgcaggaacttcccaggattcttcgaaatgacgatccggaccaaagaacgtgacagcctgtttcacaaattgtgtgccgctgttacccatcgcagatacccagcccgcgtagcgtttcacaccttccagcatggtttcgggttttaccccctcattcaaacgggctttccaggctttgaaggctgcagattttgaattgccaccagcacgtttggggtatgccagccatgcctgctcaaactccggagagtattccggtcggtttgaacgaactcgcacagactcatcagcagatgcaccaacagctattggttcattgactggttctttgactggttcaaaagagtgactggttctgggtgaatctcctgcaccaccccctggtgcaactcctgcactacctggtgaatttgctgcaccagatagtgaattatttgcactaccccctagtgaatctcctgcaccatcaagatgaaggagatagatattacttgagttacctttttcacctttccgggtgactttttttaccagcccggactcacaaagggccgcaatatgattcatcacagaacgtttgctaatctcgcactggtcagcaatatgctggtagctgggccagcactcaccctgatcgctggcattatcagccagcttgatcagaaccagttttcgcaatggattacccactcgaattttcatcgctttaaccatcagctccatactcatgctgcacctccgagatgcttcatgttttttccggagcaaaaggctataagcggcatactgatgcggtaattacggcccagcggttcacaaatcaccttctgacattcacggtcaaccaggctaacacgtagaacatgccctgcaggcgtggtgtaccactgacccggacgaggacaacggaaagtatgattggtaaaccgtttgaaaatattccggatcatttgcgcccccttacctctgaagggttcagcgacaaatttatgagactggccagtagcgccgcgtcgttgatgcggtcatacagacttacagccagcggggattcggcttttgccaacatgggataaagctgctgcagccagacctgatgaattgatgaaatgtaggaatagagaacgctggcgttatgtgcaacgtcgctcagtacagagggatttgaaagctgtttctccatctggttaaaggcattgatgtatgcctctttgaaccgggcagcacgtttccccgtgaagcccatggcaagaaacgcaaaaccgtcgcgggtgatttggtaacaagggagtttgcggcctgtgcaatcggtgtaatcactgggctgaaaattcagctcagtgaattcaacagagcactcaagcgtctggattttttgaataacgtttttgtgctgcttgcagaaatattcggcaacggccaaagaagaggtaacagccttcccatggataacatcaattttagggtgagtttgggtaggggtggttgccatagtgacatcctcatgtgcgaattttgaaaactcaccacatgggacgccaatcacagaggtggtgagacgtacagggttggcgtaaccggtcgcacatgaccccggcgcatctttcgatgcccctgcacgccccaccataatttggatgtgaggaaacgtgcgcaaaaaaaccgctgaagcgcggttatgcgcatgtgcgaatttcaggacgccaatcccggcacccgctttataaggtgcctgaacagtgtaacgtcccggaattgcagaatcaatatgctggtggtccttcacactcaacaaaatcacgcctgaatttccacaaaggactaaagcactcatgcgggtagtctttgcgaagatagataacgcgctgtgtttctggctcccaacgaataacatggacataaagccctcttccgtcacgaaaccagcggttaagttcctgcacaactcgccccccacagtcaggtaaagttctctgtggttacttacagccaggtgatttggtaatctgcattcatgccgtaacaacaggtgttcagcgacgctgaccaccagctgttgcgacaaacggttatttgccgttaaactattcatgcgttagtttctccacaaccagaagcaatcgacgccacgacgcccggagctgcacactcgcgggcgttactcttttctggagcgcagaagattttgtagaccagtgctgcatgctcctggagcttcgaaattgaaagatacagttcgtcgttaattgctgtcttctcatgcggttccactacaccgtcttcgattgctgaacgaatctgtctggaataactgccgatctgttcaatgacttccagcaggcgctggtttatatcggcgttctctactgcctcaatttcaggaagcgatacgaacaccccaccagcagactgtgcgacagcatccgcaatgtagtgagtgccagccgcacgctgtaaaaccattgcccatcccagcgggaaaatctgatcgccatctgcacgaaggcggttgaataatgcgttctctgttacatccagccactcagcagcttcagcgtaaccccccggcaacgccgcgatagtttttctgacagctttcacgtaccactcaggctgtttttccactttccagtgatgattacccacggcttacctcctgttcctgtggtttaaacccattctggttttggctagattgaaaacgtgccggataaagaatctgcatttcgctgatttcacccttaaaaaaattggccagacgttctgcaagatcgatagatggaatttgttccagtctttcaatacgactcagcgtcgctggattgacctgaacgcccgcagcaacatgctgcaaagtaaatccgtgcgccttacgcacattccgtaatggtgattgcatataacctccacatattgcgtgatgagcatattatttcacgcaaatattttgcgcaagttgatttgcttaacgcgcaataaagaaatgtaataaacgcatgaacataggaaaccgagtcagacaacttcgccaggcgaagaacatgaaaatcgccgatctcgctgaagcaataggagtggatgcggcgaatatctcacgcctggaaacaggtaagcagaaacaattcactgaacaagccctgagtaatattgccaggagcttaggtgttgatatcgctgatctctttacctcagacgtcaaaagtaatactgtatgtaaaaacagtattggtgaggatgttgcgcaggtgaaggatgtattccgtattgaaatgctggatgtcagtgccagtgcgggaaatggccttatccagggcggtgatgtcattgatgtgattcatgccattgaatacagaactgataatgctgtatcgatgtttggcggacggccagccaatcacattaaagttatcaacgttcgtggggacagtatgtgtccaaccattgagccaggagatctcatcttcgttgatatcagtatcaatcagtttgatggggatggtatatatgtatttggttttgatgataaaatttacgtcaaacgactgcaaatgatacctgataaactgctggtaatttctgataatcagatttaccgcgaatggggaattaccagcgaaaacgaacatcggtttatggtctttggaaaggtcttaatcagtcagtcacaaacccttaagcgacacaattaacccctacctcaacatcaattagccaccagaaggtggcttttcattacccaccaaattgcatatctcgcaataaaaacacttgcataatgcgcaacttcattttatctttctttccagacatacaaacaaggtactaacaaaatttggttgtaacacggcgtatggcacatgcgtcgttagcggtctggtgacgttaaaggggacaatccactccttgctcgggcaaacaaaccaggtagccggaatgtgcaagtcaatgatgatgctgataagacgcctaaccagcgtggcgatccggtttgacgcctgggaagagaccagggtgcaacgatgagggcatttatggaaccgcgacaaagtgtggtgccgtaactggctaagtgctctcagcgttgtggtaatccgcgaaatggcgcggcggtaagtatggcggggttactctttccccgttgaggacaccggattgtcaggttgaccatacgcctgagtgacaaccccaccacaacagccactgctttggcggtaccagtttgtacccttgcttccggctggtaccgctctttttacaaaacagagaagagcatcaccggacgacgggctcataacccaatccatccgggcggctgtcaccgcaggtgttcttctctgttttgtggagaaaccaaccgaccttgcagggtcggtatgatgaggagcagcaaaatggctagcgtacgcagtactgatgtgcaggtatttatcgtagaactggacggcggcgtatttgaaaccaaactcggcgcagttctcagtgaagtcgcttccggtgtgatgaacacgaaaaacaaaggtaaagtctcggtcaatctggacatcgaaccgtttgatgagaaccgtgtgaaaatcaaacacaaactctcatatgttcgcccgactaaccgcgggaaaatctccgaagaagacaccaccgaaacgccgatgtatgtcaatcgaggtggtcgcctgactattctgcaggaagaccagggacaattactgactcttgccggtgaacctgacggaaaactccgcgcagcaggtcattaatatcgttcttaattaactgattatttatctcatcactgaatatcttaatatagtgaggacttattatgtctcagaacttagacgcaaccgcaattaatcaaatccatgcccttatttctgctcagggtgttaatgaaattatcagtaagattggtgccgatgctgtggcattgcctgagaatttccgcattcatgatctggaaaaatttaatttaaatcgcttccgtttccgtggtgcgctttccactgccagcatcgatgactttacccgttattctaaagatcttgcagatgaaggcacccgctgctttatcgatgccgataatatgcgtgccgtcagtgtgcttaacctgggtactattggtgaaccaggtcacgcagataacaccgccacactcaaactgaaaaagacagcaccgttctctgctctgttgtctgttaacggcgagcgtaactcccagaagtcactggcagaatggattgaagactgggccgactatcttgtgggctttgatgctaatggtgacgctattaaggcaacaaaagcggctgcggcagtccgtaaaatcacgattgaagcaaaccagaccgctgattttgaagataatgacttcagcggcaaacgctctttgatggagtctgtcgaagcgaaaaccaaagacattatgccagtagcatttgagtttaaatgcgttccgtttgaaggcctgaaagaacgtccgtttaaattacgcctcagcattatcactggtgatcgccctgtactggttctgcgcattattcagctggaagcggtgcaggaagatatggctaacgaatttcgtgatctgcttgttgagaaattcaaagacagcaaagtagaaacctttattggtactttcaccgcctgatttcattactgcaaatgcccctgcgggggcatttatggaaacgtaattaactcaataatcaccggatggtgagggcttccttttacccaaattcagcgcggtgcagcgcatatacgtggagaacaaaatgtcatttattaaaactttttccgggaagcatttttattatgacaagataaataaagatgacatcgttattaacgatatcgcggtttccctttcaaatatctgtcgctttgccggtcatctttctcacttctacagcgtcgcccaacatgcggtgctttgcagccagctggtgccgcaggaatttgcttttgaagcgttaatgcatgatgcaacagaagcgtattgccaggacatcccagctccactgaaacgccttcttcctgactataaacggatggaagaaaaaatagacgccgtaatccgtgagaaatacgggttacctcctgttatgagcacgccagtgaaatatgccgatctcattatgctggcaaccgaacgtcgcgatctcgggcttgatgatggctctttctggcctgtactggaaggtatcccggcgacagagatgttcaaagttattccactgtcaccaggccatgcctacgggatgtttatggaacgttttaacgagttatcggagttacgcaaatgcgcatgaatgttttcgaaatggaagggtttcttcgcgggaaatgtgtaccacgagatctgaaagtgaatgaaacaaatgctgagtacctggtacgtaaattcgatgcgcttgaagctaaatgtgcggcactggaaaacaaaataataccagtgtcagctgaactgccgccagcaaatgaaagtgttctgttatttgatgctaacggagaaggctggctaattggctggcgttctctctggtacacctggggacaaaaagaaaccggagaatggctgtggacatttcaggtcggggaccttgaaaacgtcaatatcactcactgggcagtaatgccgaaagcaccgaagaataaaaaatgagcgtgataaaaactcatacaggaattgttatcacccgagacggtccgcaggtaaaaaaactgcaccagacaaagcggatgtgggtcgtcggaaaaaacgagttttaccacaaagaaaccggacgccgccactttgcagaaaatactcgccgccgactgctgatcgataccatcaagcctatcgaggtgaagcatgtttaaacagaacgaaaaatctatcgctcaaattgctgagtatatcccgcgtgcgtgccgggatatgcagttgcaggaagccaaagcacgcctggagaaaaaaattgcgctctatatcgatgacggctgtgatgccgccgttcttaacgcggcgttcgcgccagctcttaacagtcatacgcgaaagtcttttttttcgtgcatcgcagcgcagatccgtaaaggaggcaaccagtgagcaacattaactatcaggtactgcgtgaaaaggcagagaaagcaactaaaggaagctacatcgtagggcatacatctgttaaccaacacggcaatttaacaggagtttttgtttgtcaaaaatggaaaggagaacccggtggcgtgattgcggaatgtcatgttaactgcctgattgaatcagatgctcaggcttatgcaaacgctgaattcatagcagaggctaacccggctaccgtgctggcactgctggatgaacgggaaagaaaccagcaatacatcaaacgccgtgaccaggagaacgaggatattgcgctaacggtagggaagctgcgtgttgagcttgaagcagaaaaacagcgggcaaaagttctatttatggaaaatgctcggcttaagtcaggcatagccggtctgatacacctcggtattcgatatgcagatgttgaggtcatgaaaattgctggagatgcccagctttctaccccatgcactgacagcatcata

SEQ ID NO: 630 - DNA, 16930 bp, Escherichia coli
acggcatgwagkcagaaagccccaggcgattttttatatcaatcaacccagggcccactgtaatgcctagacaacattatagtagcccgatgacggccgaaaggcaatggaggggctgcgatgccacaacgaacgtttttaatgatgttaatcgtcgtctgtgtgacgatactgtgttttgtctggatggtgagggattcgctttgcggatttcgtatcgagcagggaaatacggtgtttgtggcaacgttagcctacgaagttaaacgttaacgggcaacacggcggcaggacatctgccgccggattgttgcgaaggctgacctcaatgcgccttgtttgtcttttttaccggacgactgctggatgctgctgtccggcagctattattttttccgtcctgtgcgtcatcaattatgacagtcgctctcatttggttgtctctggttagatgtattattagatattttcggggtaattcgataaaagttatccacttcagcaccagactgaatgatatatgcaataagatctaaacgatgaatctcgtatcgtgtacgtaactccatcatttcacgccatgctaaaatccttgatgttttcagttcagcctctataagtttccatgtgtttgttgagatggcatgttcttccagctgacgtaacgagaacctatcactaatgaccaaccatccccatcctcgagtatgtgcccatttgcgacctgcattactttttattctcgtgagactcaaggtcattcggtctgttggcttcacttccataagtaggcaccgaccatcaactgtcgcaatgagtaaatctggatagtatttttttgatttgtttttaaaacaatatggaatagaaaatggttgttcttgatagaaaagaacctgatcgcaacattctaatagattcattattttaaactcaagccctgattcgtactggactgtacgacctaatttttgagagtaaaagaatccagatatgtcagtatcattaaccgctctctgtgaacatagctgttctacggggggaggaggtgcgatatattttggccaatgtgtattgtctagccatttactgaatatgaactcaactctttctttcttgattcgggctctttcctgagcgtgagcgtgtgctaattctgctcttcgttcacgtaacttctgcttttgtaattgtgatattaatgagagcgaattttttatttcatctcgtcttgctttaggaatgcctgcggcaaaaatgatgaatttggcggctaactcagaggatgtaacgaaatcccgatgaacaatacgataaatccatactgctatatcatatggtgaattacctattgagttaataagggctttaaggcaagctccaggtgtcccttcatagcgagatttagcagctagtaagccaagggctcgttcctgaagttgtcttaccctttcacgggaaattcctaatttgacggcaatatctgccagagaatgaggtgaatcatctgtgccgagtcgcattagaagaatatattgatgtcgtttattagataaactttcgatagcagaatgaattagcataatgacatcatgttcatcggctatataatctttaaaatctgtattgggttggcagagggggagtggggtattttgtttaaaactattcttttgtatttcaactttatcatgagcaattgtttttgcagtgctcaatgatattaaattattgatgatactattgtgttcttggcgaggaatcttgttgaagtaattgctgagatcattcaccgtgtttatatcgttgaactcaagaaactcagaaggaagcaggcgtttgattgctccacgtattcccccggacgatcgttgatgtgtttgagtaagtttttttagcgagacgccctccgctatggatacgagaagacgctgtaactcttcagtattccatggagtaccatgtcgtgctggaaaattgctgcgggattcagacatgattttatctttatgttttctaggtactgccttgagtgtgtggttatgataattatttataatgatattgttatcttttatagataactgatatgcagaattgtattgattttgtctacagtgggcaagacagtgctaagaatttgtggggaaaacatagagactccatgcggcgtcctgagatagacggcagacaggcattctgcctgaaaagaaaaagccggttcagagaaaaccggctgacggattatcgtctaacagttgatagctacctcaaaatacttctgcaacaggaacaccggcaactttttcccactctttaacccgataccggatcatctgtgggaaacgttccttgtactcatatccacgtgcagccatggtgtgcatggtgttggccagcgtccttgatgagatgccggagatttccagtgggatcatcggcagactcacatatgtagtgtggatttccagcttgccgtcttcagcaaccgtgcgggtaaagttgtgaatatccagaccaatcacatccatcacattgttcggataaatgcgcacatacagcatggtgccgtttttaatgtcgatcccgaaataacaactcttcgagaatgacagttgctcataatcgctggttggagcaaagtgacagctttcttttatctgctgaacaacctgctggactttcttttttttcgctctggttctcagatatagccagagtaatgggagaattattaatgcccagcatccatatgcaaaaataaaatccattgtttgagataaggctgaatcatgaacaattagtgttccgaaaaaagcataaaataataagcatggtatgccaaatatgaaatacgcattgcgaacaaggtaataatatggccaccaggaaggatatctgctttttgttgtactcataataaacccccatattcacctgaatatattttaatctcttcaggtgaatatggcaatagtgttttattggtttttcgatatttttatttattgttttattccgtctttatcatctccattaacatttttcagtttttcttcacgaacgccaggtgttctgcgcatattggtattacctccggcaataatatctttgactgaagaaaccatattccccagcatattaacaccgtcacgtccgcccagaaaattaattacatggtcaggcagataagcctgaagcgcaaaaacggctgcaaccagtgtggtacagactcgggcataaatcagcaaaaatccagcgatgctgaataaccccgtaagggagtccgcctgcacattaaccagagccgcgccaaacaacgcattcagaatggtgccgccggccacgatggcgaccgatgcaaaaaagaatccgaacaccatcagcagcggtctgatcatgctgtctatcaggtagatgtaaccgtaagcagcccggcttcccctgtcctggcttgttcccagatgggtggcggcccacagggggccagcagcacatccaatcagtacgctgactatccagttgccgatgccggtcatccagaagataaacgggataaacggcaggtaaatggataacgaaaagccggcacagaacagcaaaaacagcaggaagtagagtggtggtgcggatgcttccagaaaagcctttgcggcgtcagataatccgctgacggcattgaccagtcgaccaaaaacggagttgctgccggctgtggaaagtaccctgacggtggtataacccgcccatatgctttcagtaatacccatagtgtaatcaccgatattttcatttttatcagtggatttagttggtccgaggatgttcctgttccagataaggatgtcgcaattttgtctgcaaaattttcacccgaccatactttcattattatgcttttaggttcagcggcttccgctgttctgtattcagttgatgaagtgtttgttcccagtgcaggagtatatggtgaattctgcaactgtgcctggtaagcccccttgacttccttcaggaattccgtatccccggcttcgcccagtgacgagacgccactcacggtaggggcgcggttggccaggtcttccagtcgctggttggcggtggcaaaggtctggtaccaggcacccagggcaacccagccgtaggtggtcaggtaggatttcagctgctccctgcgctcagtttctgcgttatctgccggcaacgccttctgcaccgtttcttcataccggttggctgccttctgaatacggctttcaatatccggcaggttgccgttacccgtgtcgcgccgggtccggtatgccgacacaaattcctgcgccgcgctgtccaggtcacggagcatggtatccatggcggagcgctgtgccgtcagaaccccctgatattccgtttcaatgaagggattgaaaaaatgggccagcgcggactgcttgttactgccgtttcctttcacggagagactcacactcccgcaggtggcgctgccatttgagacggtgacggtatatctgccattctctgtccgtgaggattcgctcatgggcggcgtggatgaacgtgcggtacggttaaagtcattgaggcccgtattcatggcgtgtttgcacagttccatctccagaattccccgtgctgccgtgcgggtggagacatgaactggctgtacggtcattgaatagccttcagcaatgttttctgccgctgtctgaaccatgatattggcggaaccgatgcccatgatggatgcgccccacagcatgaccagttgcgccagactccagccggaagcggtgggcacaatcatcaaaaatccactcacgacactgagtatgccgacgacgtcccgtccgttgttaaagacactgccctggtgtcccgtgcggacagcatgacggataccaataaacagaaaccagactatccccatcgtggcgataattgcgttaaacaccatgaacaggttgccaatgatggtgttgctgctggctgtcaggggatttgtgaccacatcaccaaaaatggtgaccagtgcctggcgcgacaggtcatccggattggtggcggcactcacaatgtcctgataggtgacgaaagcctgtgcaggtacggcagccagcgccagacctgcactcagtgctctgggtatgattttcacggtaactccggaaccgaaggggatgcccgggcatcagcccccggaatgaggaaaagaaattgcagaccggacagtcagtactgccggtgggtaatggccagccatgtggcctgtttccagccgtgccgggcctgcaggtaatcggggaatgtgccctgttcgtcctcgctgacccgacgttcattcaactgccagaggcggtatgacgcaatcagggcttttgaggcacacagtgctgcaatggtactcatcagtaacaggcagaccaggatacgtatcagggtgatgaccggcagtgcggtggccgcaagggccataccacacagcagaagtaccggtatcatcatcagccagaatcctgtccgccagaacatcctgcgacgtcgcagacgccggtccagttcgtcgaccgtcagtccgctggccctgaccgcttcctcccaggtcatacagaccggactctccggttgccggtcgggcatgaggcgcttcaggcgcgttttatgctggtccagcatatggcggcagctgcgcagcatccagcgggtttcggccagtggtgcgaacagatttatccctatatcaccgatgcggcggagacggggggccggtttttttcgtcgatgctgttgtcgtctttcatcttacgctcccctggctcatggcctgtgacagttcgccaaggcgctgtccgtaatactgccgtgcggccagcgcaagttgctgcccggcgataacgttaccctgacgaatctgctctttcagatcgttcatctgccagttcagcagggcggtggtgcgcagcagctcacggagaaggttatcgccttccatgccctgcagatcctgctgccagtcggtgttggcataccgtctgccggcttcaaaggcctcaaactcccgctggctcatgtggccacgggtgcgggcttctgatgatgcggtccggtcaaaatatgccgcagctgacggtgactgcagggcttcagtcagtgccccacgggtggcttcattaggggtactgtcagcaatcagtgacagctgcggatgagaggcggcatcgatgatgccgttgtattcattctgcaggcccacatacgtgcgcccggtctgtgtgcccacttctcctttccccggggcacgacccgctgacggtctggcggtgtttttcatataagccgtcgcggcatcaatctgtttctgatcccaggtgagagcggccggggtatctgctgtgcctgcgccctgatagagcgatcgtacctggctgtctccgcccggcagatcgcccacggcagggcagacatcagttccgccaaagcgggcatactccgcttccgtgcagtaaccggcgtggatgccggcactatcatacgcctcgcggaccggggagtccgcagcccgggagagacgttcccggatgggtttactgctgacccctcccccctgactcagacgtgccgctgcagacgctgctgcccggcggctttctgctgcaatgccggacgcggattcactgcagatggagtccggcacgctgaagcttttcctggcctcctcgaggcggtgtgtttcattactgaatatcatctgctgacgggtggcctgcccgtcctgggcaatgacggtggccagtttttctgagttctgggtgatggctgtgccggtggccgtctgcatacggaccatttcctccatgatgccctgtatggtggccagctccggcatgatctgtcgggtgaccggctgactggacacaacattcacagagtaggcatgggtggcagggataaccgcacagcctacaaggagtgcaagcagtgtggttgcagattgtctttgcattcttttttctccgttttcgggggatacaggatgtctggtacgcgatgactgagtgatttcggcagcggagccagcgggaaacactggaagcggcgcgtgatccatccctgacggttacggttatcgatgagcgtgaaggtacgacgcttcacgcgtttcagtgtcggggtgtcgctttccatgaccggccagtctccggctgtgagtgccggtgtgccggggacatccggccacagccaggtgttgtcagacatcagcgcagtgagtggtgcgggcagaagccagtgaatgacatgctgtatatcaaaaggcggtcgctccggcacgttaacctgccaggtggccgttgttatcagcgtgcctgtctctccgggcagggccaggcgaataccactcatctccccgtcagcccgtctgtcactggcaaaaatgacccggggattgggggacggtcgcagtgtgaagcaggcggacggcagggtgaagctgaaactgtcaccgtccacgcgcagtgttttcaggaagacctgtccccgggcaggacgccggcagcggggggtgatatgaatgctgtacatcagaggttatatccctgcttacggatgagttctgctgccagctcatggatgacgttttcactgtcatgtgtgcgggcgcggtgttctatcagtgaggtggctgaaccccggggaaagtgttcggccaggatctggcgtgcccgcagtgaccccacctcctgcgtcagcgcacgtcgcagggcgctgtctttaggagaggagttcagtgcccacagctccagtggaccgagggtgaatttcaggatccgggccagcgtgccgttttttacacggaacacagccagtaccgggacaccgctgccgtccggtgcggccccttccggcattttcaggaagcgccgcagtgtgacttccgggacgccaaagttatcccgcaggaacggaatttcgtcagggcggtaacgcagcagccacagggtgttggcggatttgagcacggccggaggataatgctgcagcagctgggtgctcagcaccgtgcgtatcccgaacttacgctgctccagctcctgggtgtccagggcttcccagatgaagttgatcccttttgcattgtgcagttcgtcatagactttggtcttgacctcctgatcaagctgttcaatgcggcggaaaatcacctcatggtagcgtgggtcgagatttttccgtatttcctcctgatactgcggcaggacaaaatcccgccggcgatctgcccggccagcagatacatgataccggtgcgcagacgtccggcaggtgtcttgtccccggccacattgttcagatcaacggcgaccacgcgggtgtcggggctgagcataaaccgggtacagccggacatcatcgggtagtcactgtgtccctgatcgagggcacggcggatgtagtccagcaaccgctcttccgagttatcacgctgaacggtgccgaacacatcccggatggacggctgtcccagcagggcggacatttcagccagcaggggcatggcctggtagtgtgcccgctgggcggcggggatattccctgcaatatgcagcatgtccctgatttcaaaccaggtggcggcattccaccatccggcatcatgttgttcagcgatgccgctctcttccagggcgagatccaccaggggttccgtacctgcgcggtaaagtctggggttattctcgccatattcccggaaggccaggtccaccaggctgctgatgatttgccgggtgtcgccgggattacagggctgaccggtgccggtatccacacacaatgcacagaggacggagaccatgaagttcttttccggtgtgacgggttttctggccccgtacatcacatcaaacaggttgcgggtgtggtccgggtcattactcagaatgatccccacggcttcgtcctttctctgctcaggcaggctgtcacggataagctgtaccagtccctgtgcactgaatcccttgtcgatataggcaatgaaagggagattcttctgggctgaggctatctggatctccgacagtgcgttgatgagtaccgatttgcccagaccgggtgcgccgggtgtcagctccgtgtgcttgttctgttgtgatgacgccagcgccacctcccatgcagagccgtcttcggtgtgcatcatcagatttccctgtccccgccagacagagcctgccctgttcaggggaaacagggaaagggcgtgtgaaaggggcgggtaaagggggatcgggccggagctgtgggaggctgccagaaccgtgttcacccaggcacgtctcggatcaccgaaggttgtggtggtgccgcatacccccagccttccagcgcagatttcaggagagcctggttacgggtacagacttcccggctgtttccccatgtggtggcaacaatggtcatgatacagaccggatcatgcttgttgatgtcattcagcatcattaccgagtcatacatgggccggagaggaggaataaagctgctgtaggtcagcagggttttcttgacccccagcgccttcatgccgtcgggcatcagatccatccggatacgccaggggattgcacggggcacatccctgaccagctggttgaatgtccgcagattctgagggggcagggtaatggcgaccataccgtgccagagctcaccggcctgaatcaggctgccgtgtgtttcaggctgtgtggtgaataactgcagattcagcgacggtgcgtggaatacagaggtatccccgccctgtcgccagccggcaggacgggcatcttcgggcagatgaggctgccatactgccggtgtactgttgcgctccagttggcggcggatttcccgtcccacttcatggatatccatcaggcgaatcagcaggccatcagaatcatgtgtcagagcctgctccagcgtgtccagtaaggcgtcatgccgtattttgagggcggaaagtgtccagcgccagggatcctgcgcaaaacgggctggcggagcgtgttcagcgagtttcctgacacgggtctgatggttcttgcgatcggtccggctcagcagttcttcagagctccagacggtcagccagcagcgctcccggacaagccagggggtgagtgtggtgactttttcatccaggacgtcctgaagcaggatccccgtgcgtgcgatggattttcgctggggtaagagcatggcttcgatttcatcccttccacgctccggatcgcgttcgaaaacaaaactgattttgtggccggaatttttccaggccgtgttcattcgctcagccagtgctgcaatcagtgactccagtgtcccgggggccgtctggtccgggttttcatccatttctttcagggcaccgctgatttcaaagacggaaaggtaatacccctgttttgtggtggcaatgtagggggctttcagccaggggcggcgttcgcggtcctgctggtccagaccgatgacggtgtgcagatcacagtaatcggggaagaatgcggaaacggaataccgtgacagggtactgatacagtcttcaatggcaaaaataatgcggttgatattcatggcatggggcactccggtaaggatgaatcatcaaggtcttatattttttgatgccacagcaggggatgtggcatgaaaaaacagcagagaagataaataatatgttgaggggcaggggcgtatttctgtgtgattacacccggataaataaactgctggcggcgaatgaaccgggcaatctctttttcatctccgtcaggcggaatatcgtcagtcagcgaccggataataaagtgccggaatgcatctgcggagaactgatatccggcaaaacgtcaccggcaccggtgtgtgtcacatgacgtactttttgtcaggaaacgaatccggcagcagaatgagcgccaccccgtccattttctccctcaacgttttacgctgtgccggcggccagcggcgcagggcatctgcaaaatccgccggacgccaggtgcggaatttctcctcaacggccagacggttctgtaccagggcattcaggactgcccgtccctgcctgacccgctgacggttatcgctgaaaatctcctgcagtgcccgcgcattgagggcaaccaccgaggccggatgcaaatcggggagccagaccatcactccctgtgcggcagcgtagccgttcagacagtgccaggcgtggcagaaggcacagagatgaaagggcgggccttccggctgcagcaggtcactttcattttcgctgagtgcatccgttgtgacgatttgcgacttttccacatgacgcagggccagtcgtctggccgacaggcgggcctgtgccagggaccgctccgcatcctgcagggttcgggtgtgtttctttttttcgtcagcgttttccggtaccggacgttttttcaggcgcatcacccgggtgaggttttttccagcaggacgatcgtatcccggcaggtgtcagccatctgctgtaatggccatgaatcttccagaatgaagcggtgggtgacggtcctgcgacagcaggggcagcgtccctctgttgagagcactggcggtggtaacagggcttcaccgctgaataccgtgtccggttgcgggagcgggaaaagccatcgttcccggaccggggcgatgagtggcggggtctttttcatacgcttttctctctgtatacagggtgacggcagccagaatcagtgctgctatagcggtggagtaacactctgcaaacacaaactcctgattatcccggttgtcgcgggcaatcacgttgccgtgctctgttctgagcagggtgaaagggggtagctcacaggacatggtctggtcctcctcattgtgtgaagacggcaccggtttcccggtgcctttgcggattaactgattgaaaccggagaaagaccgagcgttttctgtccgctgcccatcagttccggtacgacggcaaggcagacgccgaccagaattgacagcaggcaggccagccctgcaccgggttttttaccgatttgtttgaggccaagcagtccgccgataaagagcaccaggccaataacctgaccgatagccacaaacgaactgctggagcctctggcaccatcgccaacggttttaatcatatcgaagagggtatttgccattgcggtgtggggcagcagcatcacgggaagcagcagtaacaggcgtaccagccggtcacggcaggccatcaggcataactgaacataaacagatgcagcgcgcagacgcgccgccatggcacgaagtcgtgacatagtgtctcctttattaacagattgatttactgaaaaaatacaggggtcagaaggcgataccgaggcttgccagagtggcatcgataacccggtcgttgaaaaccagcagaacgccggccacaaacttgacgttccctttactgatggattcactggcgctcagggcggtgtgcccgtccagcagtgatttgcgccagatggatatgccgttcatgacaaaaccgacgccggccagttttgccagtgagagaatggcattgacggcaccggcagcggcaccaaaggagcccggctgcacgtatgcgatgggggcgaaagaatctgccctgaagcccatctgggtaccaccggcattgatcattgagggcagactgaccagcatgccgcagatgaagataccggcaataaattttcccggtcccatactgtgacgtccttctgcccgggcgcgcatcagatgaccgataaggccgataatccccagcagctctccccaggtaaagagaaactccatgcctgcactgaaaataccgctggcaaagttctctatggctgtcagggcatcaatgctcatcatcgtaatgtaccggcagaggtgatgactgcccggctggacgggtcaatccgggtgatggtgatgtttcccagactgtcgccttcccgtactgcccaggcactgccctgccagcggatccaggccatgcctttctccaccgacatgattttcatgccctgcagaggtgaaggcagggttttcgcaggctgtctgttattcccggtcggggctggcagtgctccctgcatctgcagggtatgcacctgcttacgggtctcctcaagcaactgacgggtttcctgtgcccaggcctcatccttctgaatggcgttactgagggtggtgatactgtccttcagcatggtcagggtgcgccggatttcctcatcccgtctgtccagctctgctttcagatcacgggcaagttgctgcatgtctgcctgtggggtaaccggcggtgcgggcatgttgtttccgatcccggactccgtcatggtcatgggctctgcccagctctcagcagcgggcggtgtgacagcaaagcctgcatctgcagggggctctgagggtgtccgcagaaacttgtaccagatggcgaccaggatgatgagggcacagccggcccagaccggcaggctgtatcccatatactggcgtttcaggaaggatttgccggatgccggtgccgtcgtttcgccaaagctgccgggatcttcatgttcgtttttcatggataactttcctgttgtatgccgtagcgttgctgcatttcattctgtttacggaggaccgccgcccggatcctgtcagaggcctggtgctctgcctccgcctgggtgagcggacgtccggaggagggggactcagaaggggcagtgccggaggacggcgtactgatatcgttgctcatgaccggctcaacaaacagaatggagacgacctcgccccgtgatactgtcacctgacggtaaggttcgctctctgcctggcgggtcagcagctggctgccccgttcggccatgccacctgcaatgacgccggccagcgcctctccatcaggcattcccaccctgccggtaatactgccgtagtttccctgaaggatctgtgtgttggcgtctttgtaaagacttccgacattgcccaccccgccaagtacggacggcagaacgatgtgcttaaaccagcggtggttcacgtcgctggccacggttgacattcctgttcgttcattcagggcatatgcattcaccttcagaaacatgccccgccacatcatccggtcaaagtggatatccattccctgacctgcgagtctggcgtcctggctgtagaggacggccccggcccatgggccggcaggtacggaggccaccacacgggagaccgcattgtcagagtccacttcggtgtcgatgtaagccggtacgcgggtcagtgccggtatcagctggatcccctgacgtgtagccggtgttgccagactcgtctcctgcagacggggatgctgtgatgtaacggtaccggacggtgacgcatgtggggctgtcccgggagtgccggtggtgctccacatggctgctgccactaccggtggccgggcatcctgatgctgtgtattgatacgggcaagcagtttctgtaatgcctcacgccgtttttcccgggcagtctgatcttcctgagggggggatgcgttttgcccggaagtgcctgactgatcatcggggggattatcccttttctgatcgtttccggtatcggtatccagtccccggggcagactggcgataaacgtctcgttattacgtaacgcttctgcagcaccacgttcattgtcagcccgcagtaaatcccggtagtgctgtgtctccatcacgttccgtccgccgccggacgttgtgctgttgatattgactgacgagagcgatgcagcgtttcgggggacagccaggtgagcagcaggtatccgcccccgatgataatcacgccccccataaccagcagggctgacagctttttgccggattttgcggctgtgtcctgttcttgttctgcgctcatgatttactccagttccggggtgacgtgaacggactgaccattcacggagaaggtgagtaagggggtcaccggcagtttccacagccgcgtaccatcagccgatgccagcgtctgttcaaattcatcccgcagcatggcccgtgagcgcacgagaagatcatcgccgtgttgccagatggtggtgtccgggacgttaccggagaatttcaggcggcggatggcgggatcatccggtggcacaccgtccagaaaggcctgcagagtggcgtcatgcagggcaattttttctgacggtatggacaccaccgggctggcaggtccccgccggggaatgcgcagatccagacgactgtcgatttcccgactcagggtagtggtgtccgtttcaccactggtgatattcaggatgaccggtacagacaatcctttgagatagaccgtcacattcccggcagcccaggcgcgcaggggggtgacggacaccatattgccgttgaactgcacgtcaaagtgaccgggcgcagcgttatagggcggatccgactgtggccacggactgccgttgacgtccgtgaaggtcaccacgctgacgttatgcagagcggtacggacaaggggcaggctggcccccggagacagattcaccgtgagggaactgatacggggcaccacactggtgagcggggcactgatggcccgttcgttatcggccattatcccacggagttcacgaatttcactggcattcaggggagaatccagcgatgcgccttcctgtacaagagcagcgccgggaggcggcaggtttcccgggagttgtgcggctggcgggggaccgcctgccggggtgttcccggttgcctgtgcggtctttccgccggtctgcgggcttcgtgcatttttccagcccgggttatctgcagctgtgacagtgccgcacacaataagcagtgcgccaataagatgatgtatgtgcatgatatgagtctcagattcctgctgcggcgttacgggaaaccatctggctgatttccatgccgccgggtttgatgcgggggtcaacgcgccggacagtgatttcaaaggtgaaggcctgttcggggcgggtgctggtctgaccgaccaggcgcatcctgaccggatactggaatttccagaaccagacgccgttctccatctgtccctggttgaccagggtacctgccccgatagtggttgtgaggttaaatttctcctttttaatagtgtcgagaatgttcgaggcctgaagggcattcacatagccggcaaagccggcttcggaaaagcggggggcctgtgtcgtgatttgttttcggtagtggacaaaatcgagattgaaggcttcgctcagcgtcatgctgccaaagttcatgacgtcgctctgactccaggccggctggctggttggtgccagacggaccagtcggccattgtcagtggcaaagtattcgcgcgtcacgccggtggcatgccagtactgtatgccattagccaccaggctgatgcagagtgctgcgccgctgtacagcaacgccctgaccagaccgggtaccagcgcggcccgttgttctgactgtgcgatggttctgagcacggggttataaatatctccgctgttatccgcttccggtgagacaggggaggtgggttgtgcttcgctcatggtgctcctgttcagaggttgtagtctttccaggggtcgatattccccggaagatggtcattcacccgatccacgacggcatcacagacctggttttccaggtcgcggaggagcttgtccaggctggggaactgcggaagagtgatactgatgtccttgatgcgggacaggcaggactgcagggaggaggcgacgtcattctcccgctgtgaccatgcctggctggctgtgcgcgcccgctcccaggcggctctgctgccggct

SEQ ID NO: 631 - DNA, 837 bp, Escherichia coli
cgtggttgtccgctttgcgtcaaaaccagatattaccagatttagacatatattcccgatagccctgctctgatgctacactctgtgctattttcatgaccccaataaaaatatttatgactattgctgatttcaaacggcctaaattggagctcccaaacggggcaaacaaactactactgcactcttgctgtgctccatgttccggtgaagtgatggaggcgcttcaggcctcgggaatcgactacaccatctttttctacaacccgaacattcatcctcagaaagagtatttaattcgtaaggatgaaaatattcgctttgctgaacaacacggcgtgccgtttatcgatgctgattacgacaccgacaactggtttgaacgtgccaaaggaatggaatgggagcctgagagggggatccgttgtaccatgtgttttgacatgcgttttgagcggacagcgttgtacgctgctgaaaatggtttcagtgtgatcagcagttcactgggcatttcacgctggaaaaatatgcagcaggttaacgagtgtgggcggcgagctgttgcgcattatccgggtatggtgtactgggattataactggcgcaagcagggcggctcgtcccgtatgattgaaatcagcaagcgcgaaaaattctatcagcaggaatattgtggctgtgtgtattctctgcgcgataccaatctacaccgcaaatctcagggacgccctcttatcaaaattggccaactccactacggaaaagaagagaaggagtgattttmatggatcacctttctagtagttgatttcatatacgtacgctgagcatcga

SEQ ID NO: 632 - DNA, 1564 bp, Escherichia coli
atccgctcccatttttcgttggcctttgtcaaagttccggctcaggatattgggcgcagatcacttatttggtggacaccactttgtcggatgcttcagattatgaccagatggatttcgctggacgcttacgattacatgcaccatattgtcaacgattacgccactgagtgtatgacacacattaaagcgttaggctcaggccttattacaatgtcatgctagtgggcttgtacgccgtaaatatctgcatgataccagaatgaccggcaaacaaaggtgccccggcaagctcgtcagtggatataaagaaaatcaagtgcgctgataacgatgccacatctgtggttggtggcaatatgcagattgttgttatttgtcttcattgcattctaagaagtgtttcttatcagacctgatttttttgccattatttttaatgaggtcttcaagtggaaaataggttaggcgttcatgtggcagcgcggcacgtccccatttagtggcaaactcccgttggcgtgcctgtaacagttgctccagcctttttattttgttctcattcatccggttttcctcgtatgctgcatcacaccactgtgctaatgaaaaatgtaatcagtgtggtggacgtgttttatccgcattggaattgtcgtcaactaaaggagatgaggcccgtttgtatcgcaatgggtctatggcgctcatgcccgtttgctgttcgataatggcttctctgagcatacggtgttgcagttctcgtaaaaactttgcgtcttctggtgataaatccattgttattactcgtaaagcaatgcgctgtagtgccttacgctaccgcgctgatggttcttatccgttttattgaatcggagaacaaactgtgagctatcagcctggtggtctggttttgcctgatttaagccgccgtgggtatttgtccaagaatgcttcaagctccaatcgttttggcctggtgaatggagatgggttaagcaaagactctcgttgctggtgtactttttcgcgctggcgctcaagcatggataatgcgattgcctgtagttcttcgttagtcattgtctgcacctggaaagcaatttaccggagtacctcacactacggcaaaaatgttttattgttgcaacttgcgtaattattcaggtcagtttggaacgcactgtataaacataaataacctgatactgttgtgtgttttcaaagaaaacacaggtatttttcacataaaccttccccttttcatatccgaccacttaatcaaaaaacggttttatacttgttgcccccactggggtcatcttgggtgtagtgacttttaacgtcaggtgacgcattgtcacttcagacctgctacctatacgccggaatataatggtcagagaggcatatttcgacgcccctaatctggggcgtttgattcaggatgtctggaacaatccgggctttgtgtcaccgggcgcatcaaagctgtaccccccgggatgtggcgctggatcgtcatttaccggactgcgaagacatacttaaagaggtgatatgg

SEQ ID NO: 633 - DNA, 17637 bp, Escherichia coli
aacggttaaccggttaagggctttggttaaacaaattccggaattcacsgawtygtgacagttagttttcaactaactgaacgacgactagcctgccgccttcctcctttgacagaacaaactgagcgttattcgtcagttcaattttttcaccaatggcaatctgtcgtttatccggtaatgacataagcccatttatgccttcatttactaaccaccactgatcgttatggaaaacaaaatacccaactcgtttcctttgtgcatcggttgtgcgctcatttggcgcaatgaggcgattcacatgccacgcatagattgactgcccgctccacaccatcaaccggtgatcgtcaggacgataactgccttcctttcgggatgaatataaatttagaaccggtaatttacccttgtatggcgtactgcagtagggacaaaccggctttgtcttacctgagaaaacgtaccatttctgttcacacgccttgttctggcagggctgtatcagatcaactgttttaaccagggcactttcccactcatcggcggtcgggcgtttagtggcatcgtgtaagccatcaataaaggcgcgttcaaacaaaggcgtcagataagggcccatgatggtgtaaggaattttctccgggtcagcccagggcagtgaaaaggaggatagctgactgactttgactgcattgcttttgtctgtcggatgttcaatgaagagcgccttctcacccatagataaggtctcatcacgtacttcatccgacatgtcatgtatttttccgccacgtagcggatgacggaagaacagatacatgtagataagcaccgacagcgcatgacggtcagtagtaatgcttggcaatacgcggttcggatcctctttggaaagatggctggttttcaccacttccggagcgataaaatccggggtacccacgacgtcgggaggatactttccagggacaaccaggccgtctacgtcaatgatgcaggcatgtcccatttctggatcgataagcacgtttttatagcttagatcgctgtgacagagacctgccgcatgcatccttctgacggctcttgttagcagcagacagaccttgagataggtaagcgtattgcctcgttcacgtgggtcgagaaatttattctggttgctggcgctggcaaaccatttgccttccttttcacggccttttatgccaagaaaatcatcgtttttagagccgtatttaaagaaaaagtagcttttgtaggttggaaccacgatgccgattttatccccatgctcaacaacgtgggtcggccagcaaaacaggtccttccagtattcacctccggactgaccaaaaatgttttgcctgtagcgtccggtgatcatatcaatccgatcccgggcctgctcgttctgcggtttatgataaaaagcgacgacgtatgatttatcaggcgagaagtaaacatccttcatcgagcccgaaccaattacctcgtcaacatactggactgtttcgccgtcctttgttttgcacgtaacaatatttgccatattgatccccgaaaaagcgtatctcttaccacaacaccgcaatagtgcggtcatcgtggttccctgtggagaaaaagttaagccagtcgcctaacctctcaggcgcaatactggcgtctgtaaggacagggatgagctcatcaaggagacgggtccatttttcgtcactgcgaagcccgttatccgtctcaaacagagggtctgatacgccatctgtcatgaggatcaagtgagatacatcattccatttacccacgctgatgcggctgctaaacgaggggtctgcgataatgctttggtcaagaaagcgggtttgtcctgcgtattctccgctatcgggatttcccagtattctgactttaccggaagggctgtatgcacctatcgcaccatcaccaagccagaatgcagccgcaaacagctctttatcagttcgtagcgctacagttgccagtagggttgttgaataggatttcacaggttgttctgcacaaatggcttcgttctggatactgttgaccgcgagcgtagctgcctgtttaaaatgatgaagcatggcttttatggttgcctgctgatcgctcccttcccacgccgtaatgtgctgctttaaatggatgcctttcaaaccactgagctgattgaaaaggtaatcgccagccgtttggactgcaatccgggagccttcccgggaatttaccgcactaccggccccgtctgcgaccagcatgacagaccatcctgtttcctggcagtggttgatatagaagtcgtcatctctgaagctcccggcatgctcatgagatcgtccccggcgactggcggcagcaatacgtatgtcacccctgaccaggccagcagcgtccagatgggacttagggtaggaagcgtctgctggtggctctaccaccttccacaggcttctcggatcgggattgactataaaaagctgttttgtttcgcattcgtcgtgtgaagcgcatgaccagagtactgaaagctctatatcgccgttttcggtgggtgtacctgtcagcaacttatgctctttgtcaaaggtcaggccaatgttccggggaaagacaacgtccctgacagtagcctgctggccctcatccagaacgatagcaaccggcgaagagaaacgttcgcctgcgcgggcgttgggaataattattttagctctcgggggaacggcaggtggcacagctaatctggcccgctgctggcctgtcggtatctgcccgggttttaataccagggaagacaggttttcgtcttccctctgtgctggtttatcaaattcgtaataaggcatcagcttccagaacggaggatgaggttcattttctggcaggggttgcagtaatggtgtatcggtagcgtcaatgcccgggttatcagcatcacttacgaccgtttgttgctgatcggaaaggctggatgctgacgaggcggcgatctctgcgtcgttatcaccttcactaacccgcgcagataaaccctgtgcaaggctctcaatccgctctttaagccgcataatctcttcagtaagggaaggggcgtgcgatagaagaaaaagccgctcaccttctacagggtggcccagctcagacagcactaagcggataatcttctcttcaagtaaagcattttgcgacatcaacctctccctctgtttacgtcgaagttagtgtttccgccatcattgctgaatgacagacctgtttcacaccacgggcagatcacgtcatccgggccgtcaatgcacagcaattttccgcatgagcacagggcaaacgcactggcattaccgcagtgagggcaacccggtacgccatgcagttagctggtgtttacctgcaaaccggtagcggtggcatctgaccatgcaaaatagtcctcatcgatgggatagcatccggcaatattaaagctgttcaggttcaggctgaaatcgagcccggaaacccttgctggtggccgttcatacttcatcagatacggacgacgggtcttgctgcaacggccggtaagcgtaacgcagttttcgtcgtacgcttttactggctcgtctttggccagccggactatgtattcagtctggctgagctcaggttgtttgtcgtccccgacgctgcggctgtgcgccgtaaccgaagccgtgatccatttgatgaagcgggtaaagtccccttcctgagactcggtgaacagcatgacattctctgtcagttgccgcaggatattcaggtctgctgacggccccaggccaacggcaatgagattcactttactcgcgtagtgatccttccagcgcttcacttctgcggttgtgtcgtcagtcggacgtccgtcggtgaggaggtacacgacgggtttccagtcgcctttagcctcatgagtggtttttctgacctgagtatcaatttgcacggtcagctcacgcaatgcggccccaaggctcgtaccgccgccaacgggaaggcggggagggtagaacgaggcaatttcgtgaagaggtacaatcgtacgggctacaccggcaaatgcgattaccgaaacccaggctgtttcaagtgcgtgtggatcctttcttaaatctccgacgatcatttgcagaccatcggtcatttttttcaagttttcaccaatcatggactctgaacagtccaggacaaaaaacacgggaaggcgtctcataattttcctcgtacggctggtacggccagcagaaaacgttgctgtacagaaaggtgttgcccggaaacagcacctttctgtctgtcagagcaccagctggatttctggtggaggagggggaagggtatcagttccgttattaatccccgcgcttgtgctgccggaagacacgctggccgatacccatttaaagaaacctgcaaacgcggttgaatctagcgtctccagagacacaaccttatcggtgagctgttttaagtgctcatggcctgctttaggaccaacggcgcaggcaatgatggatccgaatccccggccgcgaatcgcttttaccgcttcaccgtacgccagggcatcagaaggggttccatcagtcatcaggaataccagaggacgccagtctcctttggtatcaccatctgagcgacgtacatcccgttcaacacactgcatcagacattcaagggcagcaccggtgaacgtcccgcctgcgcttggcacaacgatgtcagaaaactggaagtcttccagcggcgtgagaggaatgaactcacgcgcctcattgtcataggtgataatggagatatgaacgctttcgagggcgtagggatcctggcgaagagcgctaagcatcgcctgaattccaacgttaacggaatggattgactcaccgcgcatcgagccggatgtgtcgataacaaggtaaacaggcaggcggcgcatcacatgtaattcctcaggtgcgagacaaacgaatctgattctgaaggctcaccaattgccctgagtttccagcctgtagcctcgcgtatcagctcggcaaagaccatggaacgctggctagcgaaggcgggtccgccagaaagatcgaatcgtgccatttcaatattacgggcatctactgcccggatgaaggcattctgaactttaccaaagtgctgctggagcttttcaccattgtagatctgaacgatgaacacaattttctcgtactgagcgtcaagggaattcaggcgcacaataatttgctcatcgtcaccgtcaccggctccggttcggttatcgcccgtcagccagatattgcctgacttatggcgaaggctgttgaaaaagatgatatcgccattcacaagcgttggtttaccattttccacattgccgagatcggtcacctttccggctgaattacacaggaaagcgatcacatcaaggtcgtattcttcttttttaccaaagatcccgccgagaaaacctttcttttcctcattaatatcccaacccaggccgatagtaacggacgagagatcgtattcatttttttcaggcttacgccctggcctttgctcagactgacagacatgacatccccttaatcaataaaattataagaccacatttacttctggcggcggcggtggtaggtcttcaagaccgatcacttcttttttgctggactccactttctgactgcctaccgaaatgctcgcactgacccatttaaagaaagctttaatcgtcgaactgtcagctgtatcgagctgaaccacgatttcagtgatttctttgaggacgctggtatcggcatcatgcccggctgcacatgccacaacaacgccggttctggcggctttaaagtcattcaggcctttacgccagtcatcattcggacttccatccgtcatcaggaatacaaggggacgccagtcacctttagtgtcagccgtcgttttctgtacttctttggcaatggagctggccgtgagagtaagcgcttcgccaagagacgtggtgccgctggctgttagtgctggcatctggaaactcaggaggtctgtcagggggacagcctgtcgggctgaagaatcaaaggtgatcactgacacgtaagccgtttcgagtgcatacggatcctgtttcagcgtggtaagcagcgtctgaacgccattcttaaccgcttcgataggctctccgtgcatagagccggacgtgtcgagtagcagatatacgggtaagcgtctcaaatgtaattccttcttaagagatcggaagaggagagtagtttcaggaagaggccagagtttgttgatttgataaaacggcacgacatctgtcggggggagattaaatactcagaagtggcattatagaaataagttaaccaccattgaattaccgacatgtgaatggcctcttatcaacagaaaaaaattcagaccgtactggaatataagattccgaaaaaaactccggcaaaaataaactttcttatgtataaaaatcatcatacatcacagatctgcatgaatggagtgtaaatcgcccaaagattgatgtgtagcacatgaggatgtcaagacaccagcttttgtaggcagtaaggcgctgctgacattgcggaaggagaatagatcaaaactccctcacgccaatacagaggtgaaatatgacaaaaccggagttttcaccccggtctgagatttagcgtcaggactttttagtgctgtattcttttatcagttcatcaacggagtgcagagccagcttctctaccgcttcacttcgggtcgagccactcagcgcagccagacggtcaatttttcttagaatccgcatgcgtagcgataatgacacagctgtttttttatccttatcgagtacgaccttccctgtggactcaccggttttcagttcagcattctgtgcgagcgcttcattcatccggcgaagggtctttttatccagctggcccggattaacgagatgataggaatgacctgccttgctgtatttgatctccgcagaatatgactcgcgtagctctttgagggcccgggttaatgtcggctctgagcattccagactggttataatgtcggcagcggaaacgggcttgccggtgcccagtaagttggcaagcttaaaaatccgggtctgtctggtatttaattgcatcgtaagatttagcctgcttaaagggttagtggttcaataggctgaaaaatgaaggtactgctcatctttctaataaccgggtgatcgcctaacgcttcaaccggatcaatgtgttctatgccttcaaaatttactgacgacatctggctgcgagtgcatttgcaggacaggatatactcatcctccagatagccggtccgcttactgacccgttgcgtaaagcctgacacaatcacgttgtcgaaaggtagcgtatgtaaaacgataccgaccaggcggaacaagcagccatggacgtggcgggcatagttttcgcgtacggctttttgcgtcatggctttttccgtcagctccgttccccgggcattaacgccgtaaatcttatcagggaaatcttcaatctcagctaaatcaacgtccagcaggactgctgatagctccggctttacttcaaatgcaacaagcgtttcacgcggccattcagtttctgccagcacacccgccaggtatgattcgaaaaacgcggcgtctgtccggaactgctgccgggcatctgcctgagccgtggcgagccgtttttcatgttcttcagcttcaaacttccagtttgcatactgttcggcccaggccgtccgttgttgctggtaccggtgctgtcgaagggtattctcacgctccacatcaatcagctcctgctgccaccggcgaagattttcggcgtggcgctcagctttagctgattccgattcaaaccatttacccaaaaaactaatgccttcgctctcggcaggcttttccggcaatgcaaggtagtctggcttttctggacgcaccggtgccggagcctgaaaaggcgacgttctgttatgcaggtatactgcttccagctctgcccagctgatgcctgtttttggatccggcgtcagctcgtgaatattacggattgcggttaccgctgacatgagttcagcggctttctgctcaagcgcctgtctgagccccgggtcggttgccgtccggttttcacctctggaacgcgcggcccggtcaagccgggtacggtaactcagcccggtaccgggcaagcccagattggcataggtcccccggctaccaaaagaaacggaagcacctctcggcccgacactcaggctcggtgcaccgttactcaggttgaggcgaacgccaggaataatgttgatcgactttctgaacctgaaccccattatgatttccttaatgatgctgggtcacggtaagtaatctgattccatcagcgctttgctcgttctgtaacccataaaaacgagccctgtccagaatgccagccgcccagcggcgatgtgtggcgggttcacacattgctccctgcgacttaaacacggcctgggtagagttcaggatccgcagagcgtcagaatgctcaccctgagtgaccatcagcgcgttttgaatgacctctatctgacccgggtgaatggccgttttcccaacaagcccgtgtgccatatcaagagccagctctctggccataacggcatgatcgtcaatatgctcacatacgggcgcggtcagggcaaaatcacgcgggccgaagaccgaaacgagcattttgatgacgtagcccatcgggctgtcatacagcgtcaggtcccggggacggcgaagcgacacaacgttcataagatcgttgccgccgattcgaagcgcaataatgcggtcgtggcagggatgttcctccagacgggtagccagctcgcgcatctgaaccacgtcaaagacatcttctgtttccagcgttggcatcatgcacaggtgagtcccgaccatgatatcccaccattcagctaacgaactgagggtaaatttaggcagcacaaacccgtcgacagcggaaagatcatgatgtgcttttaaccatctgcccatttcggcatgccgggggcgaatgaacaccagaggccagtcatttttacccaggctactcatgctgttactgagctcgtgcagcaggtgctccagatttttgagggcgacggggatgtctgcttcactgacagcatcctccaggcaaatcaccagagagcgcaagcccgggattttcccgtgcaggacggcatcagcaatatcttcccgtgttgcaggcatgtatagcgtggctcccagattccagggagaaagacgatttttcatcagagtaccttcttgataatggttacagcccgatactggccgagggttccccccatttctgtaacaactattcccttttcacgagcaagccctacaagcaaggcaacgtccgggtcgtcaatagaacgcacaaatacatggtccggtacccgacgtaatacagcccgggttgcttcagcaataccgggtttaatacgattgacgctgtccactttaaattcatcggccaggaacgcgataacgtcgcgacttgtctgccataagacccgggctgattccgtattccagctcaggggagcgagggatgacggtgttaacttcttacggaaatgagcgacggtatcggcaagcatccggctgcattcgaattcactgagatgctcgcaaaccatgcacccgtgtaatccttcagaggaccatactgaccgggagatcaggcctgataccggcgcccccatgatgccaaaaggaatgagccagtcatcatcactggctgcaagccaggagcagccacagggatcggccaggacaaccagtcgcgggctgctcaggatagcccgggcgatctttcagtgcgcgtacaagctctccggtaattgcgcctttacctgtccatccgtcaacaaagacaataccgctggtaccatgccgctcttcaatgacgtcgagggctgcaccgtcaattccacgatcccggataatgctgataccgtaatgccatgaggttttccccatgtcacgcagggcctggtgcagcataacgccgagcggaacgccagccctgacaagactggccagtacaatgggctcatcaccgaagcgttcggccagagcaatagcgagctgtgtgacttcttttgcaagcctctctgcgcctcgatccagcgcccggtgaaacaaatcaagatgccattgtgtaggcgctggctcctggctgagcatgtccgaataatgtttcttcccggactgaatcagttcttcttttttctcaaccggcgtcatctcaatgacaaccggctttagcagaaattccacgtcaccgggctggtatgagccggtaaatgtttcatgtggctgcattttaattttctccaaaaattcgctgtgaaatggcatctgcaaactgactctgacgcgggatgccaaaccagctgcacagtttcataaaacgatgatcgctcaggctgtcgcccaaaccaattacggggaaaactcctcgttcagcccgaagtttttcaagcagccagctgactgccagccctttctcaaccggggtgggaagccaggccacgttattactgttgcggtggatgtagaagccctcggtcggaaacaccgtttctatctcatctgcaatggcattgagctcgtcaaggcgggtgctgtcgcggtgtttcatcaccatataaaccgccgtttcaccgtattcgaagttcagccttgcccaggcattgatcccttttgcgtccatcatttcagtgatcagacgctgcatcgatgtcagcttttcctggtagggagccagctggccgagcatatgggccttccactcctcgtcgggtttgccttcaggcgtgagaatgacggccccgtgcgttgtgattgcccaggagtggaaagggatccgtacgcggctgatttcttcagttccccgtgcggtaacgggtatgagttcagcctgctccaggagccagtccaccaacatggactgttcttccgtcataaagcttcgtggattcagggtgcgatcaacggcaccggtacggaatggctccagggccagctcgtccaccattttacgacgggtctgaaagagcgtgtcgtcaaggtcgctcagaacaacgggtttattcataggtaacaatctccacgacgggcgcaacctcagccagcgctttaagaagctgcgtgtcaatactttctgcgggtgtctcagtacacacaagaatgcggtcaaactgctggtgggcgacgttatagacaaaattggggatgcccagcccgtagttatccgtaaaggaaatggcggactcaatggcataaccaacggcgacaggggagcgggtggtcgatccataaaatgcctgtgctccggcagcttcgagccgttcagcaagcaggaacggctcccagacgaattccccggtcccgagaaccagaatacgttcccccttgtggacggagacctcatggccgagatcggccgcaggtgcgagcatccccagtcggccccatgactgtttcccctggatgtcccattctcctcgtgaagttacgttgactttcggcatgtccgggacaggtgcatcaggtaatggggtccatccccactgaccgcttacaagcgaaaccgaagtgacgggcaagggggtgcgctccgacagggcattgccactccagtcggtcagcgttacggcgataacctgttcaatatgttgaagcttgccggtattacgcagggcagaaagcaggttaataaaggtattaccggtggttgcctcgtcatcaatcaaaaccagcgttcgtgcgttggtaacacgacgtcttttctcttcatcatctggcagatagatcagatgatcggtggcgtggctgtgttcttccttgaactcgcaaagcaacgtgccatcaaccgggtgacgggtagaggtcagatagacagattcacgatgctggtggcgcacttcatcaaatacaccggccccaagcccaacggcggtttcggccataccgataaacagtacgggtcctgccagtgtcgaggggaactggctggcaagctgtctgtaggcctgccgcatgactgagggtggcacgggaatgtgcctgccgagtactttgctgacaaacagaaaggcgcgtttcgggttacgtctttcagcgatgtcaaacaggtcatcgagcgaaacttcaccctggtcacgggttacctgaatcgtaccgcatgagagggtacggcgataaatcatatcttcgaggatatcagacataaatacgccttaattcagaaggttagagagtgattccgggtatgcaattacatccgtaatggatctcaccgcaaccggagaaaaggtgtttttagcgctctggcgtaccatatcttcagacatcagaccgagcttaaaggcagcaaataacccaggaaggttcacaccgctgtgaagggtataacccaccccccctgacggacgcatgttggtttcaagcagcaccgggttgccattcacatcgtttcgcgtctgaacattcaccagcccgtcggccttcataacacgggcgcagtcacacgccagttcccaggcgcttccttcgtttaccagatactggatagccccttccttacggcgtcccacggctgcgagtatttcgcccttatccgcgaggatatcgacggaaaattccgggcctggcaggtacggcatcaaaacaaggggtttaaacgactcagcagctgatgctgctgcaatatactgttgcggactgaccagacgatgttcgggatgattaaagacgaccataggcgaagcactgtcatcaaagcgccagaatcccatgccatagatacccgtcaccggcttcacgcataccgggctgtcagtgaacggcggggccgcgaggtgtgtctttaattctgccagcgtattcacccgccaggatggtacgaccgggagacccttttgctccataaactgagcaaaagtaactttttcgtcagccagagttaaccagtcgacgcccgttgcaccggtagtaagggtggcaccggtcggttcaatggctgaacggtgttcttcaaaccactggctgttacggccagtatgaatatggtggatgccgtaggtctgaatggtttcctggataaactgaagacgtttttgaggatcttcaggttcagtcaaagaataatcggcaacggaaaggatttcatttctttcgttacggtgggaggcaaaaacggtaatggcaaaattatttttttgtgcaaatgattttaccccctgaataatatctcgctgggaggataaaccttccataaaccaaattttcttgttcattttttttaattatccggaacgccatgcaaatttatgattgagaagtgagtctatgagtgtctaagctacatgtcaatcataatatgattaataactcctgtggttatggagtgcgtcagtgttttttggattcctgataacacattgatatttaaattaaacatagaaaaactaacaccctgaaaaggatttctttttgtgtttttacagaaaaccacaaaaattttccttgtcagagaacttcatcatgatatgattttcttcgtcagttactaaatatacctttgattgtctcggtcattaccattttaaggaataaaacatggtttcattagttaagaaccagacggtatcactcagcaaagaatcatctgcattaagccagcttcatttcggtctcggttgggatccggttaagaaaaaaggtcttcttggaggattgtttggaggcaacgactcaatcgatctcgatgctggctgtgtattaatggacagcacaggtaaaacaattgacaccatctggttccgcaaactgaaatccacctgcggcgctgttgtgcacagtggcgataacctgaccggtgagggtgacggtgacgatgaagtgattaaggtcaacctctcccgcctgcctgcaaacgttgaatacctggcgtttacggtaaacagcttccgtggtcagtcgttcaatgacgtcgaaaacgctttctgccgcgttgtcgatcaaaccggcaaagagctggctcgctacaagctgactgagcagggctcacataccgggatcgttatttcttcgctgcgccgtaataacggcaactgggactttaccgcccttggccatgcctgtcgcggccgcacaattgacgatatgcactccgatatcgtttcagcggttattcgctaatgaacctgacgccggggggcaatgcccccgttccagcccaggagttgcgggtccggatcacctcgggcggccaggtggatgcttcggcgtttcgcctgtatgccgacgggaaggtgcagggtgatgcggacatggtgttttatggtcagccacgtaacgatgatggtaccgtcagcctggtcagtgaaggccagtactcaacctttactgtcgcgctcaaccggctgaaacctgatgtccagaaaattgcgttcaccgtgacctgtgacggtgggcagacggtgtccggtcttcgtaatctttccatcgacgtggagcaaggggctaccggcctggttagcggcagtgtcgaactgagcggccgtcaggaagcagccttaattctgggggaattttaccgtcgtaataatgactggaaattccgcttcgttgcgcaggggttcaacggtggacttaaaccgctggcagagcatttcggcgtaaatattgccgacgaaccggttcccgcagcccctactcctccggttgtaacccctccgccagttgagacaaaaatcagcctgagcaaggtatcgctgacaaaagagaagcctgcaatcagcctgaccaaacgggataacttcggtgaaatccggatcaacctgaactggcaccggggcagtagcaaatcaggctttgcaggtatgttcggctccaaaggaatcgacctggatctgggggcctttgttgagcttcaggacgggtataaatcggtcattcaggcgctcggtaatgcattcggtgattatcgcgatgaaccgtatgttcagctcaagggcgatgaccggacgggtgatgtatcagacggcgagtggctgcatatcaatggacgtgaatggaagcatatccgcgaagtgctgatttacgcctttatttatgaaggtgttcccagctgggacaagactgatggtgtagtcaccattcatgtgccggatcaaccgcccattgagacccgcctgaccgaaggtgagaaccgtcgcacattgtgcgccattgccagactcgtaaacgaaaacggcgcaattaaagtcgagcgaattaaccagtacttcaaaggccaggacgaaatggaccgggcatttggctggggatttcgctggagcgccggttctaaataacacagcaacaaaggaaacaggtatgagctttttcgacaaagttaaaggtgccattaactcaggccgtgacgaactgacccgccaggttggccgtttcaaaaacaaaaaattcatgcagggcaccgttgctgtatgtgcccgtattgccgtatcgagtgacggcgtaagttcggaagaaaagcagaaaatgatgggctttctgcgctcttcagaagagctgaaggtcttcgataccaatgaggtgattgagttcttcaataaactggtttcaagcttcgatttcgatgttgaaattggcaagggcgaaaccatgaaatacatcctggcgctgaaagatcagcctgaggccgctcagctggccttacgtgttggtattgccgttgcgaaaagtgacggtaacttcgatcaggacgagaaactggcctcccgcgagatcgctatcgcgttgggcttcgacccggctgaatttggcctctgatccacatccctaagggtaaaatatggtttccacacacatcggcttcccgactgaaacggtcattgtttttattgcgctttcagtcggtgccatctttattgacctgtttatgcaccgtgatgacaagccaatctcgctgaagagtgctgcgctctggtccgtattctgggttgtggttgcgatggcatttgccggtttcctctatatccaccacggtgctgaggttgccagtctgtttgtcacgggttatgcgctggagaaagtgctgtcggtcgataacctgttcgtcatgatggcaatcttctcctggttcgccgttccggatcgttatcgccaccgtgttctctactgggggatcattggtgccatcgtcttcaggggcatctttgtcgccatcggtacgagcctgctgagtctggggccgtacgttgaagttgtcttcgctattatcgttgcctggacggcggtcatgatgcttaaaagcggtgatgacgatgatgaaattgaggattactcccagcatctggcttaccgtatggttaaacgcttcttccctatctggccgaagctcagagggcatgccttcctgcttaaccagaaggaagtggatgctgaactggcgaaaccagaaaacagcgatgtcaccattggccgtggtaaaaaagcggcgctgtatgcgaccccgctgttcctgtgtgtggctgtggttgaactctcggacgtaatgttcgcgtttgactcggtaccggcaatcattgccgtcagtcgtgaaccgcttatcgtctatagtgccatgatgtttgctatcctgggcctgcgtactctgtattttgtccttgaggcactgaaacagtacctggttcatctggagaaggccgttatcgtgctgctgttcttcatcgcggcaaaactcggcctgaatgcgaccgatcacatctggcatcatggttacagcatcgcggcaacaaccagcctgtatgttgtactgggtgtactggcgctgggcattctcgcaagcgtcatgttcccgggcaaacctgaatctgaggaaaaggggagttaatccccttaagtgttaacctgaacaattactaatcgaagaggttattttatgagtgtttctctttccaaaggcgggaacgtctccctgagtaaagcagctccgtcaatgaaaaatgtcctggtgggccttggctgggatgcgcgttcaacagacggtcaggactttgacctggatgcttcagcattcctgctggcctcaaacggcaaagtgcgcggcgattcagatttcatcttctataacaacctgacgtcatccgacggttccgtaacgcacaccggcgataaccgcaccggtgagggcgatggtgatgatgaatcgctgaaaattaaactggacgccgtcccgtctgaagttgacaagatcatcttcgttgtgaccatccacgatgctcaggctcgtcgccagagctttggtcaggtatccggtgcgtttattcgtctggttaatgacgataaccagactgaagtcgctcgctacgatctgaccgaagatgcgtccactgagactgccaaggcacacagggatagccgagatagmaaaaaaaakgkgwsccctttttttttttgag

SEQ ID NO: 634 - DNA, 1067 bp, Escherichia coli
cgagccatttcagttcatgggctcgccgtgggattatttccgaccgtctggcaactgcgattctgagctgcgcgggtaagtcttctgcgtttgttaatggtactgccggggtggttgttccagacagaccggttaccacctcagagtctgtaattttttacgatgccaaaaaagctacagacaatcagctgaaaccctatggctgggacggtgtgtatggcaggcgcacactggttgatgacagcggcaataaagctctgcgaattgagaaaaataacagcgcgaaatcctggtcaatgtactgtgatattgctgcagacaaggcaaaacttttactggaaaaaggcggggaaattgctgtccggtttaaaatccccgaaaacgtcaatcttgagacaaccagaaacaagtatgcctttggtttgtactggcgaatagcggaatggccgggtgagggtggtgaaggccatctgagttctttctttgtccagacagataaagccagtattaatgttgcataccatcatacagttaatcaacaaaaagaacttggcacgtttggcgcattcgaccatgactggcatacgcttgcatttaaatttaagggcagtaacagcattaatgttactccggtgctcgatggtgtggatggacaggcgtttgacctggtgaaatgggccaatactgctaatggactcaacaggtttgtcattacggatattacaggtagtgcagaaacctaccctgtacttattgatacggtggaagttaaagcaaacaaagctggagcagccgcataattgctaaaaaaagccgccagcggcaggaatggaagctggcggaggtaatcccaatggagaatgtaaagaaaagatgctttcgtacattggtttttaaatgaaaacaattctcattgtcaaccataacggtaagaaattatgacatttattcatcaggtgatgctgtacttctgtacggcggtctgtgtgctgtatcttctttcgggtgggtacagggctgtgcgcgatttctggtgcaggcagattgataaaagggccgctgagaaa

SEQ ID NO: 635 - DNA, 4711 bp, Escherichia coli
atcaggtgctggtgtttacgctgcaatcattgaccgatctgatgtttaattcagtgtttgccagcgtaaataatctctaccatcgaccacagcaaaaaagcagatcgatcgccagcatgcgaggatctacaacgcggtgttgcagcggctgccgcacgtcgcccagcgcgcagcacgcgatcatgtgcggaccgtgaaaaagaatctccacgatatcgagctggaaggccaccatttgattcgctcggcggtgccgctggagatgaacctgagttagctggtattaaatctgcttttcatacaatcggtaacgcttgtacggctccgccccaatgcgttccagcatgttattcatgcctgtattggtttcgaggatccatgacatctccagcgcatcgatcttccggcgggcaaacggatcgcgtaaggcttcaatcaataacagcgcaatcaccgggccgatgcggctgaactgatactcgtcgcgcacgcccatcagcggtactcgcgcagttcgcacaccgctgactttcaaacgccacagcaattttgcccagccgaagggaaagagcgatccgttcagatcggcaatcgcctcgttgatgttcggcaagccgacaataaacgcgcagggtgcagaatcaatctcagcgatgtagatcatatcgtccggcaccagatatttaagttgatcgcccatggtcgcgaattcatgttcggtaaacggcacaaatccccagttgtgctgccagccagagttgaaaatctcacgcaggatctgcatctcttcggcaaaccgctgacgattgatgcagcgaatggtcacctttttgcgcacctgatccatcagttttttagcgccggagagaaagtgagatcggttcgctgcatccaccacgccagtaaatcaatgcctttgtgataacccagttgttcaatatgcgcggcataccacggtttgccgtgtggcatcatcgcacagggtggtgtgtcaaaaccttcaatcagtaatccgctttcctgattgatattcaggctgaaaggaccgctgatcttacttgcaccttgtgacttcaaccacgcttccgctgcgccaaacaacgcggcaaaaacctgcggatcatcaatggcgtcaatcatgccgaaatgaccggtatcttcaccgtaacgctcacggtgcaaggtatctatttgcgcggtaatacgcccaactatctgccccgctttttttgccacccacgcctgccagatgatatggtccgtccccggatttttcgcagacaaatgctcgttgcgttctatgaataaagggggtatccagtttggatcgtcgggataaagtgatgacggaaaagcgataaatgccttaaggtcatttttattaattactttttcaattttaatcatcagcagatcgcattccatatctctgtggataacaaataattaacggtgaaaaacaggttgcaacagcaacgaacgacaccttaataatcaacccaatgaatacaaacaaagaataaatagtatttattaatgattatgataaggttagagactacacagaagcgcctcaatgccttttgtcgatttaaggcgaccggacaaggcttcttcttaatatattcataaattaaatatcattcacaataaaaacaaaaaacttaaactcattatttaaatcaatgttcattttcacaccgatgaaaatactatctcatttatcttttatgcctatataatccaccgcattattgtcattttatttttgatatccaattttttcgtggtgtatatgtctaataaaatctttacgcattccctacctatgcgctatgccgattttccaacgctggttgatgctttggactacgccgctctgagtagcgccggaatgaatttttatgacagacgttgccaacttgaagatcaactggaatatcagacgttaaaaacgcgtgccgaagctggtgcgaagcggttgttatcgctgaacctgaaaaaaggcgaacgcgtggcgctgattgccgaaacgagtagcgggtttgtagaggctttttttgcctgtcagtatgctggcttagtcgccgtcccgttggcgattccaatgggcgtcggtcagcgggattcctggagcgccaaactccagggtttactggcaagttgccagcccgcagctattatcactggtgatgagtggttgccactggtcaatgccgcgacgcataacaaccccgaattacatgttttaagccacgcctggtttaaggcattaccggaagccgatgttgcgctccagcgtccagttccgaacgatatcgcctacctccagtacacctccggcagcacccgttttccccgtggcgtcattatcacccatcgcgaagtgatggctaatctacgtgctataagccacgatggcattaaattacgccctggcgaccgctgcgtctcctggctgcctttctaccatgatatgggactggtcggctttctcctgacccccgtcgccacgcaactttcagtagattatttgcgcactcaggattttgccatgcgtcctttgcaatggcttaaattgatcagtaaaaatcgcggcaccgtttccgttgcgccgccgtttggctatgaattgtgccaacgccgcgtgaatgaaaaagatctcgctgaactggatctttcctgctggcgcgtcgctggtattggtgctgagccgatctccgcagaacaactccatcaattcgctgaatgtttccgtcaggttaactttgacgataaaacgttcatgccgtgctacggactggcagaaaatgcgctggctgtcagcttctctgatgaaggctctggggttgtggttaacgaagtggatcgcgacatcctagaatatcagggcaaagccgtcgcgccgggtgctgaaacacgcgccgtatcgactttcgtcaactgcggcaaagcgttgccggaacatggcattgaaatccgcaatgaagcaggtatgccggtcgcggaacgtgtggtaggccatatttgcatctccggccccagcctgatgagcggttactttggcgaccaggtttcgcaagacgagattgccgcgacgggctggttagacaccggcgacctcggttatctgctggacggttatctgtatgtcaccggacgtattaaagatctgattattattcgtggccgtaatatctggccgcaggatattgaatatattgcggaacaagaaccggaaattcattctggcgatgcgattgcttttgttaccgcccaggaaaaaatcattttgcagatccagtgtcggatcagcgacgaagaacgtcgcgggcagcttatccacgcgctggcagcacggatccaaagcgaatttggcgtaacagcggctatcgatctgttgccgccccacagtattccccgaacatcctccggcaagcctgcccgtgcggaagcgaaaaaacgttatcagaaggcttatgctgcaagccttcatgtgcaggaatccctggcatgaatcaaactgtcgcggtgacgggcgctaccgggtttatcggtaaatatattatcgataacctgctcgcccgcggctttcacgttcgcgcattgacgcgtactgcccgcgctcacgtcaatgataatctcacgtgggtgcgcggttcgctggaagatactcattcacttagcaagctggttgccggagccagcgcagtggtccattgcgccgggcaagtgcgcgggcacaaagaagagattttcacccgctgtaacgttgacggcagcctgcgcctgatgcaagcagcaaaagagagctgcttttgccaacgttttctgtttatctcttcgctggcggcgcgccatcccgagctctcctggtacgcaaattccaaacacatcgccgaacaacggctgactgcaatggctgacgaaattacgctgggcgtttttcgcccgacagccgtgtatggtcccggcgataaagagttaaaaccgctgtttgactggatgctgcgcggcctgctgccacgacttggtgcaccagatacacagctctctttcctgcacgtcaccgattttgcgcaagcagtgggtcagtggttaagcgccgaaactgtacagacgcaaacctatgaattatgcgatggcgtcgctggcggctatgactggcaacgcatacagcaacttgccgccaacgtccgttgcggttccgtgcgaatggttggtattcctctgccggtactcacctgccttgcggatatcagtaccgcgttgagtcgcctggcaggtaaagaacctatgctgacccgctcgaaaattcgtgaattaacccacgccgactggtcggcaagtaataaccgtatttctgaagatattaattggtttcccgggattagcctggaacacgcattacgcaacgggctattttgattgtcttgtttaaaggtgtgttaacgtttctatggtaaatcgtgaaatagtaatggattacatcctttcctgtttacaggatttggtcgaaaacggtgtggaaattaagcccgacagcgatctcgtcaacgatcttggcctggagtcgatcaaagtgatggatctcttaatgatgctggaagacagattcgatatttccattcctattaatattctgctggatgtcaaaccctgcgcaattaatggaaactctacttccatggctggagaataaataatgggc

SEQ ID NO: 636 - DNA, 6908 bp, Escherichia coli
tccggaatttccgggaatttggccttccaaggaaccggttaaccggttaaggccttggttaaccaattccggaattcggaattggcttccaaggaacgtyaacggtaaggctttctgtcaaaaaatgaacaatttcacaaacgatcttttatgctgcttttttcttcttttccagtagaagagatcgccgaatttttttaaacgatctaatatcccgcacacaacatcaaatacagaataatattctgtcttatcaaatataacgatctattcaactgcttatcttcgctcttgccacagatacatccttatgtgatatattttccagccattaatcctgtttgcaggagttgtcggttttcgcccgcctcgaaaccgtccacaaggcttacaagagtgcgtaaatcatgtgcctgtcagaactgcaggccaggctgaacgtgggtcagccgctgtttccgacacatgctttatgtattcgccgttcacaacaacatcgaagcccccctgcggggatcgattttcgcggagcgttccggattttgaatatcagtgaattacatcaacgcaactggtatctggcacagtacatccctgccggcaaaaaccgcgaacatctcttttcctggctttccgaacaacacgtccttccctggacacccctgatactgaaaaaggtccgccgcacggataaagtctgtggttaccgtcgacatatacacgccgtgtttcccggttactttttcctgaaagcagaccccgaaagccacagcttcactcaccttcgccgtcacagtgcctttctggacttcgtgaaaatggccggtgaaatcaaaaccgtcagggaggatatcgttcagtctttgatgaaagtgtacccggatcctgcgctcaatccggcagccagggaggagctggatgctgcctccaccctctggctgacaaaagcgcgttaccagtacctcctccggcttgatgcacagcctctgccggagtcgaggatcgccctgctcctgcacctggtatctgatgacggagcgttgacatgaaaattgctgtcttaatttgacgacttttcccggcctttatggccgggatttttttcccttctgtttccacaatgcccggcaccggtgacacctgagggtgtacggagagcggctgtcgggcattttttcaggacgcctttatgaccattctatcccaggaaaaccctgtcattctgttactggagaatatgctcgaagcactctccaccgccccggacaacataaacaacgaacggcgtcgccggcgttacctgctgaactggcttgacactgcccgtcagatgcgcgagttcagaggaatggctgaagagttcactaccctgcgaaaactgctggccaccaattcagacataccggtagcaaacaccctgaaatcactgctggaaagtggcaataacgcagcattatacgacctgtaccgcttccgctcggctcttgccacgtgcaggagtctgggatggcagattggcacgtgcgcatggaatgaccagttactgagtgagacactttcccgcgcacagaccgggaaacgtcatatcctgcagctgaacagcaccggggacaccttttccaccacgggcagaatgatcagaccggtggcattttcattaatccatccggccaccatcaacacgtctgaggttgaagagatattccgggatgaaggttttatgctcgcacacgggcgcgaatgcagtctgaacggcagcggcagaaatatgctgtcacgcattcttcatgtgggccattcaggtttagcggaagaggaatggggcatggacaacagtctgcttttacactgaaataccgggacagccacaacggcagccactctccgctgactttttttcgcaaatcgcggtttgctgatgtggatgtcccatttttgattatccgtcctctccggttgtcataaagcgcattccggcgtgaggcttctgttgttatcatcccctcctgcagacatccccttgtcttctgatgactgacgatatgcttcttctgacaattaaagaagcggaagcttcacgccataatgttgtttgactgacctgccacaggaggaaaaatgacactgacgttacttaccgcgtataacgcaccctatctggcagccctgacttttgttctgcttactggtatcgctgaacttatcgccctgctctgcggacactccctctcttcagctatggatacacctgatttaccggagggtctgacaggagaggcgctggactggctgaacatcggacggatcccccctgctgatcgtcctctgtatgctggcaggtttttttggtatatccggcattctcctgcagggtcttattattcatctgctgcaggctcctgctccgaacattctccttgcaccactttgcctgctgctgacatgtcctctcgtacaccgcaccggcagactgattgccccctggttaccccgtgatgaaacaacggcgctcaccgaggaggcattcatcggctgtatggccaccatcactggttatcacgcagtggcgggttccccctgtgaaggtcgcttcacagaccgcttcgggcaggttcattacctgttgctggagccggaggccgggaaagaattcagacgaggagacaaagtgattattgtctgccgtctttccggttcccgctggctgggcgaactgaatccctggccggatgttctttaatcccgacatatacagaggttctcactatgtttaatcttccgggatggttgtttaccgttatagcgctggtcctcaccctgttcgttatcgggctgatatttgcccgcctgtaccgccgggcatcggcagagcaggcctttgtccgcacaggtctgggaggccaaaaagtggtaatgagtggcggtgcaattgttatgcccatttttcacgaaacaattcccgtcaacatgaacaccctgaagctggaagtcagtcgtgcagcggctgaaagtctcataacccgcgaccgcatgcgtgttgatgttgccgttgccttttttcttcgggtaaaaccatcagccgaaggaatatccactgcagcccagacgctgggacaacgcacgctcacacctgaagatctgcgtagtctggtcgaggataaatttgttgatgccctacgggccacggcggccagaatgagcatgcaggatttacaggatgcccgcgagaactttgttcagggtgtgcagaacaccgttgcggaagacttatccaaaaacggtctggagcttgaaagtgtgtcgctgacaagtttcaaccagactgcacgggtacattttaatcctgacaatgcctttgatgctgaaggcctgacccttctgacccaggaaacagaacgtcgtcgtcgcgaacgcaacgaagttgagcaggatgttgaagtggccatcagggaaaaaaaccgggatgcactctcccgacgtctggagattgaacagcaggaagccttcatgactctggagcaacaacaacgggtaaaaacccgtacggcagagcagagtgccagtattgctgctattgaagctgaacgacgtcgtgaagcagaatccgcgcgaattctggctgaacgtaagatagaggaagccgaaatcgaacgacagcagatagtgcgtacccgccaagtcgaagccgaacgggaagtggccatacgggaaattgagcaacagcaggcaaccgaaatcgccagccaggccagagccattgccgtggcggcaaaatcggaagagcagtcacaggcagaagcccgggcaagtaaagcactggctgaggccgtacaggcccagcaggatgtggaaaccacccgccagactgcggaggccgaccgtaccaaacaggttgccctgattgctgctgctcaggaagctgaaacgaaagcggttgaactgacggttcgcgcacaggctgaaaaagaagcagccgaactccaggcagcagcaattattgaactggcggaggccacccgtcagaaaggtctggcagaagcagaagcacagcgcgcactgaacgatgccattaacgtgctttcggatgagcagaccagcctccgcttccgtcttgccctgctggatgcattacctgccgtcatagagaagtccacagaaccaatgaaatccattgacggtattaaaatcattcaggtggatggtctgaatggcggtgttacccgcggtaaaacagcaacaaccgacataagtggcggaaatctcgctgaacaggcagtaaccgccgctctggcttaccgtacacaggctccgctcatcgactccctgctgaaagaggtgggtttatccggtgaaggacttacagccctgacacgtccactggtcatgcctgccccggaaaaggttccggatgtcagcgaaccggtaaccgctccggataactcagaaccacaacaggtttaatccccgtgccggaatttttccggcatctttttcacaaagaatgccctcacgggatattctggtttaaaagaggattgaaaatgtccgcagaaaaattcagagttgtcatatacaccaatacatgtgaaaagaaagtcagttatattcctgcaacagaagatataaacatcgctataatgccatttcagacggcagacaatggcttaattattgtgtgtcagaactcccgtataatacgacgcaaagagcgtattcccggaagcagctgtgaatggaaagatgtgacattagcaccaaaatccagaaaccgcgttcagttatagcctgacagcctgcttttcatcccccataaaagggggtaaaaattaaatatttcacaaccgcgatatttttcaggaatgcagattattttctgttatgaccaattgagaaacaggcatgagaacaatcacaacacgtgaacaattattaattaatgggagagtccacgaaagaatcgccacacatatagttacaggagctcatgggtatgaaacgctttgcacaaatggctataacgtcagatacaacaaggcgcagcaactggttgaaagctgcgaaaaaatagctgaaggtaaactacctgttacctgtcctgtctgtttcaccatatggcaggatgtacacagattcacccacgttgactttgacacacaatcggggaaaagtgattttattgatacctgccattcggagatcataaccggacatgtttcaataacaggcaagaaataaaataatgttccagttctgaaaaacaatatcacttgttttctggaaactatcatttgcagcaggacgtttttctttttatatttccggaaccggaatgttttagttttcataatcaccccgaacatgaatgttcatcatcaatatcctgatgaaattatatttatctgaagacctgttaccagccacctgtcttataccgtaacccgatacataccggatttattctatgaaaaagaaatcacttacactccttctgccgtcattactcagcggctgtacggcatttaatgccacgcctgttcctgacaccacgcctccggctctggtgttcgtcgacggacaaattcgcgaaagcgctgccattatcgcccatacgcaaaaacgtctgcttccgccaccggtgacccgccctgtgacgccgccccgcccgacaacaacagcgacgcccacaaccgcagtcagcagccagagtaccgcactgcctccccgtccgctccttcaggccacacagctgcccgcactggttatgaccggtaaacccggtcagtcatccgtcgtttatttacgtgaggcacatcagcgctccgtcagtgactggatacgccagttgctaccacccggctggcagttccggcaacagaacgctgccataccggcactgaacaaacgcctccccgtctggtccgttaatgaccagtggcaccgggcactgaatgcgctgctggccggccagcagctttacggacatatggactggaacaggaaaatactgactgtcacgacctctgcaacaccgccggtcgacgtcacggcaccgcagggttcacagaaagctgctgatacaccgcgtaatccgttcaggggcagcaccgcaacgccggcaggcccgacaccagtgacacctgccgtcagcgtttcccgggctcagaccaccaccgggacatccggaactccagagagcagaacaaccacgccagccccggtggccacgaaaccggtagtgccaccacagcagaaggtcataccgccacggcagtggaaaatggaaaaggggaccaccctgaaagacggactggcccgctggacatcatccgaaaaatgcccgcacggcacatggacactgcgctgggaaacacctgtcaactacagcatcgatgcccctctggttttcaccggcagtttccgccaggcgctggagcagctctttgcactctataccccggctgaaaaaccgctgtatgcccggaccagcactgcacaatgcctgctccgtgtgacagaccgcccgcaggaataacctatgggatgggttacgggtttcattatggtcattatggccattggtaatttctggttccacagtcacctcagccgtactgtgcaccatcagcagaccgctgaaatcacacagcaggctgcagactttattcgttatatgaatgccatcaacgattacctgtatcagcaccctgaacgacgtgctgccggtggtcagctcacgtcagcacagctcggtctgcccgccacgaaaaacgtcagccacctcatcagtcagcagcgcgtttttgtctgggcaaaagaaaacccggccttatgggtgccctcctggaacaaagtggtgattcggccctgcttgccagagtggaaaacggtcgcctcctggacacccgtgg

SEQ ID NO: 637 - DNA, 5197 bp, Escherichia coli
tttgctaaccattagcaaaattagcaggggtattatctatgtctggcaaaagaaaaacatgtaacactttgatttgtctgtttattttgtttttcaattaaaatagtatgtttttgtgatccgcatctaattatttcgtactcctggtgctatcccattcatggatagatgtgcatactgcctccattaaactgatggattgcatgttcattgcatctgtaaaatatgccagttttgacattaatacataatttgtaattcggtgtaagctcttgtctggtgaattctgttagtagcttatacttcttgtccatttttacaggttatgcaagtgtgattatcctgattactggtcacttagtatatactgagtcaacaaaacaaatgagtattaactgaagtttttatatagcgattatttttcttgttgggttagttagttcccagagaactacatatggtttcatataccatgaataattaaggttaattagtattattaatgggggtggtggtattgtgtggtggtatctgtggtacaacttacctctttttatcataatgtcactcctctttatgctgagtattctgtatgtgcgtaatgcgtctatccccatatgctacagtgtggtggtgtatgggatttagttatgtgtaaattatgttactacactcatagagtaatattgagaaagttaatccgctgaatgtatgtctggtttgcatttaacactggttacgtaccagaacactattagagtatattgtctttagttcgtacgttatagctccgttacactttataagtatgggtaaatattatcttttttgtatgaaacaatcttcttatggtgtgtagcgtatggtctgtatgtcattattcttttatgctactgattaaatatctgtaggctgctctctgcagagtcgctgtttttacttaatggtacgccaatattaatggcgatgttgtctgtggctattctatagctgacttttgtgaatgtcagattacttcctgtaaggaatttaatggtactttcttaaactcaatcatatgaggtgtgttttttttactgtaattcttactggtactcagtttaagagagtcttactgtattctgaatcattaccctattactgtaatgaggtaatacgaaacagttttatcaggttgtctgtgctgctggttacctcgtttattaatgccgcggtacggcgtttctgtactctcagcatttatatgattccactttcctgtcagttttataaagtaaggactataaaatgtataatgctaatcccaattacgaaatggatttcatgattctgaaagacgtgaatgaacacatggaaggtctgtttcaacgtttttctaaactgttacctttcagaattgattttgcctacaggaaagacacgcccagtttcggtcattcctgtaagcacagtatgtgtatggaaatataccgtttactttgcgaaacccaatcgatgttggcgggatattactgggtaatggaatatacaccagacaaagggcttcatattcattttgtcggctacctggatgggcaacgtcacaagaactcttatcagatatccaggcaactgggagatatctggaggcggatcacggaaggggagggttactttcacctttgccgggctaaagacaaatacccggtgcgtatcgatcacgtgatgcactatagtgataagtccgcggtagacaacttacgttacgcccttagctatctggctaaacaggatcagaaagaacacggtattattctgggccgtagcaggcttcccgaaaaaagcaaccggggccgaccacgacataactgaattacagttgtattaggtattagaattaagtttctgtaagttgttgggaggtgcttgagttaataggcagaagagggcggggcgctttgtcatcagtgtaggggacccgaatttctgcgtggtgcctcagtggatcggatacaggtaacgaatatggttcataaatctgacagtgatgaattagctgcattgagggcagaaaatgcccgtctggtctcattacttgaagctcatgggattgaatggcgacgtaaaccgccgatctctgtgcagcgcgtttctgtattatccaccaatgagaaggttgcattatttcgtcggttgtttcgcgggcgtgatgatgtatgggcacttagatgggaaagtaaaaccagcggcaaatcagggtactctcctgcctgcgctaacgaatggcaggcgagaatatgcggtaagccccggataaaatgtggggactgcgctcaccgtcagttgattcctgtatctgatctcgtcatctactaccatctggcaggtacccatactgccgggatgtatccgttgctggaagatgattcctgttattttctggctgttgattttgatgaagctgaatggcagaaggatgcatccgcattcatgcgatcctgtgatgagctgggtgtacccgctgcgctggaaatatcccgttcacgtcagggagcacatgtctggatattttttgcttcacgagtttcggcccgcgaagctcgccgtctggggactgctattattagttatacgtgtaatcgaactcgacagctgcgattgggttcttatgaccgattatttcctaatcaggatacgatgccaaaagggggatttggtaatctcatagcattacctctgcaaaaaagaccgcgtgaatcggggggaagtgtttttgttgatatgaatttccagccttattctgatcaatgggcttttcttgcatcggtgatcccgatgaatgtgcagaatattgaaccgacgatattacgggctacaggaagtatccatcctctggatgtgaactttatcaacgaagaagacctgggtacgccatgggaagggaaaaaatcatcaggaaacagactgaatatttctattgcagaaccgctgaaaatcacgctggcaaaccagatctatttcgaaaaagcgcaattacctcaggtgctgattaaccgacttattcggctggcagcatttccgaaccctgagttttataaggctcaggcaatgcgtatgtcagtctggaataagccccgtgttataggttgtgcggagaattacccgcaacacattgcgttgccccagggatgtctggacagcgtattatctttccttagggacaacaatattgctgcagaattaatcgataaacgatttgccgggacggaatgtaatgccgtttttatgggaaacctcagagcggagcaggaagaggccgtttcggcattactccgttatgacactggtgtgctttgtgcgccaacggcttttggtaagacagttaccgcagcggcagtgattgccagacggaaagtgaatacactgatactggtacacaggactgaattgctgaagcagtggcaggagcgtctcgcggtgtttctgcaggttggtgacaatattggtattatcgggggaggtaaacataaaccctgtggcaatattgatattgcggtggtgcagtccatatccagacacggagaagttgaacctctggtcaggaattatgggcaaatcattgtggatgagtgccatcatattggcgcggtttcattttctgcgattctgaaggaaacgaatgccagatatctgcttggcctgacggcaacaccaatccgacgggatggtctgcatcccattatttttatgtactgtggtgccattcgccatacagcggtccgcccgaaggaaagcccacataatctggaggtactgacccgttcccgttttacatctggtcatttaccatcggatgcgagaatccaggatattttcagagaaattgctctggatcatgacagaacggtggcgatagctgaagaagccatgaaagctttcgggcaggggcgaaaagttctggtactgactgaacgtacagatcatctggatgagatagcatcagtgatgaattcactgaaattgtccccctttattctccatggacgactatcgaaaaaaaagcgtgcgatgctgatatccgggctgaatgctcttcctcctgattctccccgtattttgttgtcaacaggcagacttattggtgagggatttgaccaccctccgctggatacgctgattcttgccatgcctgtgtcatggaaagggacattacagcagtatgcgggacgtctacacagagagcataccggtaaaagcgatgtcaggatcattgattttgtggataccgcgtatccagtgctgctcagaatgtgggataaacgccagcggggttataaggcgatggggtacaggattgtggctgatggtgaagggctttcattttaaggagtactttaccctttttaaataatttgagctccccgggttgttcgggcaacaaagagtcccagtatacaggcttcaggaatatgttgtagtatcaggcttttcatcgctttaaaatggctaccggcagtaagaacgtcatcaaaaataacaatccagggcctgcatccctccagtaattgttcattcagttggtagtttgccataatcgcttctggtgagggccggtttgttggtaagcgtgcagcaagaaccgtattgacggggatgtgttattcagtcggcagtgctacgcgccaggggagcagttcgccgacccggtttatcggccagtcggctatgacgtcaaggacatagcggaggtagctttctggctccactccgttcagtttgcacgtcccgatcaggctgtacagtagcgctccccgctctcctccatgatccgaaccgaagaacaggtagtttttgcggcccagactgaccatccgcaacgcattttcagcgatgttattgtccgcctcagcccagccatcatctgcatagtacgtcagcgccggccactggttcagggcgtatgcgaacgctttcgccagttctgagtgtcgcgacagggttttcatcttttcacgcagccagctttccagggatttcagcagcggtttcgttttcaactgacgttcggcaaggcgctgttccgccgtcattccccttatctctgcctcgatggcgtacagttcgccgatccgtttcagcgcttcctccgtcagggctgacggggtgcgaacgtgcacatcgtggattttacggcgggcgtgagcccaacaggcggctt

SEQ ID NO: 638 - DNA, 5393 bp, Escherichia coli
tgctaatggttagcaaaattagcaggtatataaagattattggcccaaaacacactcagatgaattcacgacagctcaggagggttattcctgatgtcatcttcacaaataatggttaacgcatcatatatcattctgcgtctgttcctgttttcggccttatcgccatacaacatcatcacatttttaatttcatcaaccggtgatttcacatagtgaactaatacaccaagcttctcaacacattgcagtaaagtatatttcttactgcctgtgaaaagccctatcatagtttctttacgttcgcgactggataatactttgttttccataatgacttcagccagcgtcttaccatcataaacatactctttatctatcagaatatttatcttatccagcaccttctctacgtcatcaagcaaacctgtaatatatgggggcgcaatatatggtttcgtactgatcttttcaagcatacaattatacatcttaataacacgcatcagggtaaaattgttcgcatcatactgtatttcaccctccttatatacaggatcaataagtggtattgtttcaataaatgcatcctgataggcttttacatggtcaagccaataaaacaacgagccatactttatattttttctatttactttaacctccagtgctgtccgaagcaacgataatgcccccctgacatatcctgaaggtaattcaccaaacaatccttttctttccatgtcatcataatgctgcagcacatcattaattttatttttccttatcagacaaatgtacaccgcaagtgtttcgtagcagctggtcacatgaacagcctcattctgcaactgcccaaaatagcttataatctttttcagatatgcgtcatcacaaccattcttatcattaatattaaatacaagatctttcagacggaaaatatattcctgagatttatcatcaagtgaaacactataacgagacaatgttccttctgcactgttttcaaacttataaaatatttccagtaatttttttgcataaggcgttgtatcaaagctggtaaagtcataaagatattgcgcagcgtaaccatacaaaccatgaatccagagtccttctctcaccaacactctgagataatatgcaaggtttttaagtatcttcgtctttcgttgtatatcaagtaagacacttaatgaataaaatgcattatagaatttatcaatattcctgagcactttctccagttcatccttatccagcttcttctcccggtaatcctttttatattcatttttgatagccatgatatattgttgcatcaggctcttgcttttcccgttatccttccgtatagttcctgtatatttccccagagcatacagctttccattttcatgaaaatcttccttgttgaatcccagttcagccagatattcccgaagataacgtttaacagcagcttcatcgctttctgtatcagcgtgatcaagacaaggacaatacgatttctgtaaaaaattataaatatgataataaaaagcagagtcattctctggtctgtatgtattatacatatctacaacaagaaaaataaccccaaaagtgcgcagacaatagctgcgaaggaattcaggttttagtgtggaatgcactggataagaattcatcatgtaataaaaatgttcatatcgggcatatatgatccgccgtcgctcctgactgaataccccttcagcatcaataatacgactgatctcattataacgttgatcccagaatttttgatgcatttcaaaattggtactcttccgcttgtgtgccggattctcgccttccttaaacaaccccaaaacagtacaaatatcatacaacagatttgtaaatgtgcgcatatgctgtgctctccggttggtttgcattttatcgcagaggacattctgagcttaacgtatcaaactgacacaacgacatgcaatgcatatggagaacaatatgtcaaatcaaaccggacagctttacacgccttcacgcatcctgcgtatggctgaacttacccgactgctgggtatatcaagatctactatttacgtgaaaataaatccggcctcgaaataccacgaccctacctttcccaaaccaataaggcttggtagtgcatccgtaggctggcgggcatctgccatcgatgagtggctgatgttacatacggcaccagcctggtctgaacctgaaaacaaacgaaaggaacttaatgatgacgacaaaactatcactccctgaacttgacacaactaaactgcctgacaggtaccaggcattacttgatgaaatgcatgaagaaacaggaatacgccgtgaaatacttctgtctgttatgctgacggtcaaggctgcctcggtccaggatacgcatgaagttgaactttccggagggcaacgtacaagtcttcagatatttatgtgtctttcatcagcatcaggcagtggaaaaacctctgcctgcgcaaaattaatcgctcctgttcatgaaacagaagaagaactacatcaggcatatatcgacgataaaaaaaactatgaccgaatgatggaaatgtggacaacagataaaaaaatcctggagcggagatataaaaaggaaattgaaagatccccggaaaatgctgctgctgcacgagcagcacttgaaaagtgtatagcaaataaacccgaacctcccgtacaacaggttctcatcgtgaatgacgcgacaccagaagggatagctttgaaactcagccagtcaccctctcttctgttgctgtctgatgaaggaggtactattctggataagcgtttcgaacgcaaatcggcactgtacaacacattatggagtgggcaaccagtcaacgttgaacgggcatccagacccggattccggctgaatgatgtccgtctcactatacttatactgactcaaccggtaatatttaataagttttttactctcactggcgatcagatccggggcaatggctttctggcccggttgctattttgcgaacccggagcaattaaaataatgacgacagaaccgcatactgccactcctgttgtgacgcaacaatgtgcaagctgttttcgtaagaaaagttttggcagtcagatcagagactctctgagagcatccagagaaagacgtgcaaaaagtaaagagcgcatctgcatgacattatcaaatgcagcatcccgcgcactggagcgctttcacaaagaaaatatggatactgtcagacagaatcctcatatgggtacttttgaagacattattgtcagaaaaagagagcaggttgtcaggatagccgcaattctggaactggagaaagatccagactcgacagtaataacgctggaaagtactaatagcgccatttatctcattgaattttatttcaagcatcttatatataaacttgaatcccttcgggaaatatccccggctgagaaacttgataaatggcttcagaaaagaattatcacaacagcaggttacatattccagaaaagttatattttacaatatgccccatatgccctcaggaaaaaatgtgttctggatgaagcacttgacatactggcggaacaaaggaaaataaggattgatgataacctggttgtttatataggaaacacgattacaccatccgaactggcaaaaaaactaaatattcctgcattcgatgccggagttttcatttgtgatcatcaaaacatactgaagtatcaccgaaacagactatagatactatcggacaaaaaataaattatcacaagtgtattattcgttataataatgaataatcgttatctgagtgcaatgccaggttttcattacgaactggcattgcatttatttttcaaaaaagaaagcagtaaccatttggctactctgagtatgccagtccatgaaactaagcgaattccttagtgtttttagcaagttgagacatcacataatccgcccatgcctgcatcatcggtacacgctgctccagtagatcagtacgatgatatgccgcctcaaccttatttttcagcgtatgagcgagcgccctttccgccagatcccgcgaatacccctgttcactacaccagtccctgaatgttgagcgaaaaccatgtgccgtggcaactcgccccggtatatcactgatggctttctttttacgcagaaaactcgtcaacaccatatctgaaaggatctgctgctttctgggagaaggaaacactagttcatcatgcaaaccacgtatattttccagaatgtgaatggcctgccgggataaaggaacacgatgctgtatcctggctttcattctttctgcgggtatagtccatatccgcttatgaaaatcaatttcagcccagcgcattcccctggcttcgcccgagcgggttgctgtaagtatcaccattaataacagtgcccgggtaacattataaggttcatctgtatacacactggtcgccacaaaaagcggtaactgcctccagggcattgcgggttggtgttcatcacgtcctcttgtctgatgaggaagcaaatggtcaaccacatcaacagggtttgccacacaaaaaccgtgcgcccatccccactgcataacaacatgaatgcgctgtttaacccggcttgccgtttctgacaaggttaaccagactggacgcagtgtttctgccacgtccgcagccgtaatcgaatccagcgtttttgctcccagttgaggaaacgcgtaattttcaagcgtcgataaccactgcctgacatgctttggattttcccatcccggtgacaattcagcatgtacacgcctggctgcatcggcaaatgttgggataacaactttttcagcttcagcctttttaatctccagtgggtcatcacctgcagcaagttgctctcgcattatccgggcagcacgtgcagcttcagcaatactgacctcaggataagttcccaatccagcattacgccttttttgtgtcaccggacttacataacgaaaaacccatttaccccgcccttttactgaagaaggatgaagagtcagtcctgtaattcccccatggggcaatggtttgtcatcaggtttgatatgccttgctttagtatccgtcaatactgccatacgctaattcctgttactctggtatgccatccagtatgccattagtctctcgcttcactaagaatacattagataatatcggacagcaaaaagtgtaatacattgtttataatgaaattatataacacccccggattaagtcagatttatttcaggcggtccccctcaccgccatatttaaagaagagctcgtacgaaagtacgggctttttttcg

SEQ ID NO: 639 - DNA, 8735 bp, Escherichia coli
tgatatacatctgattaagatataatggattataaattactcaaaggtgaacaaatatcttcgccttttctcgtagaaagagacttgaaacttataatacatctatataaatgtgatttaaatcacggtttgcagtaaaagcaattggtataattcgttggtattactattattttatctattgcacgaactattttacaacaataaaaaagatatacaaacagcaagaagtaaaaatattcggataaataaaaacttttgctaccttggtttctatagtctttatttctaagtttttcataagcactcaaagactcatgtatagggatggtttaataatgaaactatttttttatttctcgttgttctttataatacaacttgtaaattcagacttagacacattaaccctttatctcctcataaagaaaataattctttcgttacttgcgagtgtactgtttttatttgttttatctttctttaataaaaagaggaaataacatgagaaatataacaaccgatgaacttgctttaatacatggtgcaggattagataaagatgcatccgttgcaataggtactgcggctggtggttttttaggtaaagcaacaaaaatccctggtgcggatatagcaggaagtgcaattggaggatatattggaggagttattgctgatggttcaaataggacaataacaataccatcaaacggtattaactataatccgggtataggacttggaagttttaatccaaactacaatggaggtttattaaactcaggatttaactcatcaacatcctcttctagtagtggaagttgattaatttctaaagcagcatagcttattatgcagcaatgctgcttttagtgatatattatcctaatttgtaattctaaaaatccgatcaactgttcttaaagttgtctctctatgtgcaataatcacccgggtgatattcatcttttttatagcagcattcacgaaacgttcactttctgtatcaagagaacttgtagcctcatccataaataatattccaggtttccggtataaagctcgggcaatgaatatacgctgtttttgaccgccggaaagaccttcccccagttcacctattaacgtttcataccccattggcattttcattatcacatcatgaatatgacttgctttggcacattctgtcatccattcgtcgtctgtttcttctgcaaacccacagatattttcacgaattgatcctgaaaatagtcggtcgtcctgcataacacaggctatcatacggtgataattatttattccaagttgacgtatatccgtgccattaaccagtacttttccactatctggttcaaacagtccacataatactttcattaatgtggtttttccggcaccggaggcaccagttatagccacactttctcccggagccacagacaaattcagaccactgaatacctgtgctgactggctgtcataccggtagcttaaatcagtggtttccagtgaaaccgggctcatgtcagcaacgatttcaatttccggtttcttttcttccttttcatgtagtgcaatatctgcaatgcgctcattatgcagactcattattctcagttgaagaagaaaactggtcagcgaagcaacccgatccgaaaactgcccacgaaaagaaccaaatgccacaaacatccctattgtcatctgattatcgatcacaaggcttgcacccagccataaaatcgccacctgatcacaggcggcaacaaaagtatttatccccccgaagagcaaatccatcctggttaacttaatacctgaattgatcgcatctattttcaggttaagccagtgtgttccccgaatcccagccataccctggatttttaccgtggcaataccatacaggctttccataaaataggagctggcccgggcccccctgacaagagtttcttccgatatttgccggtaatagccgtatgtcaccagacgaataagaacgtaaaccatggtaaaaccgagcactatccaggtaagatatcctccatataacagcatcatcacaaaaacacccacaaccataatactgtccatgattgccccaacaacacaggtggtaaaggtggccctcaaagtgtcaagggagccaaaacgcgactggatatcacctaatttacggcgttcaaaaaacgccagcggcagtctgagaagatggttaaacagacccgactgccactgtatattgatgagcgtgctcataaccagtgaggaccatgcacgcagcatactcaccgcggccctgagcaatataaagaacatcaggccagcagaaataagcgtcagcagccctctgtcccccgccggaatcgcatgatccataaccagctgagttcccaccggcattagcagattgattgcttcaattacaactgacagacagaaaattttcgccagtgttcttttaataccgtaaatactgttaatcagtgaacggagacttatgcgggtctgctgggtttccgccaggaattcacttccgggccagacctcaagtgcaatgcccgtaaaataccggctcatttcctcccgaccgagatatcttctgcctctggccggatcatgcagtacataacggttacgctttacgctgaccagcacgacgaagtgactgaaatcccagtggagaatacacggcattttgagggcaccaagttcatccagctccagtgaaagagcccgggtgaccatccccagctgctccgctattccattgattcctgcaaggtttgttccacgggccgagagattaaacttccggcgaagagatatcaggtcaatattcttaccaaaatgaccgcatatcattgccaggcaggccagtccacattcagcggtctccgtctgatgaataaccggaacacgacgtcgccagcgcatatcaagctgatttataatttgtctgaaattcccgttagtcattgagcggtcctgttgcactgtgtttcatgtcatagaaaggagaaagcatccactggtaaatacgccttttttccagaaatagtgtactttcggctttcattccattttccagagggaggtatttttcgtcatatctgataatctgcttttcaggcatcgcaatgactttataccagggaacagagtcgcccggcgtattctgtggtgctcccttataggtcaacatttcctgtgttgacgcaggagtcttggatatagttttaaccgtagcagagaactgcccaaatttttctgccggaaaggcttcataacgaatattcactttgtcaccagccgaaatataaggaacagcatcattcgggacccagagaataagataatagttttcaatattctcaggaataacctgcagaaggctgtctccggtattgaccatttgcccgacagtgacactcagggagtcaactttcccgtcagtcaacgcccggataatgatttcgccctccacatcagtgttaaccagttctttctgtaactcgtaccgttgcagttccatctggtagatacggttatcaaaatctgcagcctgagtctgaatctgactctccagagtggttatctgcagggcattctgttcgttctgtccgctcaggctgagaagattgttttgttgctgataatataatgccacctggttagttaactgatctttattaatcagcccttttgcctgatagtttctgtaattctccatattgtttttcattatttttatcccttcctctgcacgctgtataatatctgatgagcgacgaaacgcatctgtgtattgcaggcgttgtttttccagggtatctagcgttatttttttactttcttccagacgggaaataatgttgtccacacgaaccagctggttttctatatcccgacgatgattatcagtgacaataccactacgtgtacttttactgatgtcaatcagataaacaggatcccctttttttatcaactgtccttcatgaacaaactgcctgacaacaaatccctgtacacctgaatatatattgacagctcttggccaggttgtgacctcaccactgacattaacacggcggctataggtaccaacaataatgaacatcagaaatgccgtaataaacactatgcttcccagcatgattaaccatagtggtattccgggaagtaatattgcccgtccctgccacttcatttttctgttttctaaagcatcctgacgaaacaaaatagctcctcttactcacacttttcctgtaataccttcactggttaagcgaaatgctataatcaaagccagaaaatacagagtcctgtcaaaatagtatcagcgatgcatttaccccgtaatttacaattatctctgtatcttcagaggtactacgttttatgcagccgctcagggatgtatgtcacaattttctttcgcctgcttaaccatcgtacttctccttctccccatggctgaagctgtatgagatagtcaataacttttcgaccaaagcctggtttacaacagaaatccagaatccaaatccttccatcttcattccattcagacggatgcaacctgaattctggatccctgagcaggcgcgcttctgtatcagcctcaagatatgcccaggtaatatacgccagtggaaaacctcgtgaatcaaacaggaatttaatctgattatgctgtatcgcatattcagtccagtattgaatggttaacaccggatacagactgtaattacgattgtagagcatacaactgactgcaaaaccgatctgttcataaacagtccattcatcttttcctctgatggtttcccttatataatacatgattactatttcccttatatattttttacactgtgtttcttatcggttcaagatatccaaatgcatctctggaaaacttaagcataaaatttttcatatcagaaattgcttcttgtaaaaaaaggggatcatcgccatgattatccagcaggatggcaattttttcgcacatattttctttcctcagctcttccctgggttgcagccttttcatggtatgatgttcaatttctttcaggagtaatgaggcatttatctgacgtctggtactgccttgcgtcagccagtggatggcctgggaaaaacactgttgtgcaacggtgaaataaacattattcttgatgctactattcagtgcctgcttttgattatgcctatgatgaattagcgtcacaaccaacttttgcaatggtgaaccatcctgattgacaatatcttgggcatgtgatttctcgcagtattgattgagtaatgcaacaaaactgttaaccagttctttcaatatatcaggtatctctttttgtgttataaattctccaggaatacccaacagttctagataacagtaataacatgcttcatgaaaagttttctgaaatatctcctcaaccttcaaacgggctgcaagagtgaagtcagggtcaaacatatattttccgatatacaagcagagatcagacagcccttgcataagtaccatcggttcttttgccagttcagctaatcttagtttatacccaaaatcagctggggaatctcccggaaacagacaactgagtccgttaaaatccattaatctgccatccattgcaatattagaaggagaagttgtcaatctcaggaaacgtgttcgacaaaatgccatttgccaggcctcacgacgtgccagttcacataacccctcaatgcaataaatccggggatcagttcgtgcttcagcatcaatttcttccggtggtacaggtagatatcctggcagcttgtggatcacagatctaacccgacaggcatcgtgaattaacagactggaatactccggttttacttggaagtaaggtgcccgttcaaaatgcgccggacgaacaacaggctcacgtaccaacagggctcttcgtgatttcctaccggagcgctcaaatgccttttcagtatagagatctgtaagtaaaaccgcccgaacccgcacagcactataaggtaatatttgagccagtacttctccccacaaagcctcatatattgcatgaacagcgccgagtgcaccattagaatgacgttcgtcagtaccttcgccaaccaacggattacttcctattcctttaacctggtagttaccatcaaacccacaacgtgcaccacctccattacgctgaataccactgccaccatagcgctctgcatggaacactttggcagaagctgtactgccaggatcgataatataactgcaggcattttgcagctcgtctggatttctgacatcctctgcacaccagattaatgaggccttgatctgcctggcagtgaaaggcaccaggttttcattcagttcagaaagtgaacactgatgactcatctggcagtattctccgtttcaattttcataaaagagtgttcataaaagagcaagtaagtgtcctgacagcttcttccttattacagtaaaactctattaattacacataaattaaaaaattatttatcaacgactgtaaatcatatcttcatcagtaaagtgttgaacataaaaacacacttataaatggatcttctatctgttttaaacaaaaaggatatattttacaggtactaccgaaaaagtgcctgtaaaataaataaaatataattagctaccgccaccagcagaagaactggcactaccacttcccacggtcgagccaattgctgttgtcaaaccggcagatacggctccaactacaaccccaagtggaccaccaggtattccggcgagagctccaacaatagctgcagcacctgcagcattagctgaagtcgctggcgcacctcccgccccggaaatatatcttaactgtgattctgttatttctcgcatataaactgcatataaactccatcatatttaacttccgtttttccagcctgaccagaccagaatccttcgaatcccatgaatcagctcaataaaaccaagaaatattataaagcttagaaaaacgtcaacataagaattcccttcgccaacaatccgaagggatgaaagtgaaaccaataagatagtaataggtaaactgaatatagccgtcaattgggacagttttttataactcattaatccctacctgttgctttattttcattatgaaaagttaccaaatcttagcacctcagtcaggagagtcaggccatcgataaagaatattccagtagagtggcgctcatgatcaaagataacagcaaagctgatgacagcgctgaccgactgtcatttacagaaaccctgtttgtagcacattccatcttacctgacctcacccagacaaagacaaaagagaatgattgttatttacttttcaaaaaaagtgtcatattgtccatataaagtcaagaggtattttacgttatgtcactgatgcaattgttagtcaggatctcatggttgtcgctcatgtataacctgagacttgaacgcacactaatagcactgacggtcatacatcgggaaatgtgaggaggcataagaatgaattgtgataataatcacagaaatgaagaattcattgttacctttgataaaggcaacaagcaagacaattcaagacgaaaacacgataattttcctatagaggtagaatcctccgtagagcaggagacacactgtatcacaaataataagtcggcttccggtatagtaacacatgactatgatgccgattatatttgtggttgtggtgaaattatgtgtcctggttgcggtcatgacctataacaaacatttttgcaaactgatacctgatcaggtacaagcctgttgattattatgctgaatatttcatgttataaaaccatcgatataaacattaacaagaaaaaacatatattgtttatctgaacatttatcgatggaaaaccaaaggggaaagtatgtatcttacgaaaaagattataataagtatgatgtttatattaccatctgctgcattttcatcagatccacctccccttcaacaatcgttagaaaaaacaacctatttttctataggtatgaatgggtttataggctatcagagcgaaggggaaaaattatacacacacattcttacattagataatcccgaagagatatttaaaaatataataaaaatagaaagtcaactaaggagtctaaaatttatgctgcttgtgggctatattatttaaacgtagaaaatatagagtcattgtttaatgaaaatgataaacaagaatatgtgtctgtcttaagaggggatattttaacaaaaataaaactgaatgatattctgaattctgtgataataaatggttgcaacaccaaattaatatctgaacataaatgagcaggaggtttttaaaatgagagaaatatcagatcacatgcttgatttcgtgaaaagagggatgaatcttaatggattacctagttctactaatgtaatagatctacgaggaaaagatatgggaacatatattgatgctaatggagcatgctgggctccgggtactccatccatcatcatgtatccgggggaagtggaccttcttatagtatgagtagttccacatccagtgcaaacagcggcggtgatgctgccaacttactgatttagtgtatgatggtgtttttgaggtgctccagtggcttctgttctatc

SEQ ID NO: 640 - DNA, 2685 bp, Escherichia coli
gactcctaacggtatcctatatattcttataagataaaaagaattatattatatagtttaattgtagtttaattatagtattgtcggaaatcatttcctaggtgataggaactcatttcctaggtaggtaggaaaccacttccacggttatttcctaaatagatcggaactcatttcccaggtgttatttatacttatcgggtatcagacttgataggggtagctcacagtgacctaccgttacatccaatcatcacatagcatctgtgcaatgatcttctaaaagtgtttcttgctaccaaaattaaacatctaaaacaggcttaaattcaatgtaattgatgattaatccctgtgtaattcctacgtaaaaatccaatgaaaagtagcttaaaaagtgcaatgttagctttcttcacttttacatcactttcgcaaagccttgtgtaatacggcttacagagcactatcagaaattgttgattaaaaatcaatctattatttgtcgaacaagtttcctttaatgcaacaaaaaattattttttcaaaataaacacactatttaatagcttgctaattttaccaaaatgtaactacatgattctcatgcaagacgtgtagtgataaagcaggctaaatcaccacactaaaaaccttcgaatttcgtagtgaaaaaagtcctttacacacctaatcaacacgatcaataatcactacactcaaatcaacacagaaggaaaatgaaaatggctaatattggatacattagggtatcgactgtgcaacaaaacacagaccgtcaattagctggagtaactcttgataaagtctttgaagataaagcgtcaggcaagaacactcagcgcccacagtttgaggcaatgatgaactatgtgcgggagggtgacgtgttacacgtccatagtattgatcgcctttgtcgtaatacagccgaccttctggcaacggttgagcaattaacagagcgcggcgtgtctgtgcatttccataaagaagactttaagacagggaagaactctcccgcagggaatatgatgctcacagtgcttgcagcagtggcacaaatggaacgtgaaatgatgcttgagcggcagcgtgaggggatcgccgcagctaaggccgctggacgtatagcaaaacgtggtaatggaaaagcaattgatcgagcgggaattgttgccgctctcgcgaatggtggatcaattcggagcgtagcaaaagatttcagtgtcagcacacagacggtgcaacgtatcaagaaagagcaggaagcgtaatgcctcctgatatttgagaattgtcgctgcgtggacctgacgccgctgatcttcgcgttaaacattgatcacgtctgcgccgatttcagagaaaaagacagtaactgaactcactatgaaggctaaacgtatctttacacttgatgaaaacgttcaaaaaacaacctaaccccaaaattcaacaaattgcaacacattgtttttaaaagaaaattaaatctacatcaaatattggttgacgtagattgaggtgaatagtagactattagggtaaattaccacccttgtaacatcatttaatgcatgttctaatcttcctatcgtaaaaccggaggaagttatgcatttactttcaaaacatcttcacactattcactttctcgttattgatgtattcgttgtggctattagttaccgcatttgcatcgcttccagtgaagagatggacgctgttgcaattattgctcaagcaatggcgatgttaactaaacgactttaataatttcactatcaggtgcataaacacatctttgatcgctggatgtgttatgcgcctactggtggttcaatccttaagccatttcaactcactaaggagttttctttcttcgttctctcgctgtttacgctctagccaggcttttccttctggcgtagacaggaacttacgagcgtgaatcttgcggttattacgtttgatagctgcaatgtttttcatcgtgttgcctctgtattcatatgaaaatgaacaagttacatactacacaggaaggctacgcataaaacacaatacaagtaaagatacattttcaagacaataggagccataaagcgcctttgatggttataccaaaaaataagcgccgtaggcgtatccactaaaaagggctttttcacaaaagctatgaagtcttagcagttcttctcttatcaggcacccgttgtactccggtggacgaaaccgtgctagagcttgattctttcccgatcaagttaggttttgaagaggtgggctttaatccactattgcacttaaaactcttcccatcatttagcctgtttatcctctgcaacgtctcacgacgtgtagcatcattggacaccgcgccaggtgtggaacatcttgctaagagttttggtagaaggtttagagacggtggcacgtcttccagcttcaaaggaacttgttacgaggttgagcttgggaactactcgcccatacgtgttacactaccaaagcccataacaacgtataggcgtttgtaagtgataacagaagatacaatttcttagagaagttaagctaagttattgattttcttgatggtgccgataataggagtcgaacctacgaccttcgcattacgaatgcgctgctctaccaact

SEQ ID NO: 641 - DNA, 3383 bp, Escherichia coli
gtgctgaggctgctacggttagtgctgaagaggccaggcgtatggcagagaatgccagaggccctaaaggtgataccggaccgaaaggtgatgcaggccctcgtggagaaacaggtccacaaggcgcacaaggaccacgcggtgaaacaggaccggtggggccgcaaggagagcgggggattcaggggcctgctggtccacgaggtgaaaccggggccagaggtgaaaaaggagcccccggagacccggggggaccacccgggccgaaaggtgatgcaggacctaaaggtgacaccggaccagccggtcccgcaggtgaaaaaggtgagccgggagaacgagggcctcagggagagcaggggctacgcggacctgcaggagagagaggcccggcggggccgcagggaccgaaaggagatgccggtgcgacaggtccggcaggtccgaaaggtgaacgaggcgaagctgggccgcagggcccccgcggggagcctggtccggcgggcagcgcagcaaatgtggtggacgcgacgacggcacagaagggaattgtgcagctaagtagtgatactgccagtaatgacgaaacaaaggctgccacgtcgaaggctgtgaaggcggcaatggatgaggccaaggcggcgagacagaaggcagaagaggttgctgcaggtggtggcgttcccggcccgaagggagacaagggcgatacgggtccggcaggcccacagggaccgaaaggggatacgggagccgcaggcccggcaggcgcacaggggccaaaaggtgacaaaggcgatccgggggtggctggaccagcaggtccggcggggccacagggaccgaagggagacacaggagcccccgggcaaggaacagaactgcttactactgccaatacatggactcaggcacaaacttttaatggtggtattaatggcaatttgacggtgaccggaaacggctcatttaacgatgttcagatccgttcggataaacgcaacaagcgaaatgcaatacgaatagataattgtctggagaagcttgacttgctaacgggttatttgtatgaaatacagaatgctgatggcagttggcaacaatctgtgggattatttgcacaggatgcgttaaaggctcaaccagagttagttacatctgatacagatatcatatctggtgaagagagatttcgattaaattataatggtgttattgcactgttagttgaaggaataaaaaatctgcgtaaagagattagcgaccttaaagagaaataataaaacaatcagagaacagagaaccattagtctgaggcagaagatggttggtgttatcgtccgaatgacaggaggatgttaaatgggggttgcttccggatgggttggctcctctgccgttagtgtaactggtgaaaggtcaatgaaatcggcaggtgccaaacttaagctaagtacaccgttttatatgtcgcaaatggttgggaaaagtgtacaggacttttctatcactgtaggtcgttcaaattttgttgttttagttcaggcaacaaatatacaaattgttcctgtaaacaataactatggagggtattctaataactcaacaacgacaggtgctggctctgccgtttccagccgtgtgcaaacacaaaatccggctggttcaataaatggttcgttgttaggttgttcaattacgcatctttctcaaacgcaagactctaccaagatgtatctgggcttaacgaacgggcctaatcaaaactttactctatcatttgatggaaccaatatctcattcacaccattatcatttgcaaacaatactcggcattatagtgcaatagtttctaaaaactggctctttaatcaaaacggaaaaactatatctgtttataaggtttagaaggagttgataatgtacaaatgtgttttagctgtattgatattattatctggttgcaaatctttgccaactccgctttgccatggtaaagcatatttaggtggggaagaaactataatgccaatttatgggattaagaaaagcgggaagtataaattgtatcatgcagggcatcactacaactggcgttgggttggagctggagcatttgacagcacaacctgctctcaaataatgtaaatcgtatactatgtataaaatgtttagctaatgctaattgataaattgtcatgaaacaggcaaatctgaaatacgtaaagaagcactacacagcaggagatttttgtgtggctgggtgcagtggtaacgctctgtgcagtggctgccgtaatgatgcaataaaaaggggagcaacatgctccccgaccagaagaaagaagtttgataacaattagtgagttgttacgtcttgcccagaatatcatagcaacactctgttgcagtgataccgatcgcgattttagcgaattccatcataaatcccctgatttttaagcctgaagcagtcaaaggaatttctatgccctatatcgatatcaccacgatgcgtgggatgatgccgcgcgttgtgacatccatgctgtccgagcattccgctgtactggcggaggactgccatttccggtttggtgttattacaccagaacgtcagatatccggggttgagaaaacattcacaattaagccaaaaacaatttttcattaccgtgacgatttctggtttgcatggccggatgtggtggatgtgatccgcagtccgatcgctcaggacccccacgggcgtatttactacactgacgggcgttttcctaaagtgacggatgcgactattgccacaaaaggggacgggaatcacccgacatcatcgtatcgtcttgggatccccgcgccgacgacagctcctgtctgtactgtccagcagggcggtgatgtttctgacgataacccgaatgatgatgaaacccggttttatacggaaacctttgtctcagattatggtgaagaaggtccgccaggtccggcgtctctggaggtaacactccgtactccgggaactgcggtacaactggcgctggctccggtaccattgcagaatgccagtattaaacgtcgccggatttatcgctctgcatcaggtggaggggaggcggattttttacttgtggctgaactggatgcatccgtgctcagttacacggacaaaataccggcgaaaaaccttgggccttccctggcgacatgggattacctgccgccgccagagaatatgacaggcctttgcctgatggctaacggtattgccgccgggtttgccggtaatgaagtgatgttttcggaagcgtatctgccgtatgcatggccggaagtgaatcgtcacacgacggcagaagatattgtagctatctgtccgctgg

SEQ ID NO: 642 - DNA, 787 bp, Escherichia coli
atccccccccccctgagtcctgtaaaaaaaaaaatgctgcagtctcaggagatcagcacggcagatgaaggggatggtggtcaggttgtggtaattgggcggtaatattattttactcatgttctaactgatttaatatttatatcgaacactgataattattctattggttagctatatgaacaaaacgattttattctgcacgattattgccttaacaggatgtaagtctttggattacgtaaaatccggaaaacctgtaatggaaggtaattcattaaaaaatattgatgaattgtcaggctgcatatccagacaatgggctggtaatggaacacctataacatcccttcctattgagaatggggtaagccttttagttccacaggctatggggggatatgatgttgtgcttgatatcaaaaaagcaggaaatggcagtagttttactctttatgaacgtgtaccagcattaacgccaaaaatttttgctgatagtgttaatgcatgtaaataatagttaatcctgtcgtaactcatgagccgccttttgggcggctttgttgtttatggagtgtgaggaatgggtaaaggaagcagtaaggggcataccccgcgcgaagcgagggacaacctgaagtccacgcagctgctgagtgtgatcgatgccatcagcgaagggccggttgaaggtccggtggacggattaaaaagcgtgctgctgaacagtacgccggtgctggacagtgaggggaataccaatatatccggtgtcacggtggtgttc

SEQ ID NO: 643 - DNA, 1593 bp, Escherichia coli
tagcctgcttctccttgcctttcggcgcgtaagaggctaacctacatgtgtctagcatgaaattggcctcagattaatgttaggcgtcttgcaggacgcgtaatgttaactggggtttttctctgtctgccttacggtggcatgcccgaggcagacagcctcaagcacccgcagcaattctacttaactctcgctttaccgcaaaccgtttttacccgatatgggaattcccatatcgtaatgaattcagttccctagtcgatccatcaaaaacacaaccaggcagtaaacgcccacaacagcaataacagccagcgcaccttccattgccagtgatatatcatccgacatattccctcctttggtgttaatcccggcgaacgtttttacccccaccgacaaataacatatactaaaaaatcaatagctatagcaacgcctgtaattgcaaaggcttcaagccagatcattggcgcacctccagcggcggttctggtagcggcatccagtcggttacattgcggctctgtgtttcgaaaaattcatcaccatcacggactacatcaaaaaactcaccgtctcgatattgcgcataaagaacgaatgcgccatcacataaaataattacgtgctgaccgtcatccggcattcgctcactacagcttatccaaccatccagagttaccggatggttggttgacgtttccgagatttcccgaaaattattggttgacgaacccttcttttcccgaaagtttccagcctgaagcatggcggcgctgtctggcggggcagcatatagcggcacgtatatttccggttccttatcagcaccaggttgctcttccagtgagaatgtctttccggtaaatcgattcatataaagcacgggctctgcttccagcgaagcctgagcaacaagggccagtgctaaatccaactcaattgcctcgagagaatttttgaatgctgtctgttttactgcaaatttcatcgcctttacattttcactaacatgactgattaactgctcttttgtaaaagtggtcatctcattctcctttgatgcgaatgccagcgacaattgaagcctgatagctaatttactcacagtaccgcctcctgaaaattcccctgatagaaagccagcacgcgctgcataacttcactattccggcactcgcgacagattatgttcaggcgtctatcgtagcggcgaatttctccgtctggtaactttcgaatcaatgtctggtcagttgttttctccggtgtcttacgccatacgcgatacacctgttctgatgcaaaaacaccgtatttaccggacatgtataaatcgccacaagccagtacatccacaaggcaacgtctgactgaatgccagcctgctcccgtcgctctctccagttgcgatatcgtcatgcgttcattttttgcgtaccaatccgataattcgtgccttcagttcttcccgctgttcgtgtgtaaaaggtttcgccataagcgcctccggcaatcacttttccgacacaatacgaccggatgaatcgacaatctgtcgaacaatatcccggtgcttgttcagctccc

SEQ ID NO: 644 - DNA, 2372 bp, Escherichia coli
gatcgcgatgctgatttgcgctggattcatggcgttatagttcaggcagcgtggtttgtaaaagcatcactggagcagaatgcactatcgggcaactctccggtaactccggatggttggataacctgtagtgagcgaatgccggacgacaggcaggaggtgaatcaatgagctggcctgatgcaatcgtaactctgggggtggtattcgcagcagcgtttgttgtgttctcgatttgtcgatggggataaccacatgttcgctttgattcaacgcggtcagatatacacggacagagccggataccccgtggtgattactcgcatcactgagcactcagtgttctttcgacggatggacggacgatccgggcgggtacgcattggtgagttaaactgcctgttcgaacatattgaccaccaggagtaccgcaaaattctcgcggacactgagcaggaaaagcacctgaaaaaattacgagccataaaaaggaagtaaagaatgaataaagcatttgaacgatgggtccaccagcgttacggcaatcgctatgacctgacgcgagatgttgacggcttctactgtcgtgaagttgtgaagcgaatgtttgaagtgtgttgccactgccgtgggctgagtgttgtgtgaggtaatacatgggcaatgtgattcaactggctcccaatgaatgggtttgtgaaagcgttcttatcgcaattaccgggctcaaaccaggcacaattcttcgggcccggaaagaatgctggatggttggaagagagtatattcacgtatcaccagacggtaatccaaagccttccagtgaatgtatgtataacagaaaagcaatagatgcctgggtcgcctcaatgaaaaacaaacaacccaggtgatttaatatcatgaaatatgtaagctcgtatcgctcttgggcgtctggaggtatcgatggataaagtcaaatatccaacaggcgtcgaaaaccacggcggcacattacgcatctggtttaattttaaaggtaaacgtgtcagggaaaatcttggtgtccctgacactgccaagaacaggaagatcgccggggaactgcggacatcagtatgttttgccatccgcacaggaagctttgattatgctgcacagttccctgactcccccaaccttcaggcttttggggtaagtaaaaaagaaattacggtgaaggaacttgaagaaaagtggctggatctgaaacgaatggaaatctctgcaaatgcattcaatcgctatgaatccgttgcaagaacgatggttccgaaaattggaggcagtagactggtgtcatcggtaaccaaagaggaattgctgtatatcaggaaagatttgctgaccgggtatcagaattcaatgaaaaacaaagcagcaaaaggacggagcgttgttactgtaaattattacatgacgacaatcgctggaatgtttcagtttgctgcagatcacggttacttagaagcaaatcccttccaaggaattaagcctcttaaaagagccagggcagagccagatccgctaactcgtgacgaatttattcgcctgatagatgcttgccgacatcagcagacgaaaaacctgtggtcattggctgtgtacacaggaatgcgtcacggtgaactggtctccctggcctgggaagatatcgatctgaaggcaggaacaattaccatcaggcgcaattatacgaaacttggtgagttcactctaccgaaaactgaagcaagcacaaacagggttgtgcaccttatccagcccgctatcagtgtcctgaaaaatcaggctgaaatgacaagactgggtaagcagtacaacatcaaggtgcaactacgtgaatatggacgttcagtgaaccatgaatgtactttcgtgtttaaccctcaagtggttagaaaaagcgaacaggtaggttttgtctacaaagtcgattctgtaggtgactcatgggaaacagccattaagcgtgcagggatcaggcatcgaaaggcataccagtcacgacacacttatgcgtgctggtcattatctgccggagcaaacccaagcttcattgccagccagatgggccatgcaagtgcccagatggtattcaatgtatacggagcatggatgactgacagcaatgcagaacagatcgcaatgctgaatcagaagctgacagattatgtcccaatgatgccccatagtcaccaaagtgacaccagaggcttattaaaatcagtaagttaatccttaatacccgtcatgttaactgcgtggagggcaacaccacgctttacgccctgccgaaacccgaggttgtcctgcgctggcgtgaacagaccacagatgacttccgcttc

SEQ ID NO: 645 - DNA, 2434 bp, Escherichia coli
cgggcctgacgaccggatgccgccaggcagccgggagccgaaggtgcgcgtgcgacaggaagtcgcttaacgtattgttttacattgataaaaccagctatcccattagctgtagcctaccgggacaggcgctgccggcaacggcggggtctgaagctcccgggacaacgagagccgggcgtcagcccgggtaaagccccgtgaggggctttaccttgctgcaagcatcatgcggcaggagagcaaggctggtcagaagggttaacacatgtgaactgttgataaacaccgttatcggcaacaggccaaagatgctgacaggcctgaaccaaaaggtacggggtccggttgctacctcgcgcacagggagcacatgggcgcagagacccccggtgaagagacagaacccgccctgaccctctgtatgttaagcggaacctggtaaacccgtatcgctgcctcacaggcaggtgaaccgcaaggaacactgttagcggtgcgggcagaggaggacggaaaaagcgaatgcccggctgtaataaccgggatacggggcaggttccccgacgcgaaagcgggcagacttccgtctggtctttaattgcatgaaaagctgtaaagcagtcaaaaggatatcagcgagatgaatacacacatcagtgtgtccacgataccccactcgacaggctggcacaccataaactggaaagcatgccatgcccgggtgcgaaagctacagttacggattgcaaaggcaacccgacagcaacaatggcggcaggtcagagaactacagcgcatcctcacccgctcattctccggcaaagccgtggctgtcaggcgtgtaactgaaaataccggtaaaaggacacccggtattgacggaaaaatatggcacacaccgaaggagaaatgggaaggaatatgcagcctgaatctgtgtggttacaggccacagccactacggcgaatacatatcccaaaatcaaacggcaaaacgcgaccgctgggcatacccacaatgagggaccgggccatgcaggcactgtggctgctggctctggaacccgtatccgagaccactgctgaccataacagctatggtttcagaccaatgcgcagcacgcatgacgccattgagtccatttttctgcggatgagccagaaagtatcgcccaaatggatactggagggcgatattaaagggtgtttcgataacatcagccatgactggctgctttcccatattccgatggacaggagactgcttaaaaaatggttgaaagcaggttacatggaaagaggcgtgtttaaccatacgaacagcgggacaccgcagggaggcatcatatcccctgttctcgccaacatggctctggacggactggagaaggaactgatgcaaacgttcaggaaaagtggttatcacagtgcaaagcaccaggtgaattatgtgagatatgctgatgatttcatctgttcaggcagctcccgtgaactgctggaaaatgaggtcagaccactgattgcagctttcatgcgcgaacgagggctggaactgtcggaagaaaaaacagcgatcacacatatagataaaggcttcgactttttagggcagaacgtcaggaagtacaacggtaaaatgctgattaaaccgtcgaagaaaaacctgaagaacttcctctgtaaagtcagagaaataattaaacgcaatccgacgctcccggcatggaaactgataggccagctaaacccggtgatccggggatgggctacctatcaccgacacgtcgtggcgaaagaaacatttaattatgtcgacacccaaatctggcgagctatatggcgatggtgtgtaagacggcatccccggaaaggattgcggtggatcgccggacgatacttctcctttgaaggcaggcgctggatctttaaagccataactccggaagggaaaattctgacactcttccgggcaatggaaacaccgataaagcgccatataaaaatcaaaggcgaagcaacaccatacacccccggaatggaaatctactttgaacgtcgtctggatctaatctggaaaggcaaatcaaagaagatgaagacagtagttcaactctggaagaggcaggggaaacactgtccgcagtgcggacaactcataaccaaccagaccggatggaatatacatcaccggatcaggaaagttatgggcggcagtgacgaactgaccaatcttgagttgttacatccgaactgccaccgacagttacacagcagggaagccggtgctcaccgaaagcacttataaaggcttgagcggagtgcggggaaactcgcacgctccgttcttagggggcggcggcgcagcaatgtgccgctgctacccgacccggcagacaggacaacactgcagtagtcagaatcagagcgg

SEQ ID NO: 646 - DNA, 771 bp, Escherichia coli
aatcctggaactgatccgggaactggttgactgataatcccggaaacgtacttaagggcagagggtcaccgccctctgccctttaataatctacggacagattactttctgtacttccagagcctgtttctgtgagtcaaacatgagctggtttttaccgactacacccaagtaaatatattcgatatctcccatttgccgtattttcgtaaaattcaacaggaaatattcaacgggagtgagagaactgctgtccggggaggaggtacagacgcaaaaaaaccgactggtgaggccggtttttttgcgattccggatcgaagttggtagccctgaccggaagataactgcctataactgactatgaaataatacggctgaaataatatttctgcaagcacagtataagtatatactcggtgtgtcagctttgaggcacgttctttccggcatatcgttcaccgggatgaacaggttgcaagtcctggccaaaacatcaggtggtgctggttttggtgctctggccggagaagaactgtctataactgacactatagaaaacgtggcgacaggcaatgtaagggcaaaccacggtgttctttctccattgatggagaagcggatgattaacctgttaatcatcgttctcagggcggttgttgctgtggctaacgcagtgatagcaatcctggaactgatccgggaactggttgactgattaakcmytccggaatccgattacccttaacggtaccgtctgaaggcaatccg

SEQ ID NO: 647 - DNA, 3429 bp, Escherichia coli
aaagtcatcgggcattatctgaacataaaacactatcaataagttggagtcattaccaacagcggcagttaaataaataccctccggcatggccggagggtatttatgatgtgcctgtaagactctacttctgtcgtctctttacaaaggcatatgatctgtcattttgtaccagacatcttaacgagagccttttcatatattacttacatacgtgaaatctacagtataaagcaaaaattttattaaacctgttttatatttatcatcaatacaacagatttaattccggaaagtcactcatcatcccttgaatgaacgtcatttgatgtattattcttacacttggattaatttaagatgatacctatgaaaaactatcttttccagacacccgaagatatttgtgtacagttaaaaaaatgacacatcctgtcacaataagaacaacagatattgctaatttctggcactatcttgagtcagcaacacttccagtgatcacaaaaagcaccactacagaaaatcgggaggttacatttctgtggcgctcagagaaagcactgcaaggcgtatatcttcgcctgaatcgtgttacagataaaaaagacgtcaaaaaaggactaatgactcatatcccttcgacagatatctggatgctgacactggtgttaccagcttcatatcggggctcatactcatttatagaaattcccacagatatgacacaaaaagacatatttcaactaggaagtcgcttctctccattacccggtaaatctgatccatttaacaaaacagcagaaataaatatacgaggattcggagaatcagtcctttctcttgatatggctcctgaacaaaaggaatgggatgatacttcccataaatgtacaggtattctttcaacattacattcctttgttgcaggatatcaacgccggattcgtttatattttcccctgaatccaacatcagtacctcttggattacttgtgttacctgatgctgaaacatggtttgaccggatagatattacccgggcattagatatggccatcaccactggtcgtatcacgccaatggcaattatggggatagacaatattaatgaatctgatcgtatgaatatactgggaggcaataaagaactcatctttgatatagcggaaaatctgataccccagttatacagagactatccggatatcgtatgggctggtcgctctaatactgtactggccgggcagagcctcggtggagtgacagcactgatggcagctatatatgcgtcgacaacatttggtacaatcattagtcactcaccttcaatgtggtggaaccctgaccagggcagcccgatcttgtttactgagaataatacctcctgggtaaatgagcagatactttcagcgcctccgaaagatgtaagtattcgacttggagtcggttctttagaaggtacaaccgtctcacatgttcagcgattgcatcattcgttaatcgcagctggtttggaaagtaacctcactgtctataccggtggtcacgattatgcctggtggcgcggagcaattattgatgaattagcaaattataattgcaggaaggtatcaaataataactctgtgtaaaatatcgttttatcgtccgataactctttctgcaatattattatgggagactatctcatttatttagtgatgtccttcatttatgtgatgaaggacattatattactcataacatttctcgttgaaaatttcagcaatacgctacaattgtttcccgttgttttttaattttctcatcaaaacctctgcaatctctgcaggactgggttgttcagccatttcagcggctacctgatctgaacagaagcgtagtgaatcatcataaagcaggcgatttaccaaatcactggtcagtccatgcttgtccggaataattccacacccacgcttcgcaacaatttctgcattaacagagcgatctgcaccttcgccaaacacaatctgtggtattccactatacagcgctgtcagggtattacctgcgccaccgtgatgaataaatccatcagctccattaaggaatacacccataggtatccagtcaaccagacgtacatttgatggtagttttcgtaaaccagtacgagcatttattgcaagttgcaaaatgatatcagcatcaacttcatttgcagaatccataacccatgaaatcagctccagaccatcaaccattggttttacagtgccaaggctgataagtaaacgtttccgatcagaatccctgtcccaccatgtttcctttacagcacctccgttataaggaatatatctcattgagataaccggttctccagcatttttaagaatgctcatacttgggggagcaacatcaatccatgctaaatcacatagtggaccgctgactccatgccgcctgtaagcattgcttaaagaacggtttaacatctgaatatgggcagatgtatgcgcgaatccaacagccagcatcactgaaggaattctatatttagcagcaaccaatgggcctgccggaccaagagggggatagactattaaatctggcctccattttcctgcaaaatcgatgaggttatctgccatttcatcgctaaaaaaagagaaatgaccaataatattactttttttcctcaactcttcctgatggcgatatccagcctctgaatctaaacctggaactgcatcaaaaacaaccagtccagcttctgctgctttattcgcgaatttgccagcgctactaattactacatcatgtccaattacacgaaaggcctgagccagagaaatcaatgggtataacaaaccgtacagcggtgggccaataaaaagaatacgttttcgcattaaaaaagtccgtcttctgcttacctgtttatttttctatctctaagaaaacataattaatattatttttatgtgagcttatgcacaaaaataaccaagtatattatcttctggtagagattcaggatacagtttgtaggagctttcttttttgaacaatgatttgcaggacagttatgctaaactagcggaatcagtatcacaacaataaatgactgatcatacctgaaatttgaattaacaggcatcatgaatgtcaatagtctaagcggtgactacttatatcgcttgcataaatactaaacactgactagaaaagtattggataaccccgtcactaaaagtaacgcttcggttatttgctcggaatgtattaacgccaagattgttagccggtacgccttatatcactggcgctgacaaatgtttcttttctaatttactgaaccggcgcagacacgcaggaaagcacgccggcaccggtgtaatgccagttctaatcaataagaatggaatgacgaatcagtca

SEQ ID NO: 648 - DNA, 833 bp, Escherichia coli
cgaccacatcaccttctgctgcaatcgcctgcatcagggtataaggggttatggccaccggactaccaaacggctgccagccctctttcagtttatgtgtcagcttttccgcaagatctgacggcgacgccgccctgacaacatcatagtgtttaaatgccatggttctttccaccatctgaaaaatgattctttaaaatacctgacatgtaatacagaaaaaacacaaaaccataccttaattaaaaacctcatcatcaagcagatatgcatggataaactacaagacgagatataaaccaccctgcatttaaataaacaataaacaacatcagaaaaataattctgctctatggtttacaatcaaaaatatcatttatacttttcagaacatcaccagcaaggcataaacaaggaaactaaatgaagtggattgtgattgatacagttatccagccatcatgcggaatatctttttcagtcatatggagtaaaataaaattaataatctggtatcaatcggatgctttcttacctcctgaaagtatatttacactgactcacacaggcatcatgctcaataacaaagtgctgcctgtaaccatttacaacgtagtaccattcaataaaacattctggaatttaatcaaaaacagccaggaatgccctacaaatacagataacgtattgaatgaatgctttaataaccgttgcactctgcaaatatgtccttatgggctaaaacaacaaagtccataaggagtttactcacatctgacaaaatcaatataaacagcccctccggagaggggctggagagtggcgctatgtgt

SEQ ID NO: 649 - DNA, 2763 bp, Escherichia coli
attatccaggccgggaggattcatggcatttaaacactatgacgtggtcagggcggcgtcgccgtcagaccttgcggagcgactgacacaaaaactgaaggaggggtggcagccatttggcagtccggtggccatcacgccttataccctgatgcaggccattgcggcggaaggtgatgtcaccacacctgtggtggtgaagccgtcggatggagaaggcgcagttatcagcaccaccagcaacccggagtattactttgttgttgccctggccgggcagtcaaacggtatggcgtatggtgaagggcttccgctgccggagacatatgaccgtccggacccgcgtattaaacagctggcgcgtcgcagcactgtcacgccgggtggtgcgtcctgtaactacaatgacattattcctgcggaccactgcctgcatgatgttcaggatttgagtaagttttcacacccgaaagctagcgcagctcagtatggatgcgtggggcagggattacatatcgcgaagaaattgttgccgtttattccggcgaatgccggtattcttctggttccgtgctgccgtggtggttctgcatttttggcgggcgatgaaggtaccttcagcgaatccaccggcgcaagcgagacctcggcacgctggggtgtagataagccactgtacaaggacctgcttacccgtactcaggccgcactgaaggctaaccctaaaaatattctgcttgcagtggtctggatgcagggcgagtttgatttgaaacagggtgcatacgccactcagccggggctgtttgattccatggtggaaaaatatcgttctgacctgtcggaattcggaggtcagtgtctcgggggctctccgtcatcggttccctggatttgtggcgacacgacctactactggaagcagacttattcttcgcaatacgatgcggtgtatggtgcatacaagacgaaatccgcaaaaaaaatcttctttgtgccgtttatgacggatgaaaacgggcgaaatgtgggtaccaacgagccgtcagaagatccggatgttgcggatattgggtattacggagccggtggtcgaacggacgccaaaacctggacgacggccgaccgtaaaacgcattttggatcatgggcacgtcgtgggattatttccgaccgtctggcaacggcgattcttgtgcatgccgggagaaccgctgaattcattaccggaaaacagcctgatacggtgaagcccaccggaccttccggtgaaggtacggagagagagccggaagccccggtcagtaaccgaaccctgatgagtctgctggcgtccggcgaagacctggcatcacagggctggcgctattatcacaaaccggcgagcggagacaatgttaacaaaaacattgctgaagcggtggtcagtgatgcgggggctacgggaggtaaggccctgcaactgaataaaccggaaaaccacatctggtttctggagcatgatgcagccggacagggagtggagttactgaagaaggggggacgtgtgagcgtacggtttaagttgccgggttcactggtgccgaatcggtttgccctgggcatttactggcagttgtcgtccctgccggagggagtgacgctggcagaggaaggcaacgacatgctgatgtccttcttcctgcagacggatgcgacgaacctgaacgcgatgtaccacaagaagccgaatgcgaagctggatacgttcggggtctttgataacggatggcacacactggcttttgagtttgccggaaacaacagcattcaggtgacgccggtactggatgagaaacgggggacgccgttcacactggtgaaatctccggcatcaggggcggcggacaaactgcaactgacaggcatatcaaaggcggcgacatatacgctgctgattgacagtgtgaaggtggaagtgaacaacgcggatgccgcggcatgataaaaaaagccgccagcggcaggaacggaagctggcggaggtaatcccaatggagaatgtaaagaaaagatgctttcgtatatcggtttttaaatgaaaacagttctcattgtcaaccataacggtaagaaactatgacatttattcatcaggtgatgctgtacttctgtacggcggtctgtgtgctgtatcttctttcgggtgggtacagggcagtgcgcgatttctggcgcaggcagattgataaaagggccgcagagaaaatcagcgccagtcagtcagccggagcaaaaacagaagccccactcattccggaacaaccttcttaataacccatttcaacgagaaaatcctatgtcagaaataaaatcgctggtcactgctgaggcagtgaaggaagttctgcgctctgaagaagtccggagcgcactgaaacagcaacttcggcagaaccttgaggcgcgtcttgatgcagaagtggattcaattctggatgaactgctgggcgcaccgactgttccggagccggaaggcattgcggatgacagtgctgtttcagatggcgtcgggtctcagcctgacggtagtgaagggcctcagcctgacggcgaaatgatgatgtaaccatgcgcagggggtgtcggtgtgagctgatgccccacttgttgttgtgagcttccggattgcgggagacggggtatgtaccagatggaaaaaatcacaacaggtgtgtcatacaccacgtcagcggtgggracgggctactggttcctgcagtt

SEQ ID NO: 650 - DNA, 1896 bp, Escherichia coli
gctctgaaattaaggcttcggttatttgcacgaaatgttccttttcaacccctgttgaattttgtcaagccggtgcagacacagtaaagcgcgcatcaacacctgaaaggtacgatacaaacataagttacaaacaataagaacggaaggacaattaatcagtgaggaataataactaaattaaccaaaagaatgttactgacaatactaccaatacttaaatagcaatatattaattaatgtaagaacagatgcccggtaagacatatacacaatacatccacaaacacactcttttcattaaatcaatcacctgattaaaccatgaaagtgtgatgtaagtcaaaattactgacactatcaattgataatgattatctctatcattatcgtgaaattcgagaatgaaaggagaagtagtcattataagccttttataaatcgtcatcatcatagtaaagtagaacactttttatatgagttactatatgaaaatatactggacaagaaaacgcattcctgaactttcagcacttccaccttcattaagaaagaaaaattttactgacgcatataatgcagcatcttctcatatcgaatactggataggtgctggcgtctcatttatctcgatgataattttatccagagtatatgactttcttttacccgcccaagatactttcccgggtgatatcatcagaagtttatgtgttgtgtgtccatccatattaatctggtttcagttttcggtatatgtcatgaggaaatattacagacatattctggtgcgaggaaaagaaaccgaaaccatttcagaaaggttgatacgtgaggctgatacacgagaatatgaactatggcgtccggtccgtcgctttttctccattgtttttctcattgttctattagtttgcattcattcactgataacaactataaaataaaagttatggctgttctgatacaggaaaataaacgttcattctatggttacctcttcctgttatatagaagaattttaaacgacaagtaagggaatataaatggaaataacaaaaaataaaaatgcaactataaaaaaacagtcatcagtcggctgcttttcaatgtttaccttatcattttctattacctttattcctgcattccttacaaacaggcaggaacttatatccaggggacttcttgttccagcattatttcttgctgaatttctaattcttgttccactgtattttattttcttccgaaaaagagaaggattaggaagaggttcttttcgactggatgttttttttactcttttctctttaataatgattattcagttatttgtcccttatctgctggcagtgaggaaaacggaagaatggatgatctcgcaaatgtcttttccgggaccattttatggattaatatattttcttccgtacttcttgttcctgtatatgaagagattgtatttcgagggtgtctttttaactcttttaaattctggtttaatgacaatatttacatctctgctattgtaacatcagtcatattttctgcattacatctacaatatactgactttcgtacatttttgatgctctttctgatatcgttagttcttatcagtgcaaaaataaagtcgaatggcctgttaatgcccatattacttcacatggcgatgaatgcagtcataacaggaatacaatatacgttacaatatcacataatagtctgaaattgttattatgagatatctataacacctgaagttggaaaaagaagcaaataattccttataaggaatcgtttactaatatatttagataatctcatatttgtttatgatatacatctgattaagatatatggattataattactcaaggtgaacaaatatct

SEQ ID NO: 651 - DNA, 878 bp, Escherichia coli
tactgccggaatggccttccaaccgagttgacgaactcctgccatggaacgtagtactcactaataaataagcgtcaatacggtgctccgttgacgcttacgactattactcctgaacaattcgaaattcagcagattaaaggtaagcgttaacggaggtaagcgtaaaccgactgccgtatgtagccattaagccagtattggtaacgtaggtgcccaccttttcaaatgatctgcgccccaaatcttggacatcctatgaaaaatgtttaagtcgatattgaaccggactcatgccatcgagtttctctttaatgcgatggtgattgtagtattcaatgtaatcaattatatcttgctttagatgatgtaacttattgtatttatttaggtagtaacattcttattttaaagtactaaaaaagctttccattgctgcattatctaagcagttaccacgtcgggacatgctttgtgttatgccattatcactcaaccaacgttgccaacgaggcatctgatattgccacccctgatcactatgcaacaagggcttatcgtctttattgagttgttctaccgcatctaatagcatgctctttaccattgatgctaatgggcgctcagtaaggttatatgagactatttctccattatacaggtccatgattggtgataaatagagcttcctgccatcgaccttaaactctgtgacatctgttacccacttttgatttgggcggtcagcataaaattgtctcttcagtaaattattacaagttcgcccctgttctccacgataggtttaattttgcttctgctgactgaatgatgattgggcagcaagtgcaatatcccacataaatccagtcaactca

SEQ ID NO: 652 - DNA, 1585 bp, Escherichia coli
agcaggctcaccgatgaaagcgctggaaatggcatgggaaacccgtggtaagcccggcggggtgatgttccacagcgatagtaataatgccgatgtcagtctttaccaccacttagtttgccgtttaaccagattggtgtgattactgatgcagtgaagaccttcccgcatcctgactcacacagcgatcgaccttttgtgtcctgccctggccccgtcggttgccggaagcgccttcatgcgaggcatctcctcaccgatgcgcgtgactcaagaagggcctgacggcttgtctcgttactgtcctgtccgggttatctgtctggagattcaactctgtttcctcacaggagctctgtcatggttgataaagttaccaaagctgccgttgtgggtggcgtggatacacataaagatttgcacgttgccgctgtcgtagatcagaacaataaagtccttgggactcagtatttctccacaacacgacaaggttaccggcagatgctggcatggatgacctcgtttgggacattaaagcgaattggtgttgagtgcacaggtacctatggttccggtttgcttcgttattttcagaacgccgggttagaagttcttgaggtgactgctccagaccggatggagcgacgcaaacggggtaaaagtgatacaattgatgctgaatgtgccgctcatgcagcattctcaggcatcaggacagttactcccaaaacgcgtgatggcatgattgagtccctgcgggtattaaaaacttgccgaaaaacagcaatatcagcccgcagagtcgctctccagattatccattcaaatattatctctgccccggatgaattacgtgaacagctcagaaatatgacgcgcatgcagctcatcaggaccctgggttcctggagacctgatgccagtgaataccgcaatgtaaccaacgtttatcgcatttcattaaagtcccttgcccgacgctatctcgagttacatgacgaaatcgctgatctggatgtcatgattgcggcaattgtcgacgagttggcacctgagctgattaaacgtaatgctatcggatacgaaagcgcttcacagttgctgatcactgccggagacaatcctcaacggttaagatcagaatcaggatttgcggcactgtgtggtgtcagcccggtccccgtttcttctggaaaaacgaaccgttaccgacttaatcgtggtggagatcgtgctgcaaatagtgcacttcacatcatcgccatcggacgcttacgaactgacgcaaaaacaaaggaatatgtcgccaggcgtgtagccgaaggacatacaaaaatggaagcgatacgctgtctaaagcgatatatctcccgcgaagtttacacgttactgcgcaatcaaaacaggcggatcaacagtatcccgataacagcttgactcttagaagggcgtccagggcagtcattatacgagcaggcagttccggcagttattgtggcgataccagatcagacagagtatgagccggcgcggaaactgccccccccccgggataacagccaatggaagcttcttcaggagtctg

SEQ ID NO: 653 - DNA, 977 bp, Escherichia coli
cagcggtaaaaataaatactgcgtcggatacacgctaacgtcaccataccacgatgataagcattcatatcacgaatattaaaaagcgtttcatcgaatttctttattaattcccgcgcctccgggagcaacctttttcctgcttttgttaacgtaaccttgcgagttgtacgctcaaatagttgaatatgtaaatcttcctccatcttttttattcttcgcgttaatgcaggttgcgtaatattgagtaatttagcggcattgttaaatgaactggactctgccagtatgacaaatgccttcatacttgataattcatgcttcattattactccggaaaatggaagcgacgattttgggtggctggtcgttaaaaattttaactgcatttagccaacttaaattaatgaaaaaatgttattaatcgttgagctaaagtcattagagatgctttgtccttaatgtaaccatatcgcaataagttatgtttttaaattgagggcattattatgaaaaaaataccctgcgtgatgatgcgaggtggaacctcgaggggcgcgttcttgttagcggaacatttacccgaagatcaaacgcagcgcgataaaatattgatggcaattatgggttccggtaacgatctggaaattgacggtattggcggcggtaatccgctgaccagtaaagtcgccattattagccgttccagcgatccgcgtgctgatgtcgattatctgtttgctcaagttattgtccatgagcaacgtgtcgataccacgcctaattgtggcaatatgctgtctggtgttggggcattcgccattgaaaatggtttgattgcagcgacttcaccagttacccgcgtacgtatccgcaacgtcaatactggtacgttcatcgaagctgatgtgcaaacgccaaatggtgttgtcgagtacgagggtagtgccagaattgacggcgtaccgggtactgcc

SEQ ID NO: 654 - DNA, 2337 bp, Escherichia coli
ctcaaaacaaaacgcctgctttttaaggcaggcgtctttaacttcattcataaattcagggttgcgggaatttctcacaacacgctgcatataccggagaattttgtcgtccattctctcaccagaaacgggtgccatatcggctgaacctcagcaaccagttgacggggactttcgtccccgtcgcggttttcctactgcttacactgtaagaacgccgcaaactccgctccccacaaattcagccggaactcacacaacgagccgtgtaacatccagatggtgaagattaccgtcatacaaattgtgacggtgatgagcgatttttgcgacatagcgcttgcctcctgagtggagaggcgctaaccttctacttgcttaaggtatgatggttagggcctcgggttaaacaaaatgtttgactcggggcctttccacatcgggccttcaggttcaccttccagccatcagccgaaaagcacccgcgcataatctacgatttttgccctgcacgggcaacaaaaaacccgccatcacagcgggttatgacatgttgtcgggtattactcagaatttcaggccaatgcctgcaaataaaccatcagttttccagtcgccagagcctgagctttcataagtgacgtccatagtaacactttcattgaagttaaattgcgcgccgacagaccatgcaatagacgtttttttggtgctgttactttcagaaaaactaccggcaccatgattaagattgtcgttaattttcaagccagtggtgacttttgcaacccccataccagccattgcatacacactgaggtattcgttaaaccgccacgaaggaccggatagtagactccagtaattagccctgatatcagttctcgctgaagctgccgggtttttacctctcgtgatggagcggaaggcttaacatcaataaatgcctgcgcattagtcatggagcgcgcccatgtaaaagaggctataacacccagttcatcagttatctcgtaacgatacctgatgctcatccccagggggcttttggctgtgccgtcatgcccccgggcaatagcattttcgtattcacctgatgaattaaaatggtttacgtttacaacattcctgaacgtatcccggttataaacacccgcgtctctaacaaaatccttcagcccggggaagcgtatgtgtgcaaacccgagagataccgtactatcgcctgatgctgcatttacctgtgcagttaagcaactcatcaccagaactgcacacgcaaaaaatttcatgatacttttcattttaagtatttctctgaattaaaggatgcgatgtctgaaaggaacgctttcgttttacactattaaagtttttcttacgctaatcatatattgaggaactaataaccagaactttatctatatacggctttcggatatccccatgttgcaccaccggaataatgctcacaggaatatattttatttcctgtagcaccagtagatgtggtgtaaatcggtcggtcataaggtgttcgtttccagttataatatccaaccagtgcaggcataattgcgcatggatatccaagatccttctcaaacttgatatcaactggtattaacttcgcgtcaagcagcatcatttcgccatggtaaatcatctcacccgacgggttatacatggcgataccatactcagaaggttgagtaaccatattcgcaaaagcataaacagtcgtaacaccgggattcgttcccctgacaatttgatgaagccttaaggcatgatatccatcaatctgttcatgcgtgtacatgacatcggccttcttctctgttctgataaagaaaaaacaactttttcctgacggaattgacgttttaaaaaaagccttctcagtcgccggaatagttcccttattgatcagacactgaggcgtaaaccccgggcttatccacaagctgccatctggtttcgtaatgcttaaaccatacatacaactcacccccagaatgtataaatatatgaccccatcccctgctcaagatttgaccacgtcaccgtattgccattaatggttatcttcggtactttccggtccttaaatacattattcctcggaaataatgaacagactgcctgcaatgttttcccttctggtttattcgtatacgtttttgatcccgactccgccgtaaacctgtccaggaaaaatatgggagtaagcacgcccgtaacattaacgttatttctgttataaatggcaaaaccgtattccaatactcacctcctgatcagcgtaatctgcctatgcgaacagccagtcgtcca

SEQ ID NO: 655 - DNA, 1213 bp, Escherichia coli
tgtaataatcgcacaattcctgcaggggccagcgaaccatcatcgggtcaaccagttgtgtattcacacgtccgatgatttctgtaatcgtcgtcatcagaaaaacctctgcctgcgtacagggttgcggtatgaagagtacgggcttgtcgccagtgtatgacgatatgcccgacggatcccctcagaaaactgcacagaaaaatactgtgcgcgtaacggatctgaccatgaaacaccagtctgcatgaacaaccgctcaagtgcccccgcagccacttcttcaggccatgtgaggagttcatccggtatctggctgcgtccggctttcggagcgacggcataaagcacgctcacctcaccgggagaacaggcaaatcgcagggagcgtccggagctgatatccacatcccgaccgacaaaaagctcatgattatcgtcagagatacggatgatatgaacgcactcctcatcatctttgtcatacggaagcacgatttcttttcctgctactggtacaacagtaacctcccgacggcacaccaacgactggcggctgaatgccacggcagccattgacagagcatccgtcatcataatgttcagtggaccgctgatatgacgacggacatacggtaaaaaatcactcagttccgccatgctgttcagtctccgcaacacgacggcgaaatgcctcacgcacccggatacggaatgcctcagccgtttctttcgggtctttgtgaatatccagctcttctgcctcacacagcgtcgccagccgtgctgaggtgagcttacttaaatccacctcctgcccgttaacagaaacaacaaaactgttctccgcttctgcccgcgcagcaagcactctttcctgcgcctgctgtgcctgccgcaactgctcattctgttgttgctttttcagaacatcatcaagctcttcatgacgaacccagacatccggaaaccccagcagttgccaggccatcgcactgtcaacatgcaccggctcaagacgtgggaacaatgtgcggcttccggtaatggtgtcctttttcacgggttttgggccgatatagacaacggcaattttctcactcatataattccccggataaaaagcccgcatgacgcgggccggaaggttttaatcagtatcccaccacggtataacgcagcagaacattcaggggtgccggttgcagcggca

SEQ ID NO: 656 - DNA, 601 bp, Escherichia coli
ccgtgaagccgaacaggatcgccagatgaatattctgacgggggcttctgcaccggcaagacagaaactgagtgttggcggccaactggtggcagcgtaagggggcaatatgggatacggtttactggatattgcaaatcagtcgcggcgtgaggcattacagggaataagtgacgcagacagacgacgtgaagaaattgaggctgcgaacaaacagatggcggcgcaacagaaagcgcagaacaagcagaatatcggtacgggcattggtacgggggcggctattggcgcatccgttggtggtcctgttggtgctgttgctggagcagtaattggcggcattgctggttctttgttttaaggagtggtgaatgagcggatttgcacaggggttacttgccggattcagcaccgttgaccaggcaatgacccgtcgtaaggagcttggtctgcgtgaagcacagcttgcccggcaacagaaaaataacgagcgcgattttgagtttgcgcagymwsatttgccgaatatgtacttttactgtctgctctgaaatakycmmccccccctcaacaccgaggcaatctgtttatttgacagccc

SEQ ID NO: 657 - DNA, 299 bp, Escherichia coli
ggctgagggctttcttaatctcgtatccgcgtctgcggtagttatgaattagccattcggcctgttcttcagtacatggtgggtgttggtaccagtcggttttaaatgcgtgtgaacgccgcccatgccggatggcaaggtcggtatcagaattgtgaaatttggttttgtgcgccatctgttttctctgctggcgcagcaggtgtcaggtgttcaggctgacgtgcgaattgtaaaccagaatgccagaaaaaaacaaaacccgccgaaccgggttaagtgcgggtgcgttgacggat

SEQ ID NO: 658 - DNA, 224 bp, Escherichia coli
ccaatatattggcgctatcttgctggcgtaggcatcgccagttttttttttttactatgaatattgtgtttgtcgtgattcaatttttatttataacctctacccggagcaaattcaggtaggtcatgcataaaaatatctttctatactacgaaaattatttttgtgaaagtattgacaacgctaactatttttaattatatattcatgatgctctaggcatc

SEQ ID NO: 659 - DNA, 417 bp, Escherichia coli
gtgttggttataccaaagatgttgctgggagtggaggcttattttattgagcataaatcacgcaacagccttctttttcagcccacggactcagctgctgaagattttatgaaatctcatgttgagccaacgataagggatgttcctgcattgctggagctggctccatggttcggaagaaaacaccgcgataatacgctcaccctgaagcgtttttcctccggtgtggggttctggtgtctgggtggtgcggcagcaaaaaactaccgtgaaaaatccgtggatgtggtctgttatgacgagctttcctcgttcgaaccggatgttgaaaaagagggttcgccaaccctgctgggggataaacgtattgagggctctgtatggccaaaatccattcgcggctcgacgcctaaaatc

SEQ ID NO: 660 - DNA, 326 bp, Escherichia coli
tgaccgacaaatggtttacagttgatcagtgaggcatttccctaaacccatcaaactggggcgcagcagccgctggtacaaaagtgaagtggagcagtggaagtgaagtagagcagtggatgtagcaacgaatcgaggaatcctggggggcagcagcatgaaacgtgttgtaatgccggtacgctggcaatgtgcaaaatgccagcgctggtattgtggaacccggccctgcccttggtgctggcgatattcccgttcatcttcctgctgataccttccgttcagcagcgggttgttatcccttcctgactgattcgtcattccat

SEQ ID NO: 661 - DNA, 362 bp, Escherichia coli
ttttccgtccgattagaagtctcgacctcttctaatcgactgtggtaactggcttgatggagcacagataccaaatgctgtccttccagtgtagccgctataaggcttcaacttcaagagttctgcgtatctaaatccactatccagttaccaatggctgctgccagtggcgttaagtcgtgtcttaccgggttggactcaagacgatagttaccggataaggcgcagcggtcgggctgaacgggggggcgtgcacacagcccagcctagaggactcgacttatttaattgtgtaaacagggcctctccgcgaaagacccttatgcatcacctgacgttaaaaagtcactacacccaagatg

SEQ ID NO: 662 - DNA, 335 bp, Escherichia coli
atccatctggtcataatctgaagtttttttttttatccgacaagtggtgtccaccaaataagtgatctgcgcccaatatcctgagccggaactttgacaaaggccaacgaaaaatgggagcggatgttacagagttctcggtacaggggaaaagtggtacctgtcgccagttctccgatctgtttaaccgggaaattatctcctacagcttgtcagaaaggtcggtgatggagcatcgttaatacgatgctatacgatgcattcacagtgcccggccagaggatgccccgtcgctgcatatggatcagggttggcaatatcgaatcgctaggcta

SEQ ID NO: 663 - DNA, 474 bp, Escherichia coli
gtcatgggctgatgaagaaatgtggcgcaactggtggattttactgcaaacagaccctggtcggtgataagtgctggcggacaatgccgggtggaaagatgttttcgggttgccggcctggttcatcagggcaatacgtggcgttaaaaacggctgttcagtcctttatgtcgcaggttattgcaacaatcatccggtgattgtcgggaggaatatcaatgcttccgttaatttttactggctgataaagttttgtctgctgaatctttatacggaattcctttcagtatgcgtacacgaattgactatcttgcagataaatacagttttactgaactgaatgaatcgccccgtcttcgccggcaatggcaggatgtcctggatgagtgccggcagacagaggcagggcctgaagaacggttgcgtattgcactgctsaatcgattsgaattgttacagccttaccgtaccgtt

SEQ ID NO: 664 - DNA, 320 bp, Escherichia coli
gcttccgttgattcttatggactgataaagttttgtcagctgaatctttatacggaatgctcttcagtatgcgtacacaaattgactatctggcggataaatactgttttacagaacggaacgaatcgccccgtcttcgccagcagtggcaggatgttctggaggagtgccggcagacagaggccgggccagaagaacggctgcgtattgcactgctgaatgtggattacgtcaccagttttgaactgccttttcgcttgttgcttacccgtacaccacaactgattgccccccccccccggcgctgcgtgaagaatggg

SEQ ID NO: 665 - DNA, 390 bp, Escherichia coli
tcaccgtctgctgacgtctgtgaccacgcaccccgggggggggggtttttttttttaccgctgcccggtgaatgattcgccatgaaatgttcaaacagggcagttgtggatgcagagaccggttctgctttatccggcgatgaggacagaatgtcgcgggcagcctccaccgtcattccgggaaacgccgccagtttttcagcctgcgcctcagccccttttgcctcatccagagccataatctgatcacggagtgagggtcctgcatccgcctgcggtgaagccgccaggatcgggcgggctttttccaccgtcatctccggcatcgccgccagcgttgccgccagttgttcacgacctttagcctcttcacacgccataatgcgatcg

SEQ ID NO: 666 - DNA, 254 bp, Escherichia coli
cccaggctgagaaattcccggaccctttttgatcaagagcgatgttaatttgttcaatcatttggttaggaaagcggatgttgcggattgttgttctgcgggttctgttcttcgttgacatgaggttgtcccgtatttagtgtcgctgatttgtattgtctgaagttgtttttacgttaagttgatgcagatcaattaatatgatacctgcgtcataattgattatttgacgtggtttgatggcgtagatgcac

SEQ ID NO: 667 - DNA, 329 bp, Escherichia coli
gaacagaagccactggagctacctcaaaacaccatcatacactaaatcagtaagttggcagcatcacccagttctaaatattatatagtatgaagtttttatctccacttgatttttttagtaaatgatgatttttatacttttcttgtggttttaattttcataaaagcattgtacttatttttataatgcaagcagttaagttttcctgtgtttttcgttagtgacatctgtatgatcattttattacccctaagtcagtgaatacttaaatctaatgtcaacatatagaatcatcgaatacattagttttactaatgattttcgaa

SEQ ID NO: 668 - DNA, 247 bp, Escherichia coli
tgttgtccgtgccgatcaggcctgcaacatcaaggtgaaccacatcaaacggtgagatccccaccccggccgtgaatgcactgccgtcgttaccggccagattctgacggtaaccggcgcgcagctgtgcccatttccaggcattaaattctgcgccaatggcggcaaactgacggttgctgtcggaggtgaaaccgctggccggggtcagatccacatcaaatgcgagtggtgaacatcgcgttgt

SEQ ID NO: 669 - DNA, 264 bp, Escherichia coli
cgcaccagcggcaatcagcgccagaacggcagccgacaggccgtatttgattttggtgttcatggatatttatcagggtttatcgatttcaaatccctggatatgttaagtcttcaggccagcggtggagtcttcagagaaccagtaattattcccggtagttttcctctgtaggttatcaacacatcctgcgcctctaaaattacggggcgcttttccggcaacggaccatccccttcacataacccgrcgtatacgctgacc

SEQ ID NO: 670 - DNA, 695 bp, Escherichia coli
gttgagccagagataacagctacccccgtcatccggagaaacacgatccacccagaatgtctcaccattaatggtcagcgtgtcaccacgccgcacggcacgaaccgtatccgtccgcacaaataatgacgggctgcttccttcaatacggaccccgctaccggcaaaccccagcgactccggatcgtcaaaaaccccctgaacttcgctgccacactgtgcccccgaggtgaactgcgcacagagccccatcacttcaacaatcgttctgtccaccccggcaagggcagcatcaaaggaattctcaaaatcacgcataaacggccattccgctcctgaccatgtcttttgccactgaggggggcatcagaattactctgccagcatcaacatgctcaacaggctcacctgtttcatcgtcaacaccgcacaggtaaaaacacttcagaagcatgatacgttccagaataccgaaagcatcctcaccggtgttcctgtatgcctgctcataaacggtatcatcaacatctgcgatttcattttccgatgcgcaaacctcctcttcccactctgccacacgctgtgcgatatccgctgcactccccgacatatccgcctcgcgccccagcaggccagccagttcacgtaagaccgtttctgattttcttcttttgattgccatatccagccccctg

SEQ ID NO: 671 - DNA, 509 bp, Escherichia coli
caatggcaggatgtcctggatgagtgccggcagracagaggcagggcctgaagaacggttgcgtattgcactgctgaatgtggattacgtcaccagttttgaactgccttttcgcttgctgcttacccgtacaccacaactgattgccgcgctgcgtgaagaatgggacatcagccagaaaaatgtggtgttcaacgataaacgctttggctgcgtgtacagcctgaaggccagtctttccagtgtgccggatacataccggtatcatctgtctcaccgtattcgtcgcgtggttgggaatgaaaacacatcattgccatatcagcaggttgcccgggaagtgaaagtgccccgtgaacggctgaagtatgcgctggaggcgggtttactggtgactgcactggacggcctgttctggtttggcagtcagcgtattgcggctgatgttctgaggctgagaaaggccggmmtacgtacgtctgagcaatccgaatcgatgttaacaagcc

SEQ ID NO: 672 - DNA, 439 bp, Escherichia coli
ccattcagcagagcgccagacggtaccgtccatgatggcaatattcacaagaccgctggcctgatcacagaaaaggtcgatatcatatgtcgggtcgaacgtgtcacgatcctgttttgaccactccttaccgctaccttgtatgatgttattcttcgtcgatcggccaaaatcgacttcaattttctcgaactggtctccttccatcgtatatttgccatacagcacggcattcaccgcctgcatttcttccacctgcacaatagcgtgctcttcctgtttgaggttatcagtgatgatacgcagacgacggtaggccgggtcgttcagctgagccggatcttcaccgggaaggcgctcaaccgcctgctggtaattaaattcgtgtttcggcttgacgtagcccggacgcaacacgcgggtttcaccaccacggatg

SEQ ID NO: 673 - DNA, 171 bp, Escherichia coli
attcataaaatactccccgctatcaactgacgctagtataacggaagcaaatcatctgcaatgcattaagcagcaggcaaattgaggataaaaaaaccacatcatgtgggggaagacagggatggtgtctatggcaaggaaaacagggtttactactgggaacgtgagttg

SEQ ID NO: 674 - DNA, 225 bp, Escherichia coli
gtcraaccagatacgccgtgaccgtccgctgacacatgaagaactgatacgccatgtacccagtatttttggggaagaccggcacacctcccgcagtgaacggtatgcgtacattcccaccattaccgtcctggaaaatctgcagcgggaaggctttcagccgttcttcgcctgccagacccgtgtgcgcgaccgggccgccgggatacacaaaacacatgctgc

SEQ ID NO: 675 - DNA, 270 bp, Escherichia coli
cggagcagattgcgtatgttgctcagttgcagcgttccggcgatgaagccggggcattgcaggcggcgaacgaggccgcaacgaaagggtttgatgaccagacccgacgcttgaaagagaacatgggcacgctggaaacctgggcagacaggacagcacgggcattcaaatccatgtgggatgcggtgctggatattggtcgtcctgataccgcgcaggagatgctgattaaggcagaggccgcgtttaagaaagcggacgatatctgga

SEQ ID NO: 676 - DNA, 228 bp, Escherichia coli
atgacgccgagccgtaatttgtgccatgcatcatcccctgttcgacagctctcacgtcgatcccggtacgctgcaggataatgtccggtgtcatgctgccaccttctgctcagtggctttctgtttcaggaatccaagagctttcactgcttcggcctgtgtcagttctgacgatgcgcgaatgtcgcggcgaaatatctgggaacagagykttttttcggcaataag

SEQ ID NO: 677 - DNA, 239 bp, Escherichia coli
cgctatgtcgcaaaaatcgcttacggccatcatgttctgcgtgacggtaatcctcatcatctggatgctacacggttcgctgtgtgaaatacggatgagcttctggggagcggagtttgcggcgttcttacagtgtaagcagtaaggaaaccgcgacgggggagcaatcccccgtcaatcggttgctaaggttggctgaagtggcaccctatctcacagacatgaacaacaaacccgca

SEQ ID NO: 678 - DNA, 215 bp, Escherichia coli
gagccgggtctgtaactggctgactgccggaaaactgatttttacggtaaagccctcatcctccaggcgggcattgatgcgaccggcaatgttttctgtggcgtacagggccgtgccacgaaaacctgtttcaatcccgctgacgattttctccagctcaggccggaactgtgcttcagcctcacggtgcaggctggtcacggtcgattcgattt

SEQ ID NO: 679 - DNA, 395 bp, Escherichia coli
cactgagggggggcatcagaattactctgccagcatcaacatgctcaacaggctcacctgtttcatcgtcaacaccgcacaggtaaaaacacttcagaagcctgatacgttccagaataccaacgtcatcctcaccggtgtgcctgcatgcctgctcatgaacggtatcatcaacatctgcgatttcattttccgaggcgcaaacctcctcttcccactctgccacacgctgtgcgatatccgcagcactccccgacatatccgcctcgcgccccagcagaccagccagttcacaaagacgtttctgattttcttcttttgttgccatatccagctccctgtgaaaaaaacacgggggcatttcgcccccgctcacggattatttcacctgtacc

SEQ ID NO: 680 - DNA, 124 bp, Escherichia coli
cggctatccgcatccgtgcatgcggccaatgtacaactttctgggaaaattcaaacccgaaccccgggaagaaacagaataaaacgaaatccctgccggcaatcacactgcctgatggcagcat

SEQ ID NO: 681 - DNA, 184 bp, Escherichia coli
cgctgccgcagatattcccgtggcgagcttcatggaaggagatcactcaataacgtccatcgagatcgggtaataaccctctgtgtcagcatagttgtcgcctcaattttttaaggagataacaatgctaggtgaactcaaagagaaaggactgatatggctkcctttgccaccatactgctgg

SEQ ID NO: 682 - DNA, 205 bp, Escherichia coli
atcgaaacaggaagtacaaagtccctgacctgcctgatgcatgctgcaaattaacatgatcggcgtaacatgactaaagtacgtaattgcgttcttgatgcactttccatcaacgtcaacaacatcattagcttggtcgtgggtactttccctcaggaccgacagtgwaatcagcaatcacctacaaactctcgcacaaaataac

SEQ ID NO: 683 - DNA, 360 bp, Escherichia coli
gtgattaattttgcgccgggtacgtttaagggaagtgtggtgagacttccggcagcaaccgggcaaaactggcaggtgatggtatccggattcgggcaggtggaacgaataaccctgagtacatcgatgtcggagatgccggtatgaccagaaaaccgtggcgtgcggggaaggatttatccacagttgtggagaacatggaaattggcaccgggcagcgtggtgacggacgccacgcatttgtgacccgtgaggaactggttggtcttaaactcgcccggcgtcgaacatcgggtggtgcctcatatgcactgaatccgggtattgagattgacagtactttaatgactgttgattttc

SEQ ID NO: 684 - DNA, 198 bp, Escherichia coli
accgtcctctgccacataagacgttttcgctaccacaatggccagatcgccgtaataccccttgaaggataccactgcgcccagatctttcactgccgtttcgagttgtgaatttgaaccgcgacgggtatccattttttcgcggaaaagcttaaagccattcagcagacgccagacggtaccgtccataatggcaat

SEQ ID NO: 685 - DNA, 215 bp, Escherichia coli
acagcaaatgctggaggaagaagacgcagaacaacgaaggtctcagtccggattatgggggaaaatttctcaatggtccggtatcaacaaccagggccgggaggattacaggaaacgagattttgccccggacagccccgaaataaaattcagtgatcgcagggaagcccttgaactgatgacgcaaatcgaatcgaccgtgaccagcctgcacc

SEQ ID NO: 686 - DNA, 174 bp, Escherichia coli
caaaactcagctcaccgtcgaacactttcccgcagaaacaggctctgcgggcccggcgtcctctgtctgttcaggggcattattcacaacaaactcatacataccagacagccggtacaccacgttttcagcatgagaaattgcctccgtgggccaggtggtaagcacttcctg

SEQ ID NO: 687 - DNA, 161 bp, Escherichia coli
tttgccgcttttgcgatcaaaggttttgacaattcctgtcattttacgggacaaacaaattccttactgaaaatactgcgctgcactatacggggttaataaaataaagccagcgatatttaagaccgccggacggctaaaataaaatttgcttaatctca

SEQ ID NO: 688 - DNA, 203 bp, Escherichia coli
cattaatcatagatacattaggaataacaattaaatccgtgagtgccgtagcgcagcctttcatcaggactttcgaaaaatccgaaatcatgcatcggaatttactgatttaattattttaatcctaatttattttgaaaaaggcattgggatttatgccgtattcctgaagatcctcatcattggaatggattttcgggcga

SEQ ID NO: 689 - DNA, 154 bp, Escherichia coli
tccatattgtcttacttccttttttgaattactgcatagcacaattgattcgtacgacgccgactttgatgagtcggctttttttgcctgttatttatcagcgtctaccctttaagagtccacccaatgaccggagggaaatatgacgacactt

SEQ ID NO: 690 - DNA, 222 bp, Escherichia coli
cacgcgagaggtgtttggagtaacgttatgcgacatggtcattctcctttacggtgataaccgtcgcgtaagcaaaaaattgccccattttttggattcctcagcgacaacaactgtcgatttttagtaaatatctatccggtacgaagcccggcctcttggtatgaatgattgttgaagcaaaaaataccgacgatgaaacgtgcggttttagtcattttt

SEQ ID NO: 691 - DNA, 262 bp, Escherichia coli
tttgggggggggggtttttttttttcccccccccccaaaagagatgtgagaggtcggatsragsmtatccggaaaccgctggcagcacgtcaggcactgacccggtcagaggcggtattgcagaaaagcctggatataacggaagaggcagatttggcactgagaaacgcgatggcccggattaaataaagacgccccaaagaaacgccaccgcctgtggtggtgtttttcctgtctggtgttattgaaaatattttcagat

SEQ ID NO: 692 - DNA, 199 bp, Escherichia coli
ggtcccacctcactaggttgttgacgataattttactgccaaatttgcaggggcaattggttttgtaattccagttcagtcccctgaagacgttgatcacccctcgctcaaacacctcatccttattctggtgtagtttgttcaaattgttccaaggcacgtatttcctattcgaattcgtgctcagtgacgtaccatg

SEQ ID NO: 693 - DNA, 207 bp, Escherichia coli
tgcagcatattcccctggacaaaagccccttcctccgtggtggcaccgttaatggcctcaaccacctgaatacccttaccggtggtcgccagccccgtaccactgttgccggcgttcaccagattcaggatggtttttccggttgccctgccaccgtcaatgaccagtctgtcagcattgttctgcgccatatccgggcatacacgg

SEQ ID NO: 694 - DNA, 144 bp, Escherichia coli
ggcagggagaaacgcagcaaaccgtaagcggcagttttcagcaagatccccgcgaggtcaacggaaccggcggtcggagcctgagactgccaaggcacacgagggactaggccgcacgctctcgagatgcaccatttttttttt

SEQ ID NO: 695 - DNA, 304 bp, Escherichia coli
tcagacgtgctacagcatttgctatttctgttatcaatgataaagcaacaattccactattgattaatctgttaaaagatccaaatggagatgtcagaaactgggccgcatttgcaataaatatcaataaatatgataatagtgatattaggggattgttttgtggagatgctttccaggggggaaaaaaatttttyccccccgggggaaaaaatttttccccgggraaatttgggccctttcccaagagagcagtatataagtcgtattcagtttttgaaactggtgaccgaggcggacggca

SEQ ID NO: 696 - DNA, 96 bp, Escherichia coli
ctgattctatttctttaacggatagaggtttggtttgtcttgccattgccgggtttccatagtttagcacctcaaaacaataagcttatgtaggtg

SEQ ID NO: 697 - DNA, 188 bp, Escherichia coli
ggcggtgtgtttccaggcggtgctgggtgcggcgttgattgctacggcaatctggatgccggggatcagtatcgctttcagtgacattctcttttcaatgggtgcggcgatgacgcttggtggtgtggcgcagatgctggcaccgaaagccagaactccccgtacacagacaacggataacggcaaac

SEQ ID NO: 698 - DNA, 128 bp, Escherichia coli
gatggaagttaagtaatcctgtaataattacttacatctgtctgataaaaacccgcttttgaagcgggtttttgtatcgaacaagatattgaggagcgtcctgctcgccacgtcactctttatgagag

SEQ ID NO: 699 - DNA, 198 bp, Escherichia coli
cgatgttcctgaaaaaccgaatcatttgaacataacggtgtgaccgtcacgctttctgaactgtcagccctgcagcgcattgagcatctcgccctgatgaaacggcaggcagaacaggcggagtcagacagcaaccggaagtttactgtggaagacgccatcagaaccggcgcgtttctggtggcgatgtccctgtgg

SEQ ID NO: 700 - DNA, 133 bp, Escherichia coli
gaatgaatgtagaaagtgttttatttatagataaggagagtcttcgatagtagtgaggttgacagatatccgctgcctgatgagcaattatgcaatgaatctacctcattgggcataatttggaacacatcag

SEQ ID NO: 701 - DNA, 159 bp, Escherichia coli
tctaccagatgccggggatcgccggaaactgtcaatttcgatcacatccgtaatcattacttccgcagccataagaccatcaatacggggattatttcaattggtccgtggcaggatctcgatgaaccgcatggacgagatgttcgcttcggttaaaaa

SEQ ID NO: 702 - DNA, 138 bp, Escherichia coli
cactcgtaaaacaggttcgccatccaccaccgttttctgctcgatgggggggcctgtttcgctggatgttcaagcgatatcaacgggaaacgtcggggataatctaaccctttcatcgcaccaagttgcggaacagca

SEQ ID NO: 703 - DNA, 119 bp, Escherichia coli
tggcaacgtgcaaactcagacatattttccctgatttgctggtaggtggcattaaaagcatgaagaatcgcttcgccaggtttttgggggttatgatttcacattgtgatttctgaaca

SEQ ID NO: 704 - DNA, 130 bp, Escherichia coli
cgaaatcgcactgcgtagctgatcttcgttgccagacactttgaggccgttatctatctcaaaggtaaatgtctgtttttctgactcagagtctgagcctcacgctcaacaacgcgcagcatcatcggca

SEQ ID NO: 705 - DNA, 263 bp, Escherichia coli
tggctggcagatgctggcgtcgacatggttaaacttcacgaacagcagcagaagcggctgtgtgaaagtgaaatccgccagcaactcatccgggaaggcgtgttgcgtgaggatgaagatatctccgtacatgcggccagaaaacgctggtatctgcagcgcagcctggatgcgctgaaacaccgtcgtgcaaaagcggcagccagtaagcgcgccagaggtctgaagaaattacctgccgaccagcagatttacgagatgtc

SEQ ID NO: 706 - DNA, 137 bp, Escherichia coli
ttattacactattcaaacagttgcccatactccctgaaaaagaaatcattgaaataataactgcgcagaatagcgtttggtacacctgctttatttctggctatgatgaacakgacwamstaaaacttttttttttt

SEQ ID NO: 707 - DNA, 93 bp, Escherichia coli
taacggtagggaagctgcgtgttgagcttgaggagacaaatcaaaactcaacgagcagcgtaagtattacgaaggtgttatctcggatggaag

SEQ ID NO: 708 - DNA, 472 bp, Escherichia coli
ggcagatagtccggctgctctgaaggcggtgtatgacatggcccgcaagggtgcccgtgatgaaattcagacacagatgcgtgatggtggactgttctccggaggtggacgatgaaaaccttccgctggaaagtgaaacccgggatggatgtgacatcggctccttccgtcagggaggtgcgctttggtgatggctattcccagcgtgcgcctgccgggctgaacgctgacctgaaaacgtacagcgtgacgctgtctgtctcccgtgaggaggccacggcgctggagtcgtttctggctgagcacgggggctggaaggcctttctgtggacgccgccttatggttacaggcagataaaggtgacctgcgcaaaatggtcgtcgcaggtcagtatgttgcgtgttgggttcagcgcagagtttaaacaggtggtgaactgatgcaggatatccggcaggaaacactgaatga

SEQ ID NO: 709 - DNA, 398 bp, Escherichia coli
aatgagatgtttaatgctgattatactccagaagtgagtcaccaccctcgtctacagagccagatgtgaaggatgataagtaaaattatcgctatcatcgaaggcattgcgtcctgatgtattcctgaagcgttctcagtgctgtctggtctctgatgattccgtcccggataccgagaacgtttcgtccagcaactggagagagttcgacggtggcatcattgcccatgccggaggcgctggaggtttcggctgaggatggcacagggcattttcctttgacgagcaccctgccaccattatcaagcttgcgacgaagagcatcattttcagctttcgcatcagctaactccttcgtgtattttgcatcgagcgcagcaacatcacgctgacgcatc

SEQ ID NO: 710 - DNA, 104 bp, Escherichia coli
ttgctcgtggtaaagatgccccgtctaacgcagtgctccttaatgaaaccatcgccgactacactggcgtgccgatggagactcctcgcgctatcgcggtattt

SEQ ID NO: 711 - DNA, 666 bp, Escherichia coli
cctggttcctggcagttgctggacagggtttccccgttctcagtgggcggcaataggcgtgctggggagtctgctgtttgggctgctgacgtacctgactaacctgtatttcaaaatcaaagaggaccggcgtaaggcggcgcggggagagtaagctgatgagcaggaaattccgctatggtttatcagcggtcgttctggcgctgattgctgcgggcgcttctgcgcctgaaatcctcgaccagtttcttgacgaaaaagaaggtaaccacaccacggcataccgtgatggtgcgggtatctggactatctgccgcggtgccatcctggtggatggcaaacctgtcgttccgggcatgaagttgtcgaaggaaaaatgcgaccgggttaacgccattgagcgtgataaggcgctggcatgggtggagaaaaacatcagagtgccattgagtgaaccccagaaagcggggatcgcgtcattctgtccgtacaacattggccccggtaagtgttttccgtcgacgttttataaacgaattaatgcaggtgatcgcaggggagcgtgtgaggcgattcgctggtggattaaggacggtggcagagactgccgtattcgttcaaacaactgctacggtcaggtatcccgtcgtgaccaggagagcgcgc

SEQ ID NO: 712 - DNA, 809 bp, Escherichia coli
acctgaaaaacgccgtaatcgatgcagtggtgattaatcgaccccccccccccrtgatcgccagcgtcgccagaccattgtcctcaatgctgaaggtgataatggtgaactgaccaatgatatttcaaggttaaatacacatattgcgctggcgcctgttcagcagacaccggcgtttaaggcacagcttgcacagagaatgtcagaggttattcaggggctgccgcctcaggtgcaggctgttgtgctcgacctgtgggttaatcttctggatgtgccgcagaaacaggagtttgttgagcgtattcgtgctgcgctggggacgccaaaatcaccggatgaaatgacgccggaagaacaggaagtagcggcacaacaacaggcacttcagcaacaacaggcagaactccagatgcgcgagatggctggcagagtggcaaaactggaagctgacgccgccagggcacatgcagctgcacaacgggataatgccagtgcacagcgggaagtcgccctgacacaggggcagcgttatgtggatgcgcttaaccaggcacatacggcagaaatcattaccggcgtacagaatatggaacaggagcaggacgttcttcagcaacagatgctgtatacgttacaacagcggatgaatgaaatgtcgctctgaaaactctggcttcaactgaaccccgtcatcgtacggggttttttgtttccggaggtaagcgttccgggagcggtgcgcttattcgcgggggcagcgataagccttatttactcaaccattcggatctgtccgataaacagac

SEQ ID NO: 713 - DNA, 88 bp, Escherichia coli
gtgtaaacgatcttttcaccgtcgggaccgtggcctctatattgcagatgctgagcactgccaaggcacacgagggatagcgagtaga

SEQ ID NO: 714 - DNA, 130 bp, Escherichia coli
gttgcgtgaatcacatttctgaaccggacactgaaattccgccgggcttcagggggtaagtgttaatttctggtcatgaggtaatttcaggagggcttgtggcaaaagttttwtacaccgactgcccata

SEQ ID NO: 715 - DNA, 381 bp, Escherichia coli
gatttcgctgcggctgctgctcgatggagaaccggaaccgcaatgaaagccatcacatcgcaamtctcgatcgcgaatctggcgtgacctgatgcaacgttcagggatgctttccttaatggatgcacaggcccgtgatacatggtaccggtcactggagcacgataattttccggaaatcagtgaagcgaacattctgagcacatttgaacaactacaccagaataaggatgaggtgtttgagcgagggggtgatcaacgtcttaaaaaaaaaaagcaggggactgaactggaattacaaaaccaattgcccctgcaaatttggcagtaaaattatcgtcaacaacctagtgaggtgggaccggtgggggtttcatctta

SEQ ID NO: 716 - DNA, 157 bp, Escherichia coli
aacagaacacttccttttacattactcaatgaagatgacgcatgcgccagcatcgctttaccattttgtctgagactgccaaggcacacagggatargcccacatcatagctctggtttagtttttttttttatgctacgacgcgatcaaacttttt

SEQ ID NO: 717 - DNA, 112 bp, Escherichia coli
aatctcttgtaagtaagcattacataaactatatggcaattaccagaaagtgatggagtttttacatggctccagatttttcgcacgtagcgtgatatatcatatcacaatg

SEQ ID NO: 718 - DNA, 158 bp, Escherichia coli
catggccggagagcgcacgttcttccggcgtttaaaagagagggctgaccggcgaaggtgctgcacggcagaatgccatcaatgctgcgcttgcacagggcgttgagtcatccctgcgctggctgacggaactgacaacgtcgcttgccaccacaaac

SEQ ID NO: 719 - DNA, 87 bp, Escherichia coli
gatcgcatcctgaagcgcaccagccacatcactgtggttgtgtccgatcgctgagactgccaaggcacacagggaataggacaagta

SEQ ID NO: 720 - DNA, 101 bp, Escherichia coli
gttggcggttgagcatccctaacgctgcgacctgtaattgtgaaccggcatctaacaaatcggcctgagactgccaaggcacacagggataggcatgcccc

SEQ ID NO: 721 - DNA, 126 bp, Escherichia coli
ctacaactggcgagatgcatagcgagtataatttgtattttgcgtggcattccgtgcctttaacgctgctgagactgccaaggcacacagggatagagatagctacatatgtatttttttttttaa

SEQ ID NO: 722 - DNA, 117 bp, Escherichia coli
ggcgtcgttgatgccgccgcaccgctttgatcgctgctggttgattgcgccgctgcaccaccgctgctgagactgccaaggcacacagggcatagctgcatttttttttttacactg

SEQ ID NO: 723 - DNA, 154 bp, Escherichia coli
gcatcgtcgccattccgatattgttcgcgcgatttcggtttatgatgaaaataaccgactctttgtcacctccaattttcatcttgatccctcatcaatgcagctcggcagcaacgtgccgtttcctcgccagctcactgtcactcgtgacggc

SEQ ID NO: 724 - DNA, 167 bp, Escherichia coli
atctaaatcagacgcaacaacctggtacataagaaatttaaacctctgtagagcggtttccgctgggtgagttatgcctgttgaaaaatcaacgatggcgtggagcgcgactgagcgcattgcgtccttttcaaaaaggatctcatggtaagcacctttaattacca

SEQ ID NO: 725 - DNA, 114 bp, Escherichia coli
gatttattcataatgattatccataaaatgaaatcaggcggactggccgcctgaaggtgttataagcctttaataagcttagcaagagatgttaatttttcagtaagctcttac

SEQ ID NO: 726 - DNA, 188 bp, Escherichia coli
cacagctgaaccattctcccagtctggatttttggatagcgtggcatttttctccaccatgcatgcatgcatgcagtgagtccagtaacagtttgctcttcttctgcctgaccacaagatgtgctggactggtaaacgatgggggatattccggatgttaccaagccttaccggtaaccgtccttgag

SEQ ID NO: 727 - DNA, 137 bp, Escherichia coli
ttttcagcaataagaccagaaaacgtgatttaacgcctgatttgtcgtacctggagtcttccctttctccgtctggtctacatttggggggcgaaaaaaagtggctatcggtgcgtgtatgcaggagagtgctattc

SEQ ID NO: 728 - DNA, 272 bp, Escherichia coli
tattcctgggcgtagcgctcttcttttagggaaaacaggagaaccgccgaactatctctatttataatttaatgttatatctgcgataaaacggggcagataatatgtttagtttactaacggtcattttgcagtgaagccatttactgtttttatcgaccagataatctgttctctaatgttaactccccctaagtacgtcctgagcatccgatcgatgttacaaggcctaccgtaacgttccttgagcaatccgaattccgatgttacaa

SEQ ID NO: 729 - DNA, 158 bp, Escherichia coli
tttgataccgcccaggctgttttccagtttctccagctcacgagtgcgcatcagcgcttctttcttggtcagcttttcgaaagtaccgtcctgagactgccaaggcatcacagggatdagagatgtgctgcatatcggggggggggggctcgcttttt

SEQ ID NO: 730 - DNA, 121 bp, Escherichia coli
tgatttcggtggaattcagttgcatgctccagtcccttaagactgcaagacgtctgcaaggcgctcaagacgaccgcgatacgctgccatcaatgaccatatcacccgctcggatgataac

SEQ ID NO: 731 - DNA, 149 bp, Escherichia coli
ggagtcattacccctctctgatggctgatttactggtgaaatgcatagactcatttctgaatatttgcagtgtaagcgacgtaaagatcaatctgttgagcccccttatattatctctggagcagggagctgtggctaacgataccact

SEQ ID NO: 732 - DNA, 97 bp, Escherichia coli
cttctaccgctacgatctttggcccgaataagtcggttatttgtatcttcatcgagatacactgagactgccaaggcactacagggactaggcatac

SEQ ID NO: 733 - DNA, 151 bp, Escherichia coli
atgccggtggtgaccacgaccgtggaggtgcacgataacctgacaggaacaacccgcaaagtaccggcataccatctctgatacaaccatcagggggaatattgctctggcagcagcagtacgacagttctttatactttatcccstgctg

SEQ ID NO: 734 - DNA, 209 bp, Escherichia coli
aataaacgcccctgttaatgaatatctggcatgttgtactaaaatcgatgtttgctttgacaatccctggtgtttgcgaaaacattcgaggaagaaaaaacagtattcttatatgcgcataaccatgcatgtaaataccatgtttaccgtgctagtgaaatctacgtatggcgtggacagacattcgtgatgtcgatagctgccacaag

SEQ ID NO: 735 - DNA, 165 bp, Escherichia coli
cagcacctgtttgaatcgctatgcatcgatcatttgcaacgccacggggccagcaaaaagccattacccgtgcgtttgatgacgatgttgagtttcaggagcgcatggcagaacacatccagtacatggttgaaaccattgctcaccaccaggttgatattgatt

SEQ ID NO: 736 - DNA, 160 bp, Escherichia coli
actccatcatcactacttttgcccaagatggtgccatgccgttttatcgaatcatagatcaacggcccaccaccgacaacataaacacgattcacatgatggaaatcaccgagctcattgactacttgctcccccaaactggcaatagccccctcaatgg

SEQ ID NO: 737 - DNA, 265 bp, Escherichia coli
ttggccttccaaaggaaccgggtttaaaccggttaaggcttggttaaaccaattccggaattcgggaatttggccttccaaggaacggttaaccggttaaggcttggttaacaattcggaattcggaattggcttccaacgaaccgyagttattttggctatatgcagggctttggattgttcccctcctgccgcaatctttccgcaattgtcattaaactctccttgtgtttcggtgaacgttcggcaacgccgtcgataaatc

SEQ ID NO: 738 - DNA, 128 bp, Escherichia coli
  modified_base (118)..(118): a, c, t, g, unknown or other
aggtctgcacctgagcgatggtgtcatccatcagctttttgaactgcggatcatctttacgcaacatacaaccgtaggcctcctgagactgccaaggctacacgagggatatcggctntgcgctgcaa

SEQ ID NO: 739 - DNA, 150 bp, Escherichia coli
gccacctggcgatcggcaaacgcctcacgcaggctgtcaataagctgttgctgggcctgagactcgccaaggcacacagggataggcatatactmtgggggggggggaactcgaaatgttgcagtcaactctggtcgctgatcccacaat

SEQ ID NO: 740 - DNA, 157 bp, Escherichia coli
gcccactaataaagcactaaaattaatcatgatacggtatgcatactgaactcaatcccgggacactatttctgataaaaatatattctcctttattattaagcgcctcaaatcgtccatcaggtgttgcgagataaaatgcttcaagattattatc

SEQ ID NO: 741 - DNA, 156 bp, Escherichia coli
cggcaggtaaattttccgggtattccgggtcgtgcatcagccacaccgccgaaagacggataccgctgtcagtgccgtattccgtaccgggcagtgtgtcggggaacgctgaggctgagagagggcggsgtgtgtcaggggaagataaggaagcgg

SEQ ID NO: 742 - DNA, 134 bp, Escherichia coli
gattcggaaattactgccgcacgtaattatgccgaaggtgcgggcggcttttttaaaggtatcgatgccttaccgcttaccgggcaatacactcactatgcgctgaataaaaaccggcaaaccggactacgtca

SEQ ID NO: 743 - DNA, 136 bp, Escherichia coli
cggaaggtcagcgacgctggcgctgccggaattctgaacccgatgccggaaaggtgcttaatacgcggctcgccagtgacggtcttctcagacaataaacgtcattcatttcacccatcaggccgcgtcttctccg

SEQ ID NO: 744 - DNA, 717 bp, Escherichia coli
tgtgtaacagacaacgcgcttgctgataaatagctttacctgtgatgttatcagcgcaggcgaaaaaaaaaawtctccccccccccaaaaaaaaaaagaccagccacgcgtycgggcgttgttacgcctgtcagtgacatcgtgtcatcgctgcatgaaatgagtaattcggggagactggatgacattccggaagaatgaaccgcgatgtgatgagccgtcagaaatgaccgaggctgaacaacgtctgttcatcatgactaaactgagcaatccctggtggcggctcaatcatctctacaaaatacagaacgaaaaaggtgaactggtcaccttcagaatgcgaccggcgcagcgccagttgttccggagcatgcacaataaaaatattatcctgaaagcacgccagctggggttttccacggccattgatatttatcttctcgaccaggcattattcataccgcatctcaaatgcgggattgtcgctcaggataaacaggctgccagtgaaattttccgcaccaaaattgctgtaccgtttgatcatcttcctgactggctgagagcctcattcaccatcgttgaacgtcgtagcggagccagcggtggctatatcctgtttgggcacggctcgagtatccaggtggcaacctcattccgttcaggtacggtgcagcgcctgcatatctcagagccacggcaaattggaaaaaa

SEQ ID NO: 745 - DNA, 474 bp, Escherichia coli
tgcgcagagggaaactgatatcgaaacgaaagctccgcaaagaactggacgatttgcgtgcggcagcggagtcagatttacaacccggcaccattgactatgaacgctaccggctcacaaaagcgcaggcagatgcgcaggaactgaaaaatgcccgtgaagacggagtagtgctggaaactgaactgtttaccttcattctgcaacgtgtggcacaggagatttcggggatacttgtgcgtgtgccgttgacattacagcgtaaatatccggacatttcaccatcacaccttgatgtggtgaaaactgaaatcgcgaaagcctccaatgtttcagctaaggccggtgaaaacgtgggcgggtggatcgatgatttcagacgcgcagaaggcagctaatgcagccggtgcgatagcaacagggcttttatctctcattattcctgttccactgacgacagttcagtgggccaat

SEQ ID NO: 746 - DNA, 465 bp, Escherichia coli
gtcatacaccacgtcagcggtgggaacgggctactggttcctgcagttgctggacagggtttccccgtctcagtgggcggcaataggcgtgctggggagtctgctgtttggtctgctgacgtacctgacgaacctgtatttcaaaatcagagaggacaggcgtaaggcggcacggggagagtaagctgatgagcaggaaactccgctatggtttatcggctgccgttctggcgctgattgccgcaggtgcttctgcgcctgaaatcctcgaccagtttctggatgaaaaggaaggcaaccacaccacggcataccgtgatggtgtgggtatctggaccatctgccgtggtgccacccaggtggatggtaagcttgtcgtccccggcatgaagttgtcgaaggaaaaatgcgaccaggttaacgccattgaacgtgataaggcgctggcatgggtggcgaaaacat

SEQ ID NO: 747 - DNA, 582 bp, Escherichia coli
attctcgttttgataatcagagattataccgtcaccagtcgcccctccgctcagggggattcaccatgcagttttttctaacaaattctcatccgggcagacaacattcaactgacttaattgtgaggtatgtaacattcccgttgaacggatacaaaaaagccagccgccaggggaggctggcaaactcgtagagcaaaatgctgttacgcaaacttcgttacagggttatcctgcaatacttaaaatatacaatatttagaaaactaatagtgccatatgagatttttaagattttgttattaattgcggtcgtaccttcctttctgtgtactttccgtatagctcacaggattctgggtacaaaaaaacccgcgcatcggcgggttcggctgcgtggcaatgtaaccactcttatcatgatatgcagatttttacgatcgtaaactattttttcgctgataaaatacagagcttctccctcccggcaattcacgctcaacataccgatccatctcaagcctcactcccagcatcatcagcatgccttcaacaatccctccgctttgtgaaggcgtttac

SEQ ID NO: 748 - DNA, 366 bp, Escherichia coli
tttttcgccgccgccatcagcgtgttgtaatccgcctgcaggattttcccgtctttcagtgccttgttcagttcttcctgacgggcggtatatttctccagtggcgtctgcagccgttcgtaagccttctgcgcctcttcggtatatttcagccgtgacgcttcggtatcgctctgctgctgcgcatttttgtcctgttgactctgctgctcagccttctttcgggcagcttcaagcgcaagacgggccttttcacgatcatcccagtaacgcgcccgcgcttcatcgttaacaaaataatcatccttgcgcagattccagatatcgtcgcttctaacggcctctgcctaatcagcatctcctgcg

SEQ ID NO: 749 - DNA, 340 bp, Escherichia coli
aaaaaaaaaagattaatgttcagttgcaaaaagtcggtcggctttcatcacaaaagcaggggcgatgttctttttcgtgcattatttaaccttcctaagacgcattttcatgacaaccacggaggaggtcatttactacaaacgatcgtttataacgatcgatatgatagtaacgatcgatgtattctattaacttgagaaacacaacgcaaggggacaacccgggtatggctgcgtttgcatagtgttttcatggagttaaaaatctgtaaacaacagcctggtacatcaccaccggtcagaagaaacagtccatacgcgcggcaacagagaccaccga

SEQ ID NO: 750 - DNA, 179 bp, Escherichia coli
tctggcaggtcgccgctgctacgccagcgagtgcagcagaacatcagtccacgctgagcgcggggtatctccatgcctcgacgaacgttcccggtagtgatgatctgaacgggattaacgtgaaataccgttatgagtttacggacgcgctggggctgattacgtccttcagttatgcc

SEQ ID NO: 751 - DNA, 253 bp, Escherichia coli
aaccggcgggcaaatatgagccagcggggattgttcaccgtggtgaatttgtcttcacaaaggaggcaaccagccggattggcgtggggaatctctaccggctgatgcgcggctatgccaccggtggttatgtcggtacaccgggcagtctggctgacagccggtcgcaggcgtccgggacgtttgagcagaataaccatgtggtgattaacaacgacggcacgaacggcagataggtccggctgctctgaag

SEQ ID NO: 752 - DNA, 439 bp, Escherichia coli
cgtccgggtctggctgtttaccgccagcacgcgcccgccgatgctgataccggcatagtcatcatcacagatttcaatgacatcgcccggcacatggcgaagcccttctgcgcccacgctgaagtccacggtctgcgtttccagcagttctgttttaatcagccacagcccggcgcggtgtgcctgcccccggctggtacagccaaaagcatccatcttcgtgacgttacgaccgtaacgggcaatggcctgcgtatcctccacaagctctgtcgccgtctcccagccgttgttcgggtcaatccagttcacctcaacggcattatggcggtctttcagggcgctaaagctgtagcggaacggcgcgccatcatccggcatcaccacattactgcggttataggtccacaccttatccgacggtcggtcctgcaacgaa

SEQ ID NO: 753 - DNA, 179 bp, Escherichia coli
ttcagccagtcatcgcgctgcgcacgggcactgcgtttatccggatgatgtcgctgttgctgacagtggtaatacgttgacggggcaatatgcagttcactgcataccggtccgaccccgtacagcttacgcagcttatccagcagtggcatcactttttccagaggcggtcgaactcc

SEQ ID NO: 754 - DNA, 241 bp, Escherichia coli
aacgatcgttgtagtaatgacctcctccgtggttgtcatgaaatgcgtctcagaaggttaaataatgcacgaaaagaacatcgccctgctttgtgatgaagccgaccgacttttgcaactgaacattaatctgctccggcaaatggttgaggagccagatgtgttatctgacagtaagaacgaaaacagactgctttttgataaacagaaagcactgaaaagaattgaggagctggagggc

SEQ ID NO: 755 - DNA, 217 bp, Escherichia coli
cccaatcggatcctgagtgatataccgcccctgcagcgggtcataatagcggtggcggttgtaatacaggccggactcctcatcatactgctgacccggcaggcgaatgagctgctgcagatgatgcgggttctcatcactcagcaggttgccccattcatcatattctgcgcaccacgctgttgcccttccgtgctgatgagcgccagcggcaggc

SEQ ID NO: 756 - DNA, 256 bp, Escherichia coli
accgaggtgctggcaggctcacggtcatgccggtgccgtgttaccgtgctgcgatcttctgccatcgacggacgtcccacgttggtgactttcaccgtgcgggtgatcacttccttcgccgtcaccgccttaccgatactgctgacccagccgcggaacacatcgaccgtgccgttcgggaagcggattttataggcacgggtatccccttcattaaaccacgccagcagcgcctgctgccctgctctccgggcat

SEQ ID NO: 757 - DNA, 202 bp, Escherichia coli
accaatgtgggacgtccgtcgatggcagaagatcgcagcacggtaacagcggcaaccggcatgaccgtgacgcctgccagcacctcggtggtgaaagggcagagcaccacgctgaccgtggccttccagccggagggcgtaaccgacaagagctttcgtgcggtgtctgcggataaaacaaaagccaccgtgtcggtcagtg

SEQ ID NO: 758 - DNA, 207 bp, Escherichia coli
tgtccgtggcgctctcttcccactcactccagccggacttcaggcctgccatccagttcccgcgaagctggtcttcagccgcccaggtctttttctgctctgacatgacgttattcagcgccagcggattatcgccatactgttccttcaggcgctgttccgtggcttcccgttctgcctgccggtcagtcagcccccggcttttcg

SEQ ID NO: 759 - DNA, 218 bp, Escherichia coli
gggccaataaacattattaccttcctaaagagtcgtcttataccccggggcggtgggaaacactgccgtttcaggttgccatcatgaacagcatggggaatgaccggatccgcactgttaatctgattaaatctgcccgtgttggttatacaaagatgttgctgggagtggacggcttattttattgagcataaatcacgcaacagccttcttttcca

SEQ ID NO: 760 - DNA, 156 bp, Escherichia coli
gttcatttaagcatccatgcccgccctgaactccgggcacactataggtcacatcaccgcaccacacctgatttggctcggtcacggcgaactgcctttcaaggtagttagggatagcaacatgttcatgaccactacgtttataccggtgagtcg

SEQ ID NO: 761 - DNA, 234 bp, Escherichia coli
tcgcgatcggtggatcaggtaacaccatttatgttgtcgcccggcattaccatctctacgccttccggcagttcgatggtaccagtcacgtcagtagtacggaagtagaactgcggacggtagcctttgaagaacggagtatgacggccgccttcatctttggacagaatgtacacttcagattcgaacttggtgtgcggcttgatggtgcccggcttagccagtacctgacca

SEQ ID NO: 762 - DNA, 273 bp, Escherichia coli
cgggttgccggtgtctgaacgcctggcggtcaggcaaatgcagagataavcgctattgggggggggggaaaaaaaaaaacccccccccccaaaaaaaaaaagcgtgagctgtatctccgctattttgccctgtccggtcgcagtccagtccgcatcttcatcatcgagatagctgtcgtcataggactcagcggtcagttcgccgggcgtcaggtcttaactttgccagacgtgaccagtcaacgtctgaaagcgggttcgcataagggtcac

SEQ ID NO: 763 - DNA, 253 bp, Escherichia coli
cctccagcgcctccggcatgggcaatgatgccaccgtcgaactctctccagttgctggacgaaacgttctcggtatccgggacggaattatccgcgaccaaacagcactgagaacgcttcaggaatacatcaggacgcaatgccttcgatgatagcgataattttactcatcatccttcacatctggctctgtagacagggtggtgatcacttctggagtgaatccagatttaacattcattgctgatgctga

SEQ ID NO: 764 - DNA, 172 bp, Escherichia coli
gactttttggttacgcacgggtatcaaccagtcagcagtctctcgatattcagatcaaagcgctcaaagatgcaggtgtaaaagcaaaccgtatctttaccgataaggcatccggcagttctacagacagggatgggttggatctgttgcgggtaaaagtagaaaaaggtga

SEQ ID NO: 765 - DNA, 177 bp, Escherichia coli
tttcagcaacggctgtggtcgccatgttctgtctgccgggatcaccgcaaagtgattattcagcgtggtgcctgaaccactgcgtcccggcaccgcctgtggctgttcgccgtgcagttcacttgccaccacctgccattcccggttcaggttcgcctgcggatgccccgtcagcac

SEQ ID NO: 766 - DNA, 191 bp, Escherichia coli
acggttaggcttgttaacattcggaatcggaattgcttcaatggacscaccatttgtcccatatcaccatctgtactgatcccatcgtcaataaatctgacggcgacgccctgagcgtcaaattcctttatcagttggatcatatcggcggtatcgcggccaagacggtcgagcttcttcaccagaatgac

SEQ ID NO: 767 - DNA, 255 bp, Escherichia coli
gaagagtttcattttcagctctcgcatcggctaattccctcgagtatctggcatcaagtgcagcaacatcacgctggcgctgctgcatatcagtaatggttgcatttgccagctccagctcactgacttttttatcgcgctgctctttgtaggttatggcgttatcacggtaatgattcagccccagactaagcgcaccacaggccaccagcagggcaatgatgaccacgcacagtacgcggttcatttcaccac

SEQ ID NO: 768 - DNA, 142 bp, Escherichia coli
agcccccggtgacggggcaatatttaagagaataaactttattcactatggattctccatgatgtttacaagggatataaaagtaaaatagctgaagaagctaataataacccgacgttatcaccagaaaggaaaatatagt

SEQ ID NO: 769 - DNA, 195 bp, Escherichia coli
tccggtcagctgaccatgaaagataacgggttgttttgcccgcccggccaggatcctatcttttactgtctgaactgctttgtttttgttcatgccaacaaactcccactgagccggatcattcaggctgttccccacagagtgttaccatagctggcagatttcagaatatagaagcgggtctggctgttgagt

SEQ ID NO: 770 - DNA, 142 bp, Escherichia coli
gctcgcgccgcatccgacaccatgctcagatgcctgatgcgacgctgacgcgtcttatcaggcctacccactgtttttacaccgataatttttcccccacctttttgcactcattcatataaaaaatatatttccccacgaa

SEQ ID NO: 771 - DNA, 236 bp, Escherichia coli
acgttcgtcgaggcatggagatttttttttttaccccgcgctcaggggggctcagcgtggactgatgttctgctgcactcgctggcgtagcagcggcgacctgccagactactgcggacaaaataacagtacataatttacgcataattacctctcgcttttctgcaataaaaaggcgtccatttctggcgcccgtatctgggttataaaattcagctaatcgtgatgcctgcagt

SEQ ID NO: 772 - DNA, 185 bp, Escherichia coli
gggcattcattcgttctctctcggttcctcaggagcaggagcctgccgttcggttcgaaactgaacccggacgacagatgcaggctgactggggcactatgcgtaatggtcgctcaccgcttcacgtgttcgttgctgttctcggatacagccgaatgctgtacatcgaattcactgacaatatg

SEQ ID NO: 773 - DNA, 340 bp, Escherichia coli
ggtgaatacgcatggcttcaccacgggtgatgatttcatgagaatagtcctcctgaatgtgaaagtaagaaacagctgagaaagagaaactgaagtgatatgcaggtgattgtgacggtgacgggttaaagcagaccgtgttccgcaaaggagaaaacctggctgccaccgattatcagatggtccggcacccggatatccaccagggccagtgcgggggtttttttttttacagaaaaaaagkgggggttttttttttcccccccccctaaaatccgggggggggggtactccgtgcggttgcaggcactggaaagagcgcgccgggcgaagcgcgtaa

SEQ ID NO: 774 - DNA, 138 bp, Escherichia coli
ttatataagataattattttttgagtgaaatccatacaggaggcaaatcaaaaaagtctatatttcactttgcccgcgccgcgaaagtcactgataatgcgccgcgttcatgtcctcaaaatggcgtaacgtcctatg

SEQ ID NO: 775 - DNA, 124 bp, Escherichia coli
attccccacgccaatccggctggttgcctcctttgtgaagacaaattcaccacggtgaacaatccccgctggctcatatttgccgccggttcccgtaaatcctccggttgcaaaatggaatttc

SEQ ID NO: 776 - DNA, 196 bp, Escherichia coli
aaacaccacactgccaccgtcttcgccgccggactgctgaagcgcatccgccaggctgcggcgctgcgttttcgccagctcaccggtggcggtttcacctctgatgagtggcgtgaagctccccggctgataaatcgtctggatgcgggttctgtcgttctgtattgtggtcagccggtcgccgtcccagccgtac

SEQ ID NO: 777 - DNA, 125 bp, Escherichia coli
gcgaaggatatcgttactgcggcgcagttcacgattttcacgctccagctctttcagacgctgacgttcagcggtggtgagccctccatcaccgccccggtatcccgctcatgctggcgacccag

SEQ ID NO: 778 - DNA, 122 bp, Escherichia coli
tgtactctttcgtacagccagaatgtggcggatactggttgagcagataacgtccgtatgcccggtgaccacttccggacgggagattgtgatgtctgacattatcggtttcctttggttta

SEQ ID NO: 779 - DNA, 145 bp, Escherichia coli
agatacagcatgtgctggatgataaccccttctccggtcacctgtttatcttccgtggccgacgggagacacgattaaaatcctgtggctgatgctgatggtctgtgcctgttcaccaaacgccttgaggaaggtcagtttatct

SEQ ID NO: 780 - DNA, 135 bp, Escherichia coli
agccagcgatgccagcatatctgccagtgaggcggcaacccatgcgactgatgctgcaggctcagcacgtgcagccagcacatcagccgggcaggccgcgacgtcggctcagtcagcgtcttccagcgcaggaac

SEQ ID NO: 781 - DNA, 177 bp, Escherichia coli
atggcctacctgacgatatggcagggcgatgacgtacagcgccgggtgaaaggtatggtgacctggtttgaactggggagaacgacaaaaccagatgctgtacagcatgaaggtgtgcccaccgctgtggcgcacagggctgcgccagaacttccgtatcttccagaatgaggacat

SEQ ID NO: 782 - DNA, 127 bp, Escherichia coli
agagtcaaccgccagtgccgcagctctggaatgtgagctctgtatgacttccgttatcagttgatcgataagtgagccttcccacaggtcctgtcgcccttcagttgccagttcactgtctttacag

SEQ ID NO: 783 - DNA, 126 bp, Escherichia coli
catccgccagtggcgcggtgcaattgccggatgcgacgcttgccgcgtctgatccggccttcgggattgcacatgtagggcggataaggcgtttacgccgcatccgccaatatcaaataaacacta

SEQ ID NO: 784 - DNA, 136 bp, Escherichia coli
cgtgataccgttcacttcttttgtctcaatactacgggagatcaggttctgtgcgaccagtcccagcgtccagttgtcatccaggtccgtactggcaccgatgtcggcgttgatgccattttcgtgttgtggtagc

SEQ ID NO: 785 - DNA, 131 bp, Escherichia coli
gaacgtataagacattaacaaaaggagaatttgcttttcttgttgtatcccattgattttattgtgtttcttctgttgttatattgccagagagaattttgcaatagttgttttcccgaaccattctcacc

SEQ ID NO: 786 - DNA, 159 bp, Escherichia coli
atcaggccggtcgcctgcgagcccggaggatatcgatgctgtttattaactgagagcgggtacaggcgctgaatcccggctggtcggtagcaccagcggcgtatttttccacgagaagttcaccgcatcacacagtgaaatgcctgcctcaatatgctg

SEQ ID NO: 787 - DNA, 196 bp, Escherichia coli
atgaatggcgttggatgccgggcaacagcccgcattatgggcgttggcctcaacacgatttccgccatttaaaaactcaggccgcagtcggtaacctcgcgcatacagccgggcagtgacgtcatcgtctgcgcggaaatggacgaacagtggggatacgtcggggctaaatcgcgccagcgctggctgtttatcg

SEQ ID NO: 788 - DNA, 447 bp, Escherichia coli
tatattatttataagttgttcatcatgagatataacaatgatatgctttccttgtttcctctttatataatcactgattattttataccaagtgaatcaaacctttgtcggttcatcgaaataatcaagtctacgttttccagatgtaagagatactcctaattttgttttgtcctttttttttttaccagataaattatgtccgtaacctttgatctcataatctagtggtttgtcgaacttaaatctgtgtacagyttttaattgtatttaaatatatgcgataatatatttgtatcgatttttttttttcgacgtgatygagataatatcagcgtaaaaactcgtcaacgaaactactggggcaaaagccaagcgattaaaaagatccacctttaacgtccaatcccggacccgactaacccgcgcggtggcgctttgaaactt

SEQ ID NO: 789 - DNA, 232 bp, Escherichia coli
cagcgagataaaaagtcagtgagctgaagcaggcgaccgccaccattactgacatgcagcaacgccagcgtgctgctgatgtactcgatgctaaatacacgaaggagttagctgatgcgaaagctgaaaatgatgctcttcggcgcaagcttgataatggtggcagggtgctcgtcaaaggaaaatgccctgtgccatcctcagccgaaacctccagcgcctccggcatggg

SEQ ID NO: 790 - DNA, 255 bp, Escherichia coli
agctgtttccattataaaatcctctttgacattaaaaacaaatagttaaaagcaatatactgtatatataatcactggttttatatacagtttaaaattacgccgctgcattttccctgtcaacctgtggattttcattttgtgaaacgatcaaaaacagccacccacaccacgtgctatttccacccgactgccacaaaatttttttttttccagcacaaacattaccgttctcagacctcattatgttttact

SEQ ID NO: 791 - DNA, 248 bp, Escherichia coli
aacattcgattcggaatgctcagacgttacagttagaacatgagtaaaataatattaccgcccaattaccacaacctgaccaccatccccttcatctgccgtgctgatctcctgagatgccacacgtgacccacgcgcatttcaccgtacagaacaggcaggacattgccctgggcaaccatgttatccagtgaggagaaataggtgttctgtttgccgttatccgttgtctgtgtacggggagttct

SEQ ID NO: 792 - DNA, 180 bp, Escherichia coli
ggaggactgaaacgggagacggtatcgttgtacttaaccagcaggcagacactgcaggtaatatccaggccttcagttcagtgaacctcgccagcggacgcccgaccgtggtgctcggggatgcccgtcaggtcaatccggataacatttcatggggataccggggaggtaagcttgacc

SEQ ID NO: 793 - DNA, 186 bp, Escherichia coli
gggggtataagacgactctttaggaaggtaataatgtttattggcccactgaactgtcgtcagtggaacaggaataatgagagataaaagccctgtagctatcgcaccggctgcattagctgssggccccccccctttttttttcctctcgtgcgagagtcgtgcgatccccccccccccgcatga

SEQ ID NO: 794 - DNA, 144 bp, Escherichia coli
gtccttcctgtgctgcatcatcgcctctttcacccttccggtgtttttcagtgattcctctgtcgaagctgtgaacaggctatagcgtcttgatttcgtctcgtttgatgtcacagccttgcttacakwttttcgagcttgctg

SEQ ID NO: 795 - DNA, 135 bp, Escherichia coli
gcagggaaatagtccgactacgccctgcctcttactctactcagcacatggcagggcttcgtctatgtggcgttcatcattgatgtgtttgccggatacatcgtgtggtgacgagtctcatcgtctatggaaacg

SEQ ID NO: 796 - DNA, 119 bp, Escherichia coli
cacgtagcgatagcggagtgtatactggcttaactatgcggcatcagtgcagattataagaaagagcaccatatgcggtgtgaaaccgcacagatgcgtaaggagaaaatgccgcatca

SEQ ID NO: 797 - DNA, 231 bp, Escherichia coli
cctgaccacttcaagccctgcctctgtgagcgcctgaatcacatcctgacggcctttatctcccgacatgataaagagcgtctatccgcgtgtgacgctctctgcagcgctgttcgttcgcaggtatcaggagagtcagtatccggcggttctccgggcgttgggtcatgcagcccgtaatggtgattaaccagcgtctgccaggcatcaattctcggcctgtctgcccgg

SEQ ID NO: 798 - DNA, 234 bp, Escherichia coli
tgactgtccacgamagaacmscggcttatcggtcagtttcacctgrtttacgtaaaaacccgcttcggcgggtttttgcttttggaggagcggaaagatgaatgactgtccacgacgctatacccaaaagaaagcggcttatcggtcagtttcacctggtttacgtaaaaaaccgcttcgactgcccatagagccccccccccctaggtgagactgccaaggcatcacagggat

SEQ ID NO: 799 - DNA, 126 bp, Escherichia coli
tactaataaatcgtgcaatcgctgttgttctttttcagacgggccatgcacccgcaaatgatcatcgcgtcatcgtcacaacattgcgggcgagatttacttttgaagtaattatcccttaaaacc

SEQ ID NO: 800 - DNA, 113 bp, Escherichia coli
gtttcgccacctctggcttgagcgtcgatttttgtgatgctcggtcagggggcgagcctatggaaaacgctgcggcgctggcgtcttcggtgcttgcttttgctcacatgttc

SEQ ID NO: 801 - DNA, 229 bp, Escherichia coli
tttggttaaaccaattccggaattccgggaattggccttccaaaggaaccggttaaccggttaaggccttggttaaccaattcggaattcggatgctggcatcaacacgtcattcagatcactttcattgggattcataaattggtgatagtgcaataacatattggcgaaaaataaaaaagtcctgaaatgaggagattcttgttctgctaaaagggataaaagcaga

SEQ ID NO: 802 - DNA, 201 bp, Escherichia coli
cgcctccagtgcattgaaaattgcatcacggtctgctttgctgaatttcttatttaatacatccttgtatttctcaaaagcagctagagcttcattcacattgctgatttcttacctttagatttatcagcaagttcctgtgccattttgaatattttcaccatatttttcagatagcgtttgataaaagctaactgttgc

SEQ ID NO: 803 - DNA, 342 bp, Escherichia coli
gctgcgcagcggcgcggacgatcctgagatggccggaaaattcggatcccggaaaattgggttaaaccaagggccctttttaacccgggggttttttaaaaaaacccccccaaaaaatttttccccgggaaaattcccgggaaatttggccttccaaggaaaccgggtttaaaccgggtttaaagggccgcagaattttgtaaaaataataatgcgaaaagatgtttggaatgataatggttctgtttgtggttgcagcggtaaaggatgtggcgctggtgctcatgtaattctagataacataaagcccgtaatatacggctttaaggattataaattgaa

SEQ ID NO: 804 - DNA, 266 bp, Escherichia coli
ttcaatattgcaaatattgtcttttacatgaagatattgcttgtctgtgtaatttgtttttttatgtcgtttatttcggcacagtataaatcaattctgttcttgccattttatttgtctaatagatacaatgcgattatggagaaactgataaatttttttttttgaawagggggggggggcccccccccccataaaawawaaaatttttttttttggacatccatatggagtcatatcttatcaatcattgattaagaatggac

SEQ ID NO: 805 - DNA, 151 bp, Escherichia coli
agataatttaccataatcccttattgtacgcaccgctgaaacgcgttcggcgcgatcacggcagcagacaggtaaaaatggcaacaaccacccgaaaactgccgcgatcgcacccggtaaatttaaccacatgcatagctatgcagccatg

SEQ ID NO: 806 - DNA, 200 bp, Escherichia coli
aaatcttctgtgatgaacatggccgcgtgcgggtgaaatttaactgggaccgttataacccgtcaaaccaggacagttcatgctggatccgtgtggcacaggcgtgggcaggcaccggattcggtaacctggcgataccgcgtgtgggtcaggaggtgattgtggacttcctcaacggcgatccggaccagccgatcatt

SEQ ID NO: 807 - DNA, 199 bp, Escherichia coli
tcagaacgttaacggtagttgcggagatccagttgctcatgcatcgcccggctactcattccctgcttgtgcaggattttaatttccataactgtctcaaaagtgaccataaactcttctgaatcaggagagcagattaccccctggatctgatttcaggcgttgggtgtggatcactattgcaccgttcgtgacagtt

SEQ ID NO: 808 - DNA, 156 bp, Escherichia coli
aggattgatattcagggattttgcggactagtacggatggtggcgaactgataaatggtgtcccctgcagacatctacttgaggcggcaggggattgattggaatggtgttttttagatgtgagaaatattttacccgctattttacccattggcg

SEQ ID NO: 809 - DNA, 136 bp, Escherichia coli
tcggtcaaaagttgtttagggggggggggctgagcagcaaccagatctagttcatattgagtatattgggcaagacatgtctttttaggaaagtactgccgaattagcccatttgtgttcctcatttgttccccgc

SEQ ID NO: 810 - DNA, 285 bp, Escherichia coli
ataaaaaaggaaatcatagaaaattttaagaaatataatttccagaaatatccgtttgtattcacggatgttaattataaaacttaatcaactggaatgatcttaataaattgcttgaaaagatatattgcactatctagagttagatgcaatgacaacttccgaatagggtataaggattataagatacacatatagccaacaggcgatagaacaccacatataaatcgccatcagctatataaatgcttacgtgatggcgcaactcttatagtagatcgatgc

SEQ ID NO: 811 - DNA, 198 bp, Escherichia coli
gactctccgccttccacaaatcccggcgctgctggctgattttctcatttgctccggcatgcttctccagcgtccggagttctgcctgaagcgtcagcagggcagcatgagcactgtcttcctgacgatcgcccgcagacaccttcacgccggactgtttcggctttttcagcgtcgcttcataatcctttttcgccg

SEQ ID NO: 812 - DNA, 140 bp, Escherichia coli
aattcttttggctgatgctgatggtctgtgcctgttcaccaaacgcctggaggaaggcctgaaccgccccgggaatcctggagactaaacttcctgagaaagaggtaaacaggatgactaaaaatactcgtttttccccc

SEQ ID NO: 813 - DNA, 247 bp, Escherichia coli
gatttcacaaaacagcacagcagtgcgttcggtgtcgtacagcgcgggagtgcgcctgggtgctgtcgaagtccakgactctttttttttttggggagcggtcsagttcgccgggcgtcaggtctttaacttttgccagacgtgaccagtcaacgtctgaaagcgggttcgcataagggtcaccgttccccttataaacccacagtgtggtcccggcacctttcaccggcattactggatttggtac

SEQ ID NO: 814 - DNA, 117 bp, Escherichia coli
acgcaccagaaatcattgatatggccatgaatggcgttggatgccgggcaacagcccgcattatgggcgttggcctcaacacgattttccgccatttaaaaaactcaggccgcagtc

SEQ ID NO: 815 - DNA, 127 bp, Escherichia coli
tggtgaagtaccggtctgccatcattgccatcggtacagggcgttcgacaacttcgcgaatggtttcaccagtttcctggtccttgcgctctgcaatcgtccgcatggtatccggtctgtcatcggt

SEQ ID NO: 816 - DNA, 268 bp, Escherichia coli
atactataaatgaggtgtggtattaattattcttattgatataacagtcctagcatcaatggattgctaggaccaacaaagtagattgtatagcataaataggtttaattttgccacggggcattatttaggtttttcttttctgaaaaatctttctttatgaacttaaaaatatgtgttcaatagcatatttgaatatggcatagaatagtgcttatcactattgcgtatagcatcttatctgacgctaggaaataatacccttcgt

SEQ ID NO: 817 - DNA, 141 bp, Escherichia coli
tcgatgaactccggcaccatctcgtcaaaattcgccatgtacttttcattccgctcaatcacgacataatgcaggccttcacgcttcatacgcgggtcatagttggcaaagtaccaggcatcttttcgcgtcacccacatg

SEQ ID NO: 818 - DNA, 183 bp, Escherichia coli
cccccccmatctaaggggacttccccttagatttttcatacgatataaactgcatttccatccaccattaaccttatccaattctcaataaatgccattaatatattccatcatttgcttatttcagcttcctgaaacactarcawgccttaactcacgtattacgacatcatatcatatctt

SEQ ID NO: 819 - DNA, 124 bp, Escherichia coli
cctttgcgttagtgccggaggccgcattagcgcgtaacgtcggatgcgacgctggcgcgtcttatccgacctactccgactactccggcctactgcgaattaatctttcagcttgcgcattacc

SEQ ID NO: 820 - DNA, 174 bp, Escherichia coli
catgcgtggaggtgaaggccacgccgggttcatgaagatggcggtccagggttttcagggcccgcagaatgaggctgcgctctctggttgtcatttctccgggcagaaaggaaagctgctgcattgtccctgccaccattcagtcgatggatgcgcataatggcgctgcatcgg

SEQ ID NO: 821 - DNA, 198 bp, Escherichia coli
ccgtatgatgactccgcagaaattggccatcgcgagtaccaggacatcatccgcgaagtcaaagacgccaacgcctgatacacttaaggcaaattaactcctcttcgaaccgcttgtcgggggtttttagcattgatggtgcgatatggaatcaatcgaacaacaactgacagaactgcgaacgacgcttcgccawca

SEQ ID NO: 822 - DNA, 122 bp, Escherichia coli
tggtttcagtaaaacataatgaggtctgagaacggtaatgtttgtgctggtttttgtggcatcgggtggaaatagcacgtggtgtgggtggctgtttttgatcgtttcacaaaaatgaaatc

SEQ ID NO: 823 - DNA, 158 bp, Escherichia coli
attgatatccatacaggttccatcccccttcagtccaatcggatcctgagtgatatatcgcccctgcagcgggtcataatagcggtggcggttgtaatacaggccggactcctcatcatactgctgccccggcagccggataagctgctgcagctgat

SEQ ID NO: 824 - DNA, 127 bp, Escherichia coli
tattggtatctgtgctccaccaagccagttacccgttaagcagtcccaactgacttaacctcgactaaccgcctcccaggcggtttttcgtttactggcagcagattacgcgcagaaaaccgactgc

SEQ ID NO: 825 - DNA, 139 bp, Escherichia coli
cgaccggcagggcaraatctgccggagataccagcttcacgctggcgtggatgcccggagagcaggggcagcaggcgctgctggcgtggtttaatgaaggggatacccgtgcctataaaatccgcttcccgaacggcac

SEQ ID NO: 826 - DNA, 281 bp, Escherichia coli
gaaaccgggttaaaccggttaaagggccttgggtttaaaacccaaatttccggaaattccgggaaattgggyaatattaatttatggttgaatgatttgttgtatatttcaatattgcaaatattgtcttttacatgaagatattgcttgtctgtgtaatttttttttatgtcgttattcggcacagtataatcattctgttcttgcatttattgtctaatagwwacatgcgattatggagaaactaaaaaaaaggataaagtgcaagcatataatactac

SEQ ID NO: 827 - DNA, 142 bp, Escherichia coli
acatatacaattaagccaaacaatagaaccgcatagtaaaacaattaacacacatactaaatattcagattcagaacgtggaataaactccagccaactccgaggcactccacacaaaaacagcaaaagccccattctatgg

SEQ ID NO: 828 - DNA, 178 bp, Escherichia coli
agctgcatgacaagtcatcgggcattatctgaacataaaacactatcaataagttggagtcattaccccctgagcagattatcgcgatgggatggcagaacaaaatttgctcgggtgatcccgctaatattcacatgtcgcgtacctttctytttttttttcgactcgcatgcggtta

SEQ ID NO: 829 - DNA, 122 bp, Escherichia coli
gagtgtggtacacagatcagcatggtttcaggggccagcattggcgcattcaatggtgccattatcgcggcctctcccgatctgtcagaagctgccgtacgcctggaggcgctctgggatca

SEQ ID NO: 830 - DNA, 169 bp, Escherichia coli
gttcaaactggcaacggttaccatgccacaagcgagttccatcgtttacatcgcattgattggtggcgctggatttaacgtgggggcacctcaacaggcaggtatatctgaactggttctacgagcaggcaatggaaaccccaaaggggttaccggagctttgtggaag

SEQ ID NO: 831 - DNA, 154 bp, Escherichia coli
ttttccgcccattgcaggaaagtatttcgcgtttgtgggtcagccagtttaaaccaatacttcagccgttgttctgtgagcacctgagactgccaaggcacacagggatagctgagackagcbrcggggggtatgcgatttttttttttggggg

SEQ ID NO: 832 - DNA, 168 bp, Escherichia coli
aacgccgaccggatcagtgatgagtggaaggccttcgaccgcgccatcgaaagtaaccacggtgttcctgagactgccaaggcacacaggggatagcgagaaaaaaaatttttttttttggggcccccccgcgcttcggcgtcatctttcgccagtttgccggagatc

SEQ ID NO: 833 - DNA, 189 bp, Escherichia coli
gctgccgcacgcaaatcgtccagttctttgcggagcttttcgttttcgatatcagtttccctctgcgcataccactgaattgccatggcagtatcaaatacagattcaatgcccttactacctttggaggcgcaagggagtccctgagactgccaaggcacacagggatagcgtgagattttggggggg

SEQ ID NO: 834 - DNA, 96 bp, Escherichia coli
tcaacttaagcagaatgcgtttatagacgggttttgcattggtagccatgtttctttcctgagactgccaaggcacacagggatagctcagtgatt

SEQ ID NO: 835 - DNA, 104 bp, Escherichia coli
aaaacggcgggttagctttatgagattattcttatcgccccttcaagagctaagccactgagactgccaaggcacacagggataggggggaggkrgaccccctt

SEQ ID NO: 836 - DNA, 115 bp, Escherichia coli
caatatggcgggtggcgtgaatcacgttcgctgccacgataagatcgtaagactgtgcctggaaaccctgagactgccaaggcacacagggataggctgcgatagctccccaaaa

SEQ ID NO: 837 - DNA, 113 bp, Escherichia coli
ctgagtctaaggatgatcgtataacgtgattttcggtctacaagtgtggctatatgagagtttttgtacctgagactgaccaggcacacagggactaggctstgatatacgag

SEQ ID NO: 838 - DNA, 166 bp, Escherichia coli
ttatgtaacattgcttcccctttttgtgttgcttgccgcctgtagcagcaagccaaaacctactgagactgccaaggcacacagggataggctgcatvgcctttttttttttaaaaaaaaaaaccgtaatgaggcgcgtacgcgccctaaagcgatgcgtcgcgag

SEQ ID NO: 839 - DNA, 160 bp, Escherichia coli
tgttctggcatcaaaggaattcccggaaatattcgtagaatacggagctggcggtatcgccgacctgagactgccaaggcacacagggataggctgcctgakaccggcccccccrygataaaaaaaaaaactttttttttttgcggatttctgggggggg

SEQ ID NO: 840 - DNA, 112 bp, Escherichia coli
cacgctgagcgggcaagcacaggtcacgctgacagagaaacctgaatggcagctgagactgccaaggcacacagggataggagatctmtactgagatacgcgattttttttt

SEQ ID NO: 841 - DNA, 109 bp, Escherichia coli
  modified_base (101)..(101): a, c, t, g, unknown or other
cgcgggtttttaatgattgcagggctgactgtccgtttactctccataaggtgttatacatgctggctgagactgccaaggcacacagggatagagatagntggggggg

SEQ ID NO: 842 - DNA, 117 bp, Escherichia coli
cttcaggtagccacaactgtcatagccataggactcatcgccttcgccatagcccagcccggtgcctgagactgccaaggcacacgagggataggcgcgtdcttggggggggkacgc

SEQ ID NO: 843 - DNA, 130 bp, Escherichia coli
gccatccccgccagtaacatgcggtgtggggaaaatccaccgcgtccggcggcgatcataatgatcaacagcgtcaccgccgccctgagactgccaaggcacacaggggatacgdhraaaaaaaacgaca

SEQ ID NO: 844 - DNA, 96 bp, Escherichia coli
gtttcagcactttggactgtagaactcaacgattcaaaaacaggcactcacgttgggctgagactgccaaggcacacagggataggctgakatgct

SEQ ID NO: 845 - DNA, 102 bp, Escherichia coli
gtgaagtccaaagggctttccggttatgactcgccgtatgtgcctggctgagactgccaaggcacacagggataggagatgagactgcataggggggggggg

SEQ ID NO: 846 - DNA, 125 bp, Escherichia coli
aaatacagattcaatgcccttactacctttggaggcgcaagggagtccctgagactgccaaggcacacagggataggctgcatgarctgcactctataaaaaaaaacgatttttttttttggggg

SEQ ID NO: 847 - DNA, 133 bp, Escherichia coli
agacaccactgaccgcgtcattaatcacgcaattccggcgagaatgcggctatctgcaaagttaaaactgcataaaatagagtctgtcgacatccgccagactctacagtacacacagcagtgcatccgcgtc

SEQ ID NO: 848 - DNA, 570 bp, Escherichia coli
ggaaaagaagagaaggagtgattttatggatcacctttctgattgatttcatattggcgaggtgacgtgagttaagtagaatggctgcgggtgcttgaggctatctgtctcaggcatgaacactgaaaggcagatagagaaaagccccagttaacattacgcgtcctgcaagacgcttaacattaatctgaggcccaatctatgtctcacaaatgtaggttagcctcttacgtgccgaaaggcaaggggaagcaggctatgaagcagcaaaaggcgatgttaatcgccctgatcgtcatctgtataaccgtcatagtgacggcactggtaacgaggaaagacctctgcgaggtacgaatccgaaccggccagacggaggtcgctgtcttcacagcttacgaacctgaggagtaagagacccggcgagggagaaatccctcgccacctctgatgtgtcaggcatcctcaacgcacccgcacttaacccgcttcggcgggttttttcacttactgtggttgtgaatacgattggtattaggctatgctaacaacattagcctgactaatttt

SEQ ID NO: 849 - DNA, 1829 bp, Escherichia coli
tgccaccgtccttaatccaccagcgaatcgcctcacatgctcccctgcgatcaccagcattaattcgtctgtaaaacgtcgacgggaaacacttaccgggaccaatgttgtacggacagaatgacgcgatccccgctttctgaggttcggtcagtggcactctgatgtttttctccacccatgccagcgccttatcacgttcaatggcgttaacctggtcgcatttttccttcgacaacttcatgcccgggacgacaggtttaccatccaccaggatggcaccgcggcagatggtccagatacccgcaccatcacggtatgccgtggtgtggttaccttccttttcatccagaaactggtcgagaatgtcaggcgcaggcgcaccagcggcaatcagcgccagaacggcagccgacaggccgtatttgattttggtgttcatggatatttatcagggtttatcggcaacagataacgagccagcttatatacgtcctttaagataagtcagtcctggatgaaaccagtaagccggcacttttttaaagggcggattatcaaaatcacgaagaagagcctcccgcacaactgcatccttgtccgcaccactggccagcgcttcaatctcagcagctatctgcagatatcccatgcaacggccaacgcgcttcatcagcccctgctttttattgttcttcaggtaatcaatggcaaattcaatgagcgcctcactatgctggtgcgatggcggtgttaatttcccattttctgagatggttattttcccgccatctccgtatacaacaaaggatggccggttacactcccattcctgatctttatcaggtgcagacgcaataaaataacgtttatttccttcctctccggcacttttaaccgtaatggagtactcagactgcagacaagacgcctctttttctgaccgcagtgttgacggcggcatcttcagagaaccagtaattcttcccggtagctttcctttgtaggttatcaacacatcctgcgcctctaaaattacggggcgcttttccggcaacggaccatccccttcacataacccggcagcaacatccatgaaaaactgcttcgcctgctttttcgcctcagcttcgtaaaactccagcgtggcatcttcagtacggtcaagactaatcgccacatctggcaacaacagtgacggatacccaccaatttccagtgccacagtaacagtaatcttatccggataattatttatccctttaacaaccagttcgtattttttcttcatcgctttactccccccgcgccgccttacgacggtcctctctgattttgaaatacaggttagtcagatatgtcagcagcccaaacaacagactccccagcacgcctattgccgcccactgagacggggaaaccctgtccagcaactgcaggaaccagtagcccgttcccaccgctgacgtggtgtatgacacacctgttgtgattttttccatctggtacataccccgcctcccgcaatccggaagctcacaacaataaaaaagccaccagttaagtactgatggctctgataactcatgcaggcatctcagacgacccactgacactaccggtgagtttaacgataccttccatttgactggctcactttttatgatgatgccggtgcatttatctccagcaccagactttctatctcaacgccatacgctgcatttttggtaatatccgtcagcgtcagcgcattcagccccagtgtcagactgtcttttatgacctggaatgccgggccagccactccattcagtttcggagtaacc

SEQ ID NO: 850 - DNA, 2416 bp, Escherichia coli
  modified_base (69)..(69): a, c, t, g, unknown or other
  modified_base (75)..(75): a, c, t, g, unknown or other
  modified_base (115)..(115): a, c, t, g, unknown or other
  modified_base (121)..(121): a, c, t, g, unknown or other
  modified_base (127)..(127): a, c, t, g, unknown or other
  modified_base (133)..(133): a, c, t, g, unknown or other
  modified_base (136)..(136): a, c, t, g, unknown or other
  modified_base (138)..(138): a, c, t, g, unknown or other
cattctgttccgtacaacattggccccggtaagtgttttccgtcgacgttttataaacgaattaatgcnggtgancgcaggggagcgtgtgaggcgattcgctggtggattatangacggnggcagngactgncgnanccgctcaaataactgttacggtcaggtatcccgtcgtgaccaggagagcgcgctggcgtgctggggaatcgacagataagcagaatattttgctaataaatgacgttggccaaggcggacggataacacgaaatcctgcgaactggcaaaatgtaagtgaataaaagtaaaaaccccgtttgttggcagcaagcggggttttgtttttatggcagtaagctatgggaggctgccttgattgattttagcaaactgattagggagttgcgactcatgattagtcaattaccaaactggaaatttttgctggtctggagcatcccttttttatgggtagtatcccagttaattgtggcaattaaggggtagctatgtcagacaaactcataacgccggcaaaggtcctgtgtgtgattgtcggtatttcattttcactaatgctggttgctctttttctgtccctcgcctgggtgatgttgtcttcgtcggggctgctggggtgacagtgactgatgacatcagcagagcgctggcttttgctattaagtgggtggctgttggtattgctgtgtctccgatgctgtatgggctggcaaaactggtcattgcgctgaaatcgtgaactttaaaaagatgagtgctgaacttattcgggcaatggcatttgccattcgtattgtggccattgctgttctggtctggacaatccgttggtggtgatatgaaccgtgttctgtgtgtggtgattattgtcctgctggtagcctgtggtgtgcttagtctggggctgaatcattaccgtgataacgccattacctacaaagcccagcgcgacaaaaatgtcagagaactgaagctggcgaacgcggcaattactgatatgcagcagcgccagcgtgatgttgctgcacttgatgccagatactcgagggaattagccgatgcgagagctgaaaatgaaactcttcgcgctgacgttgccgctggtcaccgcagcctgcggatcaacgccacctgtccaggtcccgtgcgtgaagccaccggcaccgcccgcgtggataatgcaaccggcccccaactggcagacaccgttacacgggattatttcaccctcagagagcggctgatgacgatgcagaagcaactggaaggggcacaggactatatccgcactcagtgcctgaaataagttttgctgatgcgcggtattgtcgccgtatccccgcattaacagagaccgcagcccgacagggagactcctctgcgcgagtgtgcggggataatcaaaaacgatacacaccggggtttaccgcgttaacggagcgcggcgttgtcccctcatagtcgcctgtccggtgcgatggtggaagaagccggatgtttatcactattaattgatgacacagaaatggattcattgaatttcagcacgtttttgtattcgtgttattgaacatctgtttattttacttttaacatattgataataaaaagagctgtaaatctttagatgagtcgattttgtccggggaagttcaaatggattttatgctgacggtttctggtgtggttatcctgtccattgcttatactgcagataaatatggctgccatttgttatcacgtattggcgcttattgttcgttgatgctgattttctcgtcgcttttttttgagtaagttatattaattataacaaataattttctgtgttatttttcaggctatcccgtcagaggggaagcctgtactgccagggagcgaatggaaaactgatgtgtccggtaactgcgtgttctgtgaacaccatgttacttaattatgtaattcatactcgaactctctgttgacagccttcttctgcaggcttcaataacccacgctgaaaagtttcctgaacctttcagatcaagagcgatgttaatttgttcaatcatctggtttggaaatcggatgttgcgggttgttgttctgcgcgttctgttctttgatgacataatgtttccccatattcagtgttgctgatttgtattatcagaagttgcttttacgttaatttgacgcagatcaattaatacgatacctgcgtcataattgattatttctcgtggtttgatggcgtacacacatgttgtgataaaccttatatagatgataatcattatcatttcgtgggtcctttccggcgatccgaccggttacggggcggcgacctcgcggtttttcactatttatgaaaatttttcagggaaaatcgtgtcggtacttctcgaatata

SEQ ID NO: 851 - DNA, 10955 bp, Escherichia coli
  modified_base (42)..(42): a, c, t, g, unknown or other
  modified_base (45)..(45): a, c, t, g, unknown or other
  modified_base (47)..(48): a, c, t, g, unknown or other
  modified_base (54)..(54): a, c, t, g, unknown or other
  modified_base (63)..(63): a, c, t, g, unknown or other
  modified_base (66)..(66): a, c, t, g, unknown or other
tgatttgataaccaagactgaccgagtgtcggcgcgatcgtngcnanntgattncttgtggcngtngaacccaagtccacccgtcgcctccgcagcagcaagactctggtaacgcgcctgacctgcaaggtctttatactgctgagagttgtaatactgattaagtgcctgcccctgaccttctaaactggaaagattctgaagctggttaacatactgctccgcaagcggcgtgaacggagcaaggtttttcatgatcgtctgccactgctgattttgcaggtctgcggcatacttctgagcttctgctgcatactttgcgcttttatcagagctgccacctttcccgcctttttcagggcaataaggttcctcgccgcgcagttttctgcccagcttaaatgcatataacatagctatctcccgtgattcaggaagtcgattagttcttcgcgtgtggcgctgtaaaacgtcacgtcatccacgcctttgaagtatttcttgatggttcctacacgcttaaggccaatcattgcgcagtacatctgaccgtggcggaatttgcgcgcagcgaacgatgtgacgcactgaacggtggtgttagtcagaatgtatcgccagaacgccagcccgatttccttgctgaagccgcgaatctctgacaggtacatggcgtggcaatcgaatgtcagcggctgaatctcctgatagtaaacaatgccgccaaactgaccgtgcacgttaacctcaaagtaacggcattcaggcttgtaatcgtatccatcaccattgttgcttccggcaataatgtcagggtgatttccgactgcttcgatcaggtcgatgtttcgcgttggtttgaactgaatcattactgctccgcgattatcttgatggttgtggcagtaaacgccgcaccatttgactgaatggttaacgtgctgccatttgtggcaagaaagccgtctttatccacgctgaagaacgtagctaacaagatgttgtcggttgttgtcaccgcattacgactgctaaccaacgtgtcaggaacagaaccggaaaatgttagctgcattgacctgttggcggttccgctgggccacgtcccgacaatcgacagcttgaagaacagggttttgttctcgttgaacacaaccatcttgttgttaacagtgtcgaagaatggtgccaacgtgccggatgacggcgtgagcgttttcagcaggctaacaaggttggtcggcgctgtcgggatggttactgatacgccagagtaaacaacctctgacttcttgcgagtagtggcatactccagagcatcgatgcgcgattcatggtctgaaacctgcgactccagcgactgaactctggtatcaagcgacgcaatatcgctttcattctgagcgattcgcgtttcatgttcctgaagagttgattctgcctggctgattctctcctcatgattaacaagcgttgcttccgcagcagaaattcgctgctcatggtcagcgagaatcacatcctgctcatcgttcctgacttgtgcgtcataagcgccctgtccggcctcgttggccttgttagccacgttaccaacatcagtaccctgtgcgataacgtacagcagatatgactgcgaaaagatattgcgtggaaggactgatgtgtcgagccgtgtagcctgaatgattaccggcacattgagattcgaatccgccattactcaatccttatctggcagccagacagagtgacaggtgacttcgtgataacgcgcaatttgaatccgacatttttccttattcgcccgacacgcttccacaaaacgcgtttgtcgtaaacgaacggttcattctgctcaattatctgctcacgcccgtaattgatgccgtcagtggttgcagagagaaaaaggcggtcagcatactgcgcaactccagttgaagattcaacttcaaggtcgaaaactctggcgttatctgctttgaacaacggagtaaacagcaggtgttcctgttgaagcccatactggctgctgatatcgaactgcaatttgccggtaaccgattccagcttatcgccgcacgttatctgattgccttcgtaaatgaagtcgatagcgcggtacacatcgtcatacaagccagttttcaacacacaccattgcggaccattggcgcttgaagatgcgtcgtacacgagaacatggcgcggaaggtggataatcagcaactcatgagcatcaaatctcagcgattccatcacaccatcagccagttcatcagcagtgtaggagcggaggattttctcaatgctcgcgctggcgattggtgaaacctgaccggatccgatgatgtatacagacggagcacctgttgccggattgctgatgaacgcataagaatcagcgaatggcgttttgcagtaagtcccggcgatgcctttttgcaccatcagtgatggctgtgcgacatacaaagcggcaccaacggtggttgcgccagtcagggaaaaatactcaatcgtcgatgaaccaaagcagacgatgaagtctcgccatgttccgattccgatgatgccgtcaggctgcgactcggcacgatattgtgcgctgtagcggtcaggatgcgattcgtcttcaaggtcagtgataaaccatgaatcagtgccgtcttttgaccacgcataacgcccgcgtaagcgcgtaatgtcacgaacagaacctaactcatactgcgtaaacccgctgtctgcaggccagtttgagacggttttaaccgtgccatcatagcgatactcgaccagttgaccattaacgcctacagcctgagatgtccgaccatgtgccattgatacgcgaccacttccagcgacgtcaccgacttcgctttcgcctttgtagagcttcccaccacacacgcgataaacagcattctgcgccatgttgtactcgacaccgcgcgatacaccattcacatcagaacgtttggcaatgccagggaatgagcgaagatatccgctgctgttgagtatttctttgggtgtagccaacatattcactggcagatagtcgatatagtcggcgtttcgaaagtctttgccgacacctttcataagcggaagttgctgaatcggcatttattcacctatgcgtttgggatatcgccatcaatcagagggagatcgcctggataatatcggtcagatgtaaacacgtcatatttattaccctgtcctacaggaaaatctccacgtcgtcgcattgaaggaacaaccagagtgtcggtcatcaaggcatcatatgagcgtttggcgttactgagaacttgcggagttggttcaaggctgtaatcagatagcattctcagcaataactgatagcctactgcgtgtttgtattttcttggaagacctgactcatcatctggtaatggctgctcatctccagttgcgaaagcgtaaccaatgtcgccggggttaatcatccactcggacatcatatcttccagatcatttacaccatcttcaattgattgcggctcaacatcagtcagcgatgcattagaagcaatagcaaacttacgaagcgcaaaaaggacgatctcaccctttgtcagtactgttgccattgtctgccgccttacgacctcgcttactggtcggtttcaattcatcaactgaggcaacaaagcccaacttttcgaaaaactggaagtctttttctgcgataacggcctgtacatgtccggattcgttatctgcggcaaggaatacactcatgcgatccatattgtttccttaaaacataaaaggggcggaagccccttgttattacggattaccgaagaactgaccgcccatgtgagggttaaagcacacatatgcaggcagtaagtcaaagcgcattttttgcacgttggcatcgccatctgcgtatttatgtacgcggatggagaaaccttcatatgttgcaacagcagaatcaatactgtgcagtttcggcagtgggatagagccaagtccacagaagaacttgttatagaacaggtttggcttcattgtctggctagcagtgcctactacagatacggcatcgcctgccgctacctgacgacttacagagttgtactgcgggtttgtagtgtcataaatcggaacaccagaaagcgtaaccgtcacatcgccactgctgtctgaattagcatcagcagtaaccgttgcagtgaagctaattggtgtggctccgttatacaacgcctgtttggtctgctgttgcagccagtaggtattggtgaatttaacctgatcaccagctttcagaaaacctgtaacgctggctgtcgctccggtcaatgttacagtgaactggtatgagtctttaactgcgttataggtaacagttggctgtgttttgactgtcagtgttccgccaaatgccccctgcgtacgagaggcaagcccattagacatcagtgcgcgaatgccgccaaaattggttggaatctgcgcattctcccatgcagtacgaaccaattgatctgaagcgtgcaaaccagtctgcgcatcagcaagtcgctgtgcagaccatggatccattacagcatagttttcaccttcattaacgccgaggtctttcaggaaagatgccgtctgcgcaacatcagaccatttggtgattggagtattggggctaccaagtgacaacgcaccgttattcatcatgaagtgagcaagctctgtttcaaggtcggtaacgattcgctggcgaaccggcgcgagaatttcttccagttggttaagcttgatcgcttcctccagttgctgatattcaacagcaacagtgatgtagttacctacacgccccgtagctttacctgagttcaggttgtttttattttgccctgaaatatcaccagtgggagtacggagggatgagaattgatgcggacgtttaaagctaacgctatcgccagtgctggagttgatttcacctgccagcaactgacggtctacggttttcgccagaactaaatctgacataaaaccaggaaggaattttttcagaacgatttgactgacgttactgtcgagattgttaggcatttatcttttccttattcgatttttgcgccggggcataatttgttgaattcgtcttgtttcgcatcagcaccgccaccacgtacttccggctctggcttgatggctttctttggttttggagcaaggcttacctgtttgctaatctgccccaagaggaatgctgcgcgaattggatctgtctcagcggctacacgctggcgtaattgctggctcttacctaagccataggcgagtagttcagagccttcgtctgcacagtgaatgatgatttcctgctgaattggtggtagctcactaagaacaatggcttccatttcctgataatctttcacaggaagtttggctgcccgttgtttatgcgcttctaccctttgctggaaacgctgctggtattcctgttgctgacgtagtttttgttgctgctgctgttcgacacggccttttttctcatgccaatcagtcaatgcctgttcaaacgcctgttcgtcataatcacacgactcaagagtcggttttggtggaatagcgtctggttgtggttgctgatgttccgcaggcttggctaatgcttcctcaagctggcgtcgcaactcacggttttctttctgtgtttctttgaagactttgcgaagatctttcacccattgcggtgcaggttgcccgtcaatgtgatcatcatcgtcagcgttaagctgaatttcttcatcaccaatacgcaaggcgtaatcttctggtgtctcttcggttttttcaggatcagttgccatctcttttccgttgtcatcctggctttcattctcaggctgtgactctgtttggatgatggtttcttctgcattttcctgtgtttcagacaggtcaataacctgaccgtcgatgatcagttcgttttccattgattactcctggttaactcggcattaagtctgccggtgactgtggtggtgactggaattgctgttgttgtgactcggcgacatctttcagaaggcgtattgcctccatcactgctttgtcatcgatgtttctggcttgagccagtttatagacagtgtttgcctgactctccatcgcatcctgctgggcagtaaatgctttgatttgagtttgagcagtttcgttagttgctttttgcgcttctgcctgcgctgctaccatttgcgcctgagcgagaaccatttcaggatttggctggctttgtgctgccatttgcgcctgttgaacaatctgctgctctttctcattgcgtggttttgcaataccagatatcagcagttggtttcggttgtactctttgaagtcatcaaggccttcgccatcgatattgtccagaataataccctgaattgccgggcgcattgggtctgttggaagcatagagctaaggacatttgtcagtacagaaaccgttgcatcacgtcgtgctgtgtagcttggtccaacatcaaccgtcacatcgtatcgaccgacagaaaggtcatttaacgcaacaacagcccctgtttgcctgtcaacaacctgtgcgctcatgacagcgatatcatcacttccatcttcgttaacgatgcgcacttcacgttctgaaccgtacacttcacgcgccattgacagccatacttcaccagcgcgtttaagacttttcgccatattgtccagatagataaacgaagccatatctgctctgttcatcaagttgttaaccgtttcctgagcaatattacttggcatctgctgcatggcctgactgccgcctgtaacctcctgaatatctgcactggtttgctgtagtaatgcagccaatgcctgattcataaccgcaggctgtgtatatcctgccggggtagctccagcgataatgttgccagatttatctctcacttcgcgcaacggcaagaacgctgggcgtttcttgttacgagcctcccagtgcttctcaagtccacgaatttgctccatgccaactatagggatctgaccggggtcttgcgctgcagtatcagccagcattgatacctgaaggttatacaaacgctgtggatccattgcttttgcaatgtgcccttcgacacgctcaatgtcatcaatgaaccagcgttttccataaaccgggatgagggggatatgttcaccaggaatacgtcgaggtttctcaaggaaaccatcaccatccactacggatacatacacacgacggcgcttcactgagcgccttgccacttcatgaaatccagctattgccagttcatcttcaatatcttcaacctgatcactgtcgtatgttgcaatctctccagtgattggatgtcgataactgatgacgtcaacagactctttacgaacttcgtaatacttcgctatgtaaataacatctgcatcaaaccagtcatattcccaactggtcatagacgttacgtccagagaagcaggaggtttctttccgtattcagtctcatatttttcaggtgacaacgaatacatgcagaacgcccacaacgcgtcagatttgtcgtacttcttagcgtcagggtcaaaccacacagagcgcgacgggtcgtatattggttcaatagcaatacgctgacgatcgtccatggggtcgaattcattgaccagcatcgacgtcaaacggaagcaaccgaaaccaccggtagcagcgtcgtcaaatgcattatcgcaagcctcaccgccatcagtttcttcgtagtcagcacggaacagaccatttaatttattggctaactcttcgcttgcctctctgtcaccagggcgaaacttaacagtgattctgttattgcggtattctgcaatgatgcggttaagttcagttgctaccttattgatttcaaacttaggatacttctcgaactgctcatcaagcttagttccagccgccgttgctccttcccattgacctccggggacacgagcaaacctcgtagcttcaatgcacttttcgcgcacttcctgctgtggagaataggcgcggtcaaacctgagcatgatccgctcatgttttttctctaatgtctctgccatgtttaccaaccggaggatgagggaacgtatatttctgtttcttcgcggaccaatgccgggcaatgcatacacatcatcagcgcatcagccaggttaggagatgggataccgagcttctgcttcatttcgaccttagtcataagctccagcttcccgttgttattgaatttgcgctgaatctgcgtaagttctgcaaacagcttctccagcatcttctcgcctatcgcttctttgtcgaaactcagcatgtcgtcggggtctgcatactcaccgtagacaaccgcccgatatgtcagatacagcctgtcagccagcgcgtaatagaattgcgctctcttattgcggaacacatcaccaatagtgcgaacgttgtcgccctgtacgacttcatcagcccatgctccggcctgatacggtgcatcttcatcgaatggcgattcgctgcccttgaacatcgtggcggtgattttcttgccggagaacgcttccgttgtctgtctgcgtagcccagcaccaacaccatcaccatcccacaggtaatggtcagcgccgtcttcaatcgccagcgaagtagcccagtcagcaccctcgttgatgtccatcagcagaccttcggcaatgcgcttaaccaccgaaccgtgacgcgatgcgtaacctttagcatctggccctgtatctgacgggtcatgtgcagaaacaaccgcgcctttcgctttccatccgagtttcttgtgcgcatcggttgcggcttcaagccattcacgtttgatgattgccatatcacttgcgcttactggctcaccaagccagatgtgacgatacagtgtcggatttctgcgtttgcactcttccatctccagacggagaacttcaggaaagtgcggattgtcggtgtagttcaccgtcagcaggcaaatatcatctggaggatttacgacgaatcgctgataggtatcgtcgagtatgtttttcgggttaaagctcacccatatttcggaaaacggcttgcggatggttggtatcaggatatcccatgattccttcgttaccgcttccgcttcttccacccagcagatatcaatgccttcgagcgatttaatcttcgtcgggttgttttttatgccgtagaacatgaattcagcattcgttccgagatgacgaatcattgaacgctgaatttcaaactcagccgaatacccttcccgctctatggtgtcttcaagcaaccggattaccgaatcgctgatactgttttgcagttcacgagcacagaggatgcgcaccggctgccgacgcgccgcttcaacaagcagccttgcgattgcccatgacttaccgctacctcgaccgcctttggcgactttgtagcgatgcgcctcaatgaacggttcaaagataggattaatcgaggtcattttccgaatagagtgctcatcggtgatgtttcaatctggattgcgccgccgtctttgcctgttagctcgtgatcaaccttgtcgcgccatttatccttctgtcgattcttaagccagaagatggcagctgttgtatcaggcgggtaatacttctcaagcggagtttcgacaattctgttttcaataacacgaatatcgatgtctggagccacgaagcccatagcgcgttgataaagacgatcactaacttctgcatcagcgacggccttacccttttttatggactccgaaaacttaggataatcaagcttccacttgttaatagttgactcactgacttcaaagaaatcagcaagttctgcatcggtgtagcccagcaagcacagtttgcgtgcctgttcggcatacgcctcttgatactttgttgggcgcgccatgtttatgctcctgtagtgaacaggtctaacgcttccttcgatttacgcaccgcttcgatagtgcgggtcgtgatatctgaattagcgccacctgactggaagtgaattttgaatagctcaagcttcagctcgtcagtgccaatgaattgaaatgcttcttctgcggctgcgttctggttcatgaccagtttgtaaatctctaactggaatttctgttcttcagtcatgggaataatctctgccattattggctccgtttatccgttaaaagggatatcagttaagttatcccgtgtagggtataagccattatcaaagccactctgtagggaatggcttttgtgatggcaaaaaaaaaggccgcctgagcgacctttcatttttcatccgttttaatcatctgggtaattaagcggcatccagtgtgtaaccttgcttgctcctgaatcgatgaattccttggttctctgccagtaagagcccatacatgatagtttgaacacgtcaccagtatcagtaagagctataacctctttagaccacatcccttctttgctttctggtagccggtgttcaacattgatccattggtttccgttatcatccatcacaacctcgtctagttgttcgtcatagattcagtggctggcggtgacgattccgcttttcgggagctaccctagccactgttttattctatccgatgtctttccatcagtccgccaccacaaagaatcttttttgccataaggcaggaggttcatctttcagtggctgccagtgttatttccccacttactggcttgggttgtttcgctgtactgccgtaactggttgcccagaataaattccggtttcattatcaagcccacccgtagataggctttgtaatgaactggctcttatctcaacgcagccccttaccgcgcgccagatgctcaacttcaagcatcagcaatgagat

SEQ ID NO: 852 - DNA, 5855 bp, Escherichia coli
  modified_base (13)..(15): a, c, t, g, unknown or other
  modified_base (17)..(18): a, c, t, g, unknown or other
tacatcgtgtgcnnngnnaagtgttgtatgacaatatgaaaactgtggttctgcaacgtgacgcatatcagaccggtcagggccgttataaagcgacgcttcagcgtggagtaatggcccccgcctgctcatcattgatgaaataggctatctgccgttcagtcaggaagaagcaaagctgttcttccaggtcatcgctaaacgttacgaaaagagcgcaatgatcctgacatccaatctgccgttcgggcagtgggatcaaacgttcgccggtgatgcagcactgacctcagcgatgctggaccgtatcttacaccactcacatgtcggtaagcgtcaaaggagaaagctatcgactcagacagaaacgaaaggccggggttatagcagaagctaatcctgagtaaaacggtggatcaatattgggccgttggtggagatataagtggatcacttttcatccgtcgttgacattaatccgtaagacatgggaaaagatagcaactgagatcctaagtttgaatgttatcacgcctgcgtttgagaaacttcgttggaaaagtaacctcggtaaacccccgtgccctgagctcattccggagatgctgtcatagtgaccgtcttgctattggtgggaattggagactgaatgttttgacaagacagtccgggaaattctgggtgtaatcatataagacaggtgatattgcgttctccaaccctttagctcagtggtaagaggactcataatcgcttggtcgctggttcaaatccagtaagggccaccatcacacactgccactggcccattgcgccatgcccggcgcatatcagccacagagcctttcggggataatttgcagagtggtctggctgactttctctgtaggcagatcgttcccgcttgatagctcatcccccaaagaaacgtcacgatatttggtattttcaaaattcaaaaagaaaacccgcagagtggcaacagagattaaaaagtttgagaaacgcgatctggcacaggcggtgattggtgttggagtgatggtagattttatcagccggataatgtcggttctggctgatagctggggttgttggtgtggtcttcctattgatgaaaaaacaagcaattacttggcatgttatctgtaacactttaaaactgttaagaagatcacaattcattatgtttattattgtctggccggagggatatttgttaaaaagtgcgccgtgtggtgaatccccctgtgcggtggggcgactggtgtacatagcatttattatgttatgagcgaagcctacgcgggttcagtgacaccgactgaattcaccgggaggcacccggcaccatgcaacagacgcaagttaggctaagccttatacccctgtaagttttttacaggggtttttgtgcacagaaaactcccagctaggctgggggttccggaaagctttcagctttgagccagttattaaaaccccttttgatttgttaaaacaccttgcggtctggcaactgcaagtgtcaaacaagaaatcaaaagggggtcccaatggggaacgaaaagagcttagcgcacacccgatggaactgtaaatatcacatagttttttgcgccaaaataccgaagacaggtgttctacagagagaagcgtagagcaataggcagtattttgagaaagctgtgtgagtggaaaagcgtacggattctggaagctgaatgctgtgcagatcatatccatatgcttgtggagatcccgcccaaaatgagcgtatccgggtttatgggatatctgaaagggaaaagcagtctgatgctttacgagcagtttggtgatttgaaattcaaatacaggaacagggagttctggtgcaggggggactacgtcgatacagtgggtaagaacacggcgaagatacaggattacataaagcaccagcttgaagaggataaaatgggagagcagttatcgattccctgtccgggcagcccgtttacggaccgtaagtaacgaagttggatgcaaatgtcagatcgtgtgcgcctgttagggcgcggctggtaagagagccttataggcgcatttgaaaaacctccggctatgccggaggatatttattgcacgtcgtcaattgcggcgtgctggctcttccattgatatctgctggattaaatcgtctggcatatgttcctgtaaaatacgccagaggttctcggcggttctattcagtcgggtgttcattcggtaaatataagcctgaatggggactgtcaatttagcagcatcaaggcatatcagacgtttggtctgtagttcatcgacgatcgaccagatcggtaaccaggcaatgccgtatccgttgagcgccatattctttaataactcgctcatcgaagagataaatatcgtgcgcccggtaatacctccaacctctgccagatgacgattgaccaacctgcccatataagatgtggcggtatagttgagcaaaggaacctggggctgagtgatatcgaatacagggtgcccctgtgcgtcggcagcacataccgggtacaactcagattcaaacagtttcaggcagcaaaaaggcgattgcataagatcttcatcgcgaaacgaaataataaagtcactcttgccttcgcgtaacgtatttacggcctggacaacatcaatggcttcaacatgatagacaaattctccgccataggcggtaagtgaatgcaccagtttgggtaatacgctcagggatagtgagtgcgcggctgcaattttaatgttgggaacgccgagtaaactctggccgtttaactcccccaaattgcattcaagctgctgtaataagctgcgagtctgggaatgaaagagcttgccctcttcggttaattgtaaaggggtggtcgtgcgatcgaataaaacaacgccgatcgctgcctccagcgccttaattcgtcggctgaatgcgggttgcgaaagattacgctcttttgccgcctgagaaaaatggcgacaggcttccagtgtcaggaaatcgtataaccattttgtctcgatattcttcattaccatggcacctgtattttcaatccaaagacataataaaacatcccggcaataaaaataatgttctcaattagcacaacctggcctttatcattcgttttgtgcataaccccttcatttccggtattgacgttgatatcacatttcgccaaaaaacgaaatttttccgtcagataaccagaatacatcatcactatggtgaataagcggaatgttccatagctgcatcatgcgtgtcttgcatcgccttgtacaaccttgcatttctcatcgcccatttcgactgttaaaaaagagagcagcagttatttaccgcgtattgtcattaacgttttgagaggcaggtattgtgaaaggtttaattggtgtactcggtggaatggggccggcagctaccgtcgacctgtttaataaatttgtaacttttaccgctgcacaatgtgatcaggaacatattcctttaattatttcttcgatcccggacattcctgaccgtaccgatgcattaatgcatcatgggcgttcaccattccccgttatgcgtgattatatgcataagctggaagatgccggggcagaatgtattgttattccctgtaataccgcgcattactggttcaaagaattaaaagatgcttgtcatattgatatattaagtatcgtagaaactacgatcaatgaagttcgcgcctgtggtaaaacccgaattggcttgttagccaccaatgccacgctatatatggggttataccaaaaaggaattgagtcgctgggatttacctgtgtcagccccgatgccgacggtcagaaaaaagtgatggaaagtatttattccttgaaagctggcaatatagcgcacgcacaaaagttgatgaatgagcaggctgaaatattattttcccgcggtgcagaaatccttgttcttggttgtacagaaattccggttattctggcgcaagccgttaaagagcagccttcccgctatattgactcaacggcgtcactcgttcgtgccggaataaaatggtacgaaaatcgtgtcggtaaacattatcttttaacccaataatcatttaaatcgcagccagaaagttattcgcttttaactgaattatatttataacggagaacattatggtttggctggaaattatcgtagtacttggtgcaatattttttggtattcgccaggggggaatcggtattggtttatgtggcgggcttgggcttgccattctgactctgggatttggtctgcctatggggtcgccgccagtcgacgtgatcctgattattatgaccgttgttgtggcggcctcagccttacaggccgcaggcggaatggattatctggtacgcgtcgctggtaattttatgcggcgtaacccgaaatatatcaacataatcgcgccgattatcacctggtctatgaccattatggccggtactgggtttattgttttttccacgctgccggtgattgctgaagtggcgaaagagtccggtatccgtccttcccgcacgcttgccggttcggttgtcgcttcgcaggttgcgatttccggttcgccgatcagcgccgcaatggcggctatgctcactattatggaggtaaacggtgtcagttttattcaagtgatgtcggtatgtcttcccacctcttttgctgccgcgatggtcgccgcttttattgcttcccgacagggatgtgagttgcaggatgacgaggtctaccttgagcgcctgcaaaaaggactggtgccaaaatacgagaataatagcagcatcaagccaggtgcgacgctctccgtcggattgttcctgctggcgacggtcgctattgttattcttgctgccttcccccaactgcgtccgggttttgatatcggtaaaccgatggaaacacgcgatatcattattatctgtatgctctctgccgcctgcctgatggtggtgctgtgtaagacggcgaccgatgccattattctcacctccacattccgtgcggggatgagttcgctggcggtaattctcggcattgtaaccttaggcaccacttttattgatgcgcatttaactgagattaaagatattgctggtgatattttgcaggcgtatccgatgttgttggcgctggttctttttggcacttgcgcgctgctctactcgcaaggtgcgaccacgccgttaattatcccgcttgccgtcgcgcttgacgtgcccacctgggcaattctggcgtcctatgtggccgtcaccggagtatttgtactgccaacgtatccaacatcactggctgccatggaatttgatactaccggcacaactcgtgtaggcaaatatgtgctgaatcatccatttatgctgcctgggttggggggaattattgctggagtggcattaggctttgtgattgcgccaatgattatttagcactatcaaacatcagtatcgatggtttatacacaataaagacagatatggcggaatatagtctgttgtaagcgccaacaaagaatagggaaattccgccatgtctgaacatcttcacaatatggtattaagtgttgtcgtttaatgatttatttcttggttatgttgtgtattagctgcatctatcgcttttgatacctgaggtgtactggcaatagcggacactaccatttgttctttttttaagcagtcatctgatgatatttttccctgaaggctgccggggagatattccccagacgagagtgacgacgctgacgattgtagaaaatctcaatgtattcccgtat

SEQ ID NO: 853 - DNA, 1809 bp, Escherichia coli
atatatgctgaaaggcgggatttccggtcgcagtgcaaaggaaacgtatccataccgggccattcacagcattgataccgacattaagctcaatcgcgcattgtgggtgatggcagaaacgctgctggagggtatgcgctgatgccttttccctgaaagcgcagttctgactcatgtccgtccctgtccccgggcattcttccattcatttgcttttataaggaatcatctcatgacaacctcttcgcataattccaccgcaccttctgtttccgtaactactgcatcagggaataaccagtctcaactggttgccactcccgtccctgatgaacagcgcatcagcttctggccgcagcactttggcctcattccacagtgggtgaccctggagccccgtgtcttcggctggatgggccgtctgtgtgaagactactgcggtggtatctggaatctgtacaccctgaacaacggtggcgcatttatagcacctgaaccggatgacgatgatgacgaaacatgggtactgttcaatgccatgaacggtaaccgcgctgaaatgagcccggaagctgccggtattgccgcctgtctgatgacgtacagtcatcatgcctgtcgtacggagtgttatgccatgacggtccattattatcggttgcgggattacgccctgcaacatccggaatgcaacgccattatgcgcatcatcgactgaatggagagaagcacaatgcaacagctttcctttctgcccggagagatgacgcccggcgagcgcagcctcattcagcgggccctgaaaaccctggaccgccatcttcatgaacccggcgtggccttcacctccacccgtgcggcacgggaatggctgattctgaacatggcgggactggagcgtgaagagttccgggtgctgtatctgaacaaccagaatcagctgattgccggtgaaaccctcttcaccggcaccatcaaccgcacggaagtccatccccgggaagtgattaaacgcgccctgtaccacaatgccgctgccgtggtgctggcacacaatcacccgtcaggtgaagtcacccccagcaaggcagaccgccttattacggaacgtctgggaaaagggcactggccctggtggatatccgggtgccggaccatctgataatcggtggcagccaggttttctcctttgcggaacacggtctgctttaacccgtcaccgtcacaatcaccttcatatcacttcagtttctctttctcagctgtttcttactttcacattcaggaggactattctcatgaaaatcatcacccgtggtgaagccatgcgtattcaccgtcagcatcctgcatcccgtctttttccgttctgtaccggtaaataccgctggcacggcagcactgaggcgtataccggtcgtgaagtgcaggatattcccggtgtgctggccgtgtttgcagaacgccataaggacagttttggcccgtatgtccggctgatgagcgtcaccctgaactgaatcaggaagggcattcagaagagcagaattatcgccaccaccggaccattcttaaccgattttctgtgaggactttatcgtgtcagacacactccccgggacaacgcttcccgacgacaataacgaccgcccctggtgggggctgccctgcaccgtgacgccctgttttggggcacgtctggtgcaggagggtaaccggttgcattaccttgcagaccgcgccggtatcagaggccggttcagcgacgcagatgcgtaccacctggaccaggcctttccgctgctgatg

SEQ ID NO: 854 - DNA, 51697 bp, Escherichia coli
  modified_base (9)..(9): a, c, t, g, unknown or other
  modified_base (11)..(11): a, c, t, g, unknown or other
  modified_base (29123)..(29123): a, c, t, g, unknown or other
aaaatcaancntagaaatacgtgccggttcgagtccggccttcggcaccaaaaacgattgcgataatcgtaaaacctacaacaatcaatacgttgtacaatgaagctggacgttgacggcaactacaaaatggccgcatctccggctttttttgtttataaagcctcgggccggatcttttcactcactccctgttttgtcaatctctctccacgcaacttctgagcatctcgacattgtgttcaatatagctgagcgtcaccttaatatcgcggtgtccgagtagtttctgcgtgacatacaaattttgctccggtttctgcatcaattctgtggcaacggtatgacggtagcgatgtgatggaaaacggctgtggcaggcatcgctgagtttggcaaagaaataactcacctgattttctgtcatcggtttaccctggcgtagcgtccgccgactgaaacgattgatgttgaacaactgatcgtcagcccgtattccctttgttttcgcttcttcaagcagatgctccagatagggccgcagtcgggaggcgatgggaacaatatgttcatcatggcttttactgccttcgatctgaataaacagcgtgtcatggaccagatcgatatccctgacccgcaggtgaataagctgattcagccggatagcggtgtagttgaaggtttcgactacggtcagccaaaaccatgccggatataaaggcgaacgatagccacgctgcattttttcccgttcgataaactggttcagcactttgcgggatgcgaggatttgctcgcgggtcagggttttctttttcttacgagattcccgcagcgatgttttctggaatggattgatgaactgctccagtagcccctgttcaatggcgaagttatacaaggctcgcatatggcgcatatagtgattccagctcaccggcttgatacagcgcacatttagcaggtaatggcgccactccagtaccatatgcggtgtgacttcggcgggtaggacgttgcgccagtgggtatactgatttaccgccgtgcaatagcagctctgggtatcagggcgcagcagacgggcaaaaaaatactcttccaggagctgttcaaaggtcatgagtgtcttctccttcactgagcaagagatgagggttattaaagggaacgtcatctccaaaaagcggcgtgggatcgtcaagcagatatcccttcagacgtgaacaacggcgtgggccgacaacggcgcagtgccagatgttgaggccgtttttttgttttcggtgaagattcaggttctggaacttcttctgtacttcccgccagtattcttctgggacattctgaccgcaggtgctaagccagagtttgaaaataccgggcgtcaccagaaacaccgacccggcgacggtatggattcgggcgttaggttcattgacttccagatgttgagcctgaacgttacgcaccagccactgccagaaggcttcgccggatagtgcggtttcgttttgttcgggtagaggggatggttgttctacttcaatgttcgttgcaatcaccgcttctgtctcatttcggatttccgctatcggtgtgacggttccaatgaaggtagcgggccgctgttgtggatcttcccaaatcagcgaaggggaaaagcgtaacagcgtgagttcactgctccaaccgccgctggcctcaatccggcaatgccagatggctttgtcctcacaggggatgagtaactggtgtgcctgcatctcgtcgaacagccgcatgttatgctgcggtacagcatcaagcccctggcacagcaaccagccgcgcacagcatcggcagcgttcttgctgaccagccacagcgcctcttccgtcagccagccgtcagagcctccattcgggttgttgagccgaaactcatgcgccagcaggtcgcgcaaactggtgataatttgctgcggcagcgaggtttgcggacgatggatcgccttgaccggatcgccgccgagattaaatgccaccgacgcccggtcggctttctgcaccagttcacccgccagcccggcatactgatactgtccgttcaggcagtggagtagggtggataatgcagcggtgtcggcggcgagccagtcgaggctttccggagggatcagttgggtaagcaggagaactgccgcagccggatggcgcaggtaatcacgttgcggcagatagcgaaatcgatagggttgggtcagcgggccatgccatggaaaccagcgtttcccgctaaaattttccacttcaatatcggtgatgagtttacccagatcgtgcagcagcgcggcgtagatgataacggtggtccagcgttcggactgcgcggcctgatcttccggcgctgcatcaggcggaaaaagataactctgccgcagccgtgcggcatagcaggcggcttcgaggctgtgatcgagcaggccacctgcgtgggaatggtggtggttttccgaggctgggaacaactgcgccagttctgcgaagcggtggattggtatcagccagaagcgttcaaacagtgaggcgggaagggcggtgctctggcgaataaactggatcagctgttggcgggtagtttcagctagtagcgtttgcgcggattcaggatgcagccatccctccgtgacgtctggttcgccagtggatggtgtggtgttttgctttttgcgcgtcagccatatccgcataatggccctttattcccaatggattttgaggtgcaggaaggcggtgacgcagtgaatcccctggagcttacataagtaagtaactggggtgagcgaggaaagccaacgcacctgcaactcgaaagacgaagggaagccccttttcgggtaagcccgttccccccttcactctcttccccttaaccctttggattttgccttttggtgccgtcagatttggggcaaaactgtttattgggttgcgcaaatttattggagtggagaaaaacggcagagcaggatgctccgccgttgatatgaaggtcatgcgctcagcgctaacgggctgctgcgcccgttcaagcagatactcacaggcattacgcgctaaaccgctggcgcggaaaatcgcttttttgtcttgctgcaacaccttcagccacgatgcgatgtaactgtcatgctgtagcttcgactggatgccaacgtgagcacacaggaaagccgctcccatttcggcgaccagctcttcaaaactgtacgtcggatcgccgaaggtatgctttccggcagtgatgccgtcccggttcaatcgtgaagcgtgtccggtagcgtgcgtcagttcatgcagcagcgtgccgtaataatcctcacgcgaagtgaactgctcaggatgcggcatgatgatgcagtcgcgccccggcgagtaatacgcccggttctggcgtcggtgagtgatcatcaccgcactttgccggtaacctgctcagtggcggcgataggatcatcgaccatcacgacaggctgtgaaaacgcctccggcagcccttcacattgttgaatgttgaacagccggaactcgcgtactacagcgtaagacatcactttagggttgccgtcagcatcaagaaccgtatttccgttgctgtccacaacttcgcgctgctggggcagataaaacacggccagtgtagatctttcgcctttgtggatgttaccgcccgcgttgcgaatttgagtgaaggtcagccagcgatcgttttcatatccctgtcgttctgcgctgttccagagcaggggaatattgatgccgtgataaaaccgcccggacagggcattcatcggcaccaccggttccccttcccgccacgggcgaacccaggggagcacgcctttctccagcgcggcgataatttcatctgtgactttctggtaaagatcgttgcttctgttcataagcgtaacctcatgataaagaagccgggtacagcgctcccggtcgggagtcgcccggcacgaggagtaaaggatgctgaggtaatcagctggtgtgaagggcagtaaccaacaggtggttatcttcaagcgttaagcgcagcggcgtcatcagcggtacattgctgctgccgtcagagggcaaacagtacagaccgaaattgatactcttacggtccgggcctgcgcttttgaatgtcagcatggtcgcgacaatcaggttttcgagacggtcgtcttcctgagagggatcgggtggaaaactaactaccttttcccaggcctcagttgagacagacagcgataaggattttgcttcagggtaagatgaagttggcatcgtgtttctccaatggtgaaagcagagaaacaccgcccggcagggagggattcctgcatggtggggtagaggatgtatcaggcgctaagcgctgtccgcgaggatgatacggagcggacgaaaaggcgagcctcaccgggtagggtggcaacctgaaggctctggttgcgggtcaaacttcgtacagattaatacggtatcaataataatcaagagcctggtgtctcagggctagagtttggattcgttattctgaagtccaacactggtgtgctggatttatccgctataggggttaaaagcaatttatccgttgtaggggataaagcagtttgggcaatcgatgatacctgcgaagctcacggtctcaggctttgaagatctgtttacgatgccagccgacgtattgttcagtgggccacagcgatttgtcgtgaggaaggtgtaactgctggccgttccgttgccagaacaggttatccaccaccgggctacggctgacgccgccggagatgcggatggtaaggttttcatccagcccgaatgcgcccatatcaaaagcatcgtggtgcagcgaacatagcgccagaccgttgtttaccacacacggcccgccataggttttccagtgaatatgggcggcttcaataccaaccagcgcaccatcgagtcgtagatagtaaccgcagaaagcacatcgcgaatggtaagcccgaagcacgatatccctgaaacgcggatcgcggctctttgaacggtcgataaaatccagacccagttggttggcgaggatccgctgaatactctcggggaaacgatccatcaggatctgctgggccagttggtcaattacttcagggtgtgcaagcagttgctggtaagctgtttcatcaaaaccccccgctacctgattatcaatcagctctttctttgtcggctgggtgttgcctctacggggtttgcagccttccgcattagcaatttcccagaagccgtcagttctgagtcgccagaaaggcatattgggatagtcagtgcgtcgcttggggccaaactcttttagcaggcgagtgagtggttcgtggatctctaggccgtagttaaacaggcgcgggtggcctgctttgtactgtgacaacacatacagcagcagcaacggtttatgcggcgcgcatacatcaccctgacgccatacagagacgttagagatagccgattgcagtgtttcgagtgatgtcataggaattaaccgggtaacgggctgatattattgcgatcatgctcgcaaaagcggtgaaattcaattgttgcttgtgacattaataaggaagttagacactttaatgtctgagagttagacatcaatgaaaatgtcacttgatggaaaaaattatctgggcgagagaaacctaaagaggatgtagtctgacagatacctatataaacaactggtacctgtcagactaggtgcgtgctaacgcaccttagttgataaaatctaatccgactcgagattttgatacaccgagtctacctaataaattcaaagcatattcgtagcgtaattcagcaactatttttgcttctacggatattatgttcatttcattttcagtgggcttggcatattttagtgctattattttatcttcagagaaaataccttgattttccacatagcaatccattgctttaggatttgccttgccatcgagtccaacggtgaaactaagaatatgtattttcccgtcatgttcagactgaacgaacaatagattattctgtgtggaataatttagtatttgtctaattgattcatcttcgttgatttctggcaaattgggtagtttaagctcgttttgcatatttttacgtgtattatttaaagcaactttcgcatcagggtaatgactccaacttattgatagtgttttatgttcagataatgcccgatgactttgtcatgcagctccaccgattttgagaacgacagcgacttccgtcccagccgtgccaggtgctgcctcagattcaggttatgccgctcaattcgctgcgtatatcgcttgctgattacgtgcagctttcccttcaggcgggattcatacagcggccagtcatccgtcatccatatcaccacgtcaaagggtgacagcaggctcataagacgccccagcgtcgccatagtgcgttcaccgaatacgtgcgcaacaaccgtcttccggagcctgtcatacgcgtaaaacagccagcgctggcgcgatttagccccgacatagccccactgttcgtccatttccgcgcagacgatgacgtcactgcccggctgtatgcgcgaggttaccgactgcggcctgagttttttaagtgacgtaaaatcgtgttgaggccaacgcccataatgcgggcagtagcccggcatccaacgccattcatggccatatcaatgattttctggtgcgtaccgggttgagaagcggtgtaagtgaactgcagttgccatgttttacggcagtgagagcagagatagcgctgatgtccggcggtgcttttgccgttacgcaccaccccgtcagtagctgaacaggagggacagctgatagaaacagaagccactggagcacctcaaaaacaccatcatacactaaatcagtaagttggcagcatcaccaagttttcctgtgtttttcgttagtgacatctgtatgatcattttattacccctaagtcagtgaatacttaaatctaatgtacatatagaatagaatcattattttcatgttttatagttatttgcttttatagcctttattttaaatcaaagcaatactatggttattaatatttcattcattgttaccaagcatgtctaactaaaaactatgtggaataatactgctctcttggctagctagtgatattgtcgttttatctattgatttgtgatggattgataggtattcatgtgatgccgttgaaatcaccttttgcctattgattagttgcggattgataggcgtttatgtgatgccaatggcatcacccttttacctattgattggtgttggattgataggtattgatgtgatttcactggcatcaaaagcttattttcccttttatctctacataaagggcacgtaaaattctcttttatgtagagataaaaaactcccttatttgtcactcttagcccaaccatctggcgttagaattaattcacaccttttcttcaagttattcgcgcgaaaaacttgaattggggaatttaacaatttcccgtttcagctcggtgattgagtagagttcattaggttaagtcgtcttttttacagtctatagggagtattggttaaaaacagcttataggctgtaaaacgttctagaaaatggtgaatgccttatgaatactgtttatccgttgaagaccttaaatcagttacgtcctcttctgattggctttcgtaaagtaaatggactgacccaaaaggatattgcagagaggcttggcgtaacacagcaaacctatgcgcgattggaggcgaacccaggtagcgccagtattgagcggttgttcaaagtgtttactgtgttgggcgttgaaatagaactttcttcttcattggcttcatcagccataaattcatataagttaactgataaatatagagattctctagccagacgagaaaagtggtgatgatgtctatgtgatagtctatggtgaaaaccttagaacatgtcgataaaattcatttttttaaacgtgttgccggaatatgcttatggcatcgacacgttcttactatgtgtcgatgaaattcgcttttttaaacatgtcttctggatatgtttaccgcatcgacacattccagccatatgtcgataaagccttattttttaaacatgttgccggaatatgcttatggcatcgacacgttcttactatgtgtcgatgaaattcgcttttttaaacatgtcttctggatatgtttaccgcatcgacacattccagccatatgtcgataaagccttattttttaaacatgttgccgggatatgcttatggcatcgacactttctggctatgtgtcgatagaattcgcttttttaaacatattgtcgagatatgcttaaggtatcaacatgttcttgctatgtgtcgatgaaatttgcttttttaaaacatgttgtctggatgtatttaccgcatcggcatgttccagtgatatgtcgataaaatgtgattttttaaacatgatgacgtgacatgtcgatgacaacgacatattatggttatatgtcgattaaaacggttttcataaacatatgaactggaatgcagaaaccccttacaacgatttgccgatactgccgcctgacctggagcgcattgaaacacgcagcgtacttaaagcatgcataagtgcgcgcgcagcaatcgctgagttgaaaactgctggtgagttgatccctgaccaagggttgctgataaacatcctcccgatgctggaagcgaaggactcatcgcgcatagagaatatcgtaactaccagcgatcaactctttcagtatgctgaccgcgcagatggcgcagatccggccactaaagaagcgctgcgctatcgtacagcgctctatgatggctatacccatcttgaggactatccactctgtacaaacacagcggtagctatctgtaccaaattacgtgcagttcaaactgatatcaggaaaactccgggcacggtattgcgtgatcagaataataacgtggtatatacgccgccggtgggtgaagactctattcgtgagctactggcgaattgggagcggtttatacacggtgatgatgatttagatccattggttaaaatggctattgcgcactatcagtttgagtgcattcacccgttcccggatgggaacgggagaacgggccgtatcttgaatattctatatctgatccagagcgaattgctttcgctaccaatcctgtatttatcccgctttatcttggagagacgcgatgattactacacgctccttcgtagggtgacagaagagggtgactgggaatcgtggatattatttatgctggaggctgtggagagtacgtcccgatggactactgataagatatcgattgtgcgggcattaatggctgaaaccacagagtatgtacgcgagaagctaccgaaaatctacacccatgaacttgtccaggcgctttttgcacaaccatattgtcggatcgataaccttgtcgaacgtggggtggccaagcgccagacggcatcgacatacctcaagcagttggtcgaaattggtgtgttggaggaaatgagcgttggccgtgaaaagctgtatattaacactaggttgctacaggagttgaatcagtagtgaatgggcccagaaaacaaaagcgtggacaaatggtgatgccactggcatcactttttctccaaacattgcgcccgaatctccgcaaccaacttactgatatcccgttttttacgcggttcagccggtattttcggctctgaaaccacatgcggcacaaactccggcaccgtcgctttgccgcgtcgatactgattaaactcaccgccctgcgctttgcgcagcattgccagcagataggcgagcgggttttgtatgccgccacgggcaacgcgttgagctgcgtcatcaagcacgtcctggcgcagcgggggcggcaggttctgcatggcctgcaagacaagctgtttttcaggattagttaacggaatttccggcggccagttcggcggtgagctgttcgcgcgcgcggtagtactattacgaatatctgtagatacagtacgtacagaagcccggtcctgatttgagactaagccgccaggcctcggtttccggcttagtcctgattcggtaccaggtgaaattttgcctggtaccgtattgagaccggacgtttctggcttagtctcctcaggagactggcgttgctgccagcgggcgcgttcttccagcagttctatacgcgacgataaataacgcaggctggtgtccttgcgaatgtcgggtaatgctgccaacttactgatttagtgtatgatggtgattttaaggtgcttgcgtggcttccatttccatcagatgtccttcctgctccgctactgaaggcatggtgcgtaacggcaaaagcactgccggacatcagcgctatctctgctctcattgccgtaaaacatggcaactacagttcacttacaccgcctctcagcccggtaagcaccagaaaatcattgatatggccatgaatggcgtcggatgtcgcgccagtgcacgcattatgggcgttggcctcaacacggttttacgtcacttaaaaaactcaggccgcagtcggtaacctcgcgcatacaaccgggcagtgatgtgattgtctgcgctgaaatggacgaacattggggctacgtcggtgctaaatcacgtcagcgctggctgttttacgcgtatgacaggatacggaggacggttgtggcgcacgtcttcggtgaacgcactctggccacactggagcgtcttctgagcctgatgtcggcctttgaggtcgtggtatagatgacggatggctggccgctgtatgaatcacgcctgaagggaaagctgcacgttatcagcaagcgttacactcagcgcattgagcgacataatctgaatctgagacaacatctggcaaggctgggacggaagttactgccgttctcaaaatcggtggagctgcatgacaaggtcatcgggcattatctgaacataaaacactatcagtaagttggagtcattaccagcgaagaatatcttgcgatactcctcgctaattttaaaacgaatggtgctgatcaccgttcttaatcacttcgccagaaccgaccataatatggtgttggtttattagcgctgattcatggggatccctcagtgcttttgcggttttttatatctttaaagcagtagcggtagggtcgcgctggcagtttgctggctcacatcgctgtacttatgatccagcgcaatcagcgatgtggtgagtaactctaccaacagcataactcccaccttggcattcagcgcgccggcgctcaaggggccttccggtttggccgcgaccagttgaatatcactcagcgaagctaacggactgcgcggcgtattactcagcgccagtacacgcacaccttgcttacgcgctagttttacgacatgcagcagatcgcgcgtggatccagaactggaaatcgccaccacgaacgtgtttttactaagtgttgtggcgttcatggcagcacgatgcatatcgctgaacaattgtgcgggtttccccagacgcaggagtttgtaatgtaaatactcccccagaatagcactggctgctacgccataaatctgtactgactgagcctgatgcagtgcaagcgtggctgcttccagcaaggtcctatcgagtaattttgctgtgtcctgtagtgcttgcacggattcattgaccacattgtcaatctcatcaccgccgtactctacagactgtacttgtcggagatcgagtgcaagcgccattttgaattcgttatagcccttacaccccagcgttcggcacagacgtgtgacgctagcctcgctggtgccgctttcacgcgccagttcggtaatcgtcaggtagacaacttttgccggatcgctaagtacaaactctcccagcttctgttgagttcgactatatccatcaacgctctggcgcaatctcagcagcaggttttcattttctggcatgcaaaatccttaatgcgtttctctgccgatagtgtggcggaaagtaggggagagatgccagtcattttaaaaaagtatgatcggtgtcttggtttttgatggtaattttcatttttaaaattagttatggtaaaaatttttatcaatgatcagggagatgaaaaaatgatgcaaatatttagcggcgcttcgtcaggcgcatggtttgaaaaagcgcagcggttcggcaaatcgttcatgctgccgattgcggtattgcccgcagcggggttgttgttggggattggtggggctctgtcgaatcccaatacgttgacggcctacccattcttgaatgtcgactggctgcaggcaatcttcacaatcatgaccagcgcaggttctattgtgtttgccaacctgtcggtactctttgcggtcggcgtcgccgtggggctggcgaaatcggataaaggcactgccgggcttgcggcattgctagcgtttctggtgatgaatgctaccatcaacgccttattaacgctaaatggaacgttggcgcacaagaaccccggttcagttggccaggggatgacgcttggtattcagacactggaaactggtgtgtttggtggggtggtgattggtctcgtcacctgcacgttacatagccgtttcaataaagtctcactacctcagtttctcggtttttttagtggttctcgttttgtacccattatcagctcccttgccgcgatagtagtgggtgcggttatgacggtggtgtggccgcatttccagaaactcatttttggactgggcggcctggtggatgcgacgggctatctggggacgctgttgtacggcttcatcctgcgtatgcttggtccactgggtttacaccatatcttttatttgccgttctggacgacggcgctgggcggcagtgaaatcgtcaacggccagttggttgaaggtacgcagcggattttctttgcccaacttgccgatccgaatacgcagcagttctacgcgggtaccgctcgctttatgtccgggcgctttatcaccatgatgtttggcctgcttggcgcatgtctggcaatgtaccatacggcaaagccggagaatagaaaggttgtcgccggactacttttgtcggcagccttgacctctttcctgacgggaatcactgagcctgttgagttctccttcctgtttgtcgcgcccgtattatacgtaattcacgccttcttcgatggtctggcgtttatggtcgcccatattttacatatcactattgggcaaaccttttcgggcgggcttatcgatttccttctcttcggcgtgttgcagggggaatctaaaacaaactggatgtatgtccccatagtgggaataccgtggttcttcctttactacttcactttccgctatttgattaaccgctttggctggctgacgccgggtcgtgagaacgtaaccctggttgaatccggccagcctcagagtgaacgcgcagcggcagtcattgccgggctgggaggcaaagagaatctggaagaggtggactgttgcgccacgcgcctgcgcgtgacggttaaagagagcagtaaggtagatgaagctgcgctgaaagtgaccggagcgcgtggcgtgattattcgcggcaacggcgttcaggtgatttatggccctcatgtcaccatcattaaaaacgaagtcgaagagattttatcgtaatgaaaactgtactggattccctgaaaggtaaattaatcgtctcctgtcaggctctggaaaatgagcctctacatagtccgtttattatgtcacgtatggcgctggcggcagcacaaggtggtgctgcaggtatccgtgccaacagcgtggcggatattagtgctatcaaagagattgtctcccttccgatgatagggattatcaaacgcgattaccctggcagtgaggtgtttatcacggccactctccgggaagtggatgagttgatgaccgttgagccggaaattattgccctggatgctactgcgcgcccgcgccctggtggtcagacgctggaagaactggtcacgcagatccgcgctcgctacccgtccgtacttctgatggcagatatagcaacagtagaagaggcggtgacagctgaacgtctgggttttgactgtgtgggcactacgctctacggctataccgcagaaactgccaggcatgtgctggcggaaaatgactgtggattcttacgtgaggtcctggcagcggtcagcgttccggttgtggcggaagggaacgtcgataccccggaacgtgccgcacgttgcctgacattaggcgctcataccgtggtggttgggggggcaatcactcgtccgcagcagataacgacacgctttatcgcggcgatcgcctcgtaaagcaccgatggggtatgatactttggtggggataagcgataattatcgcttatccccatattgagagtgttatgcagtacccgattagctagattttccagaccctgcaaggtgagggggactattgacgcgctggacgaactattcgccacgctgagctacgacaaaccgcgggtgattccgctgcactttaaaatttccgaaggttataccctgttgatgctgattaccaccttcaccagctgcctgatattgtgcaaaaactacggctggtgaaggttggttttaccattactgctgtatataccctgcaactgttatggctgaatggcgagcagtacatccttccgtgtcttatcaacaccattattggttgtttaattgcttcggcggtaccgtctggttgtggtcacagtggtataacgggttattgcgtaagaatgcccatgacgcttcagaagcctatcagaaagtgatattggctcagcagcactttacaagcggcggtacagtggctgggagattattgccgatccgatatgccgcattaatgagagagttcatcataggagaacgcttttgccaaataaaccacctgcctgtcgtccagaatcgccgcgtagctggttttcccaaccgtttgctcagaaatgagatcaatagccgcaaatcgcgggcctgatcgatgctttcaatatagttagccgccattttttgcagcgccaggcccacgtgatacaagcgtgtatccggcatatagagcggatagtcgttatcgagaaactcctgagtcaggcagtgggcggagcttctgggaatatagaggtaatctgcgaggcgatctgatgtataatctgtttagtaagagtagcgtttttaacgctattacgtccatggtgtagcctatatgcaggcaaagttcatatccttgagttttatgtcagcctcttcctttaagcatctacttggtgtctatcgttacttcgcacacaagcatcatgtatatgatgtaacgaaattagttaacgcccttataagaatcaagacgttatcgggacgctgttaacctggctatccatcccaaaaccggtgctgactggcaatagcgcggacagcaaaagcgggtgatgacaccggggcagaatgaaaaatattatcttgctggcgcgttacatagctgaacgggcaaagtctgctacgtgggcagtaaccgcaaagttcagccttatttatcagtctgttgaagcaactgaagtctgtgtaccggcgggcaaaaacgatgcccctcatcgtggataattacattattcacaaaagccgggaaacgcagcgttggctgaaggaaaatccgaagttcagggtgatttatcagcaagtttactcgccatgggtaaatcattttgaacggctatggcaggcgcttcatgaaacgataacgcgcaatcatcagtgccggagatgtggcagttgctgaaaaaagtccaacactttatggaaactgccagtccgttccccggcgggagacatggtctggcaaaagtgtagcggtattaggcgcagctatttagcgacatattcctttgttttatcgtcagttcgtaaacgtccgatagcgatgatgtgaagtgcactatttgcagcacgctccccaccctgattaagtcggtaacggttcatttttttagaagatacggtaaccgagttgacaccacacagcaccgcaaaacctgattctattcttagccgttggggattatctccggcagtgatgagcaactgcgaagcgctttcgtatccaacagcattacgtttaatcagttcaggtgccagttcatcgacaattgccgcaatcatgacatcaaggtcggcgatttcatcatgtaactcgaaatagcgtcaggcaagtgatttcaatgcaatgcgataaacgttggtaacattacgatattcactggcactaggcttccaggatcccggagtcctgataagttgcatacgtgtcatatttctgagtggttcgcgtaattcatccggtgcagagataatataggaatggataatctggagagcgactctgcaggctgatattgcggttttgcggcaagtttttggcatccgcttctacgccaaatacctgaagtaggaatggatgcgttagcagcatacatccggatctgcgcggggaatagccggaaacggctatccctaccacaatagctaactttgtaatagtgcccttttaggctcatgtactctgacgtaattctatctggtagttgaattgcacgatacgcgactcttctgattcatcatgattattattcaatagcccaatcagtaacttacccgtctctatccccatttttttgtagtcaatacggatggatgtcaaggttgggtgtgtttgatcgcaattgtctgaaccatcaagacaagctacagcgatattttcaggaatttttaacaaacgccgctggcactcaaacatgatacccagcgcaatctcttcgtggctgcaaatcacagcatccagctctggttgtcgcagtaatatctcgtttaatgcgtaacgccccaattgcagacttgcggcatccggcatggtgataacaagatcagagttctggtaatggctcaacattgctttatgccagccgttcagttgctgacgttgcaggcggttgtccatatgcgcaccgataaatccgatattcttataaccctgttccagcagatgttcggtcagtttatgtgatgcttcaaaaaatgctgtttcgatggtaatttgagccggactgaaaggggaaccgacaacgttaatggtaggtatatttgttttctcgagtatctggtgagttttatcagccaactgagaaccaaaaataactaacgccgccgggttgccttgaagaagcgtcatcagaatttcagcttctttgagctgattatactcatgacacccaagcagtagctggaattcatttttattaagcacctgctgcaacgactgcataaagcgggagctggctttatctgtcagggaaggaaccagtacggcgactgtatcactgtgaccagatgcaagggcgccagcagttctgttgggaatataacccaactcttctacggcctgttctatcttttccctcagcttgtcagatacctgttccggtgttctcagcgcacgggaaacggtcatggttccgacacctgcaaagttagcgacctcctgcagcgtcacccgtccggtaccacggcgcttacgtgttttttccatttcgactccatggataattacaaccagctgttttcattactgttatttcaccattactctttccagtttttgcccacggtagcaaatatcctgttgcattgtatatgcaggaaccgaatatagccaaagcatggcggcagagaaatgatagcgctatcacaaagattggtagcgttatcagatagcgctatcaaatgcgacaatcatcacattaattaatgcgtaaaatatctactctcctgttaattatcatcgggagttatcagtagcatgttaaaaaatctattaaatacagaggtcgttcaggtcgtggaacaggccaaagactggcgggaagccgtggcgatttcatgccggccgttgattgaaaacggttctatcgaaccgcgttatgttgatgcgatctatcgctcgcacgacactatcggtccgtactatgtggttggccctggtattgcgatgcctcatgcgcgcccggaagagggagctaacaagctgtcattagcactgaccctgatcccttcaggtgtgaattttgatgccgatgaaaacgatccagtgaaattactgattgtgctggctgcaaccgacagtaccagccacattgaagcgatttctcaactcgccaagttattcgataacgaaaaagacatacaggccattttgatggccaaaacgacgcaggacattttgtctgttattgcgcgctattaatccagaggaacatttatgaaaattacagtggtttgcggtaacggcttaggcaccagcctgatgatggaaatgagcattaaaagcattttgaaggatttgtccgtcagcgctgatgttgatcacgtcgacctgggctccgcgaaagggacgccgagtgatatctatgtcggcaccaaagacattgccgagcagttagtcgcgcagtctgtcgcaggcaaaatcgtcgcactggaaaatatgattgataagaaagccatgagagaacgtttatccgtggtattaaacgaattaggcgcactgtaagctgggggcgatatggatttctttcgttttttgatgagcgatgtactttccgaacccgcagtgctggtcggtttaatcgccctgattggcctgattgcacagaaaaaaccggtaaccgaatgcattaaaggtaccgtcaagaccattatggggtttgtgattttaggcgcaggggcgggtttagttgtgtcgtcactgggtgatttcgcaaacattttccagcatgcctttggtattcagggtgtagtgccgaacaatgaagccattgtttccgtagcgcagaaaagcttcgggaaagaaatggcgatgattatgttctttgcgatggttatcaacattatgattgcccgtttcacaccgtggaaatttatcttcctgaccggtcatcacacgttgtttatgtcgatgatggtagcggtaattctggcaacagcaggcatgaccggcattacgcttatagccgttggctctttggttgttggcgtggcaatggtctttttcccggctattgcgcatccgtacatgaagaaagtgaccggttctgatgacgttgccatcggccacttctcaacattatcttatgtattggccggtttcatcggcagcaagtttggtaataaagagcactcgactgaagacatgaatgtgccgaaaagtctgctgttcttgcgcgacacgccggttgctatctcttttaccatgagcataattttcctggtgacgtgcctgtttgcgggtgcagatgcggtgaaagagcttagcggtggtaaaaactggttcatgttctctatcatgcaatccattaccttcgcagctggcgtgtacatcattctgcagggtgtgcgcatggtgattgcggagattgtcccggcattcaaaggtatttcagacaagctggttccgaatgccagacctgctctcgattgcccggtcgtcttcccttacgcacctaacgctgtactggttggtttcctgagtagctttgctgcaggtttaatcggtatgttcacgttgtatctgctgaacatgatcgtgattattcctggtgtggtgccgcacttcttcgtaggtgcagctgcaggggtattcggtaatgcaacgggtggacgtcgtggtgcgattttgggtgccttcgctcaaggcttgcttattaccttcctgccagtattcttattgccagtgctgggtgatattggttttgctaacaccaccttcagtgatgctgactttggcgcactgggtattttgttagggattatcgttcgctaatattttgatgacattaatatcctccaggatttcaggaacgtggaggatattaattcctcttattttctccatttttctttcttccagtcaggactgcatccgattaatcgtaagcgctccgagaagtacgtagcgtaaggattattttacagctgagaagtttcagtgcagcagttcatgcacacggttcgacggctagtcattgatcttcataattacctcgcgtaaaaaacggggtaaggccgctcatcccagcgtcatctccacaggtaataattcaacgccaatgccagaagagttcgttaacggaagacgccgtgatatacgccctttgatcagcgagagcctgagccatttgaacagaagattatcattgatatcatgctcccgggcaatacgggcaacagaaccccttggttgtaaagccagtgtaaccatttgaagtttaaactcatttgaaaatgacctgcggggttcagctgataatgttttttgttccataacaggtgtccactagttgaaaaggtgggtacctatgttaccaatactggcttaatggctacatacagcagtcggtttacgcatacacttttatagtgcactccggcctcatgaatataacggtggattaccgccgaacgaatcggaaaatagatactggaaaaaaactgaaattgtgaccagtttttgttgaccactacaaataaataaaagagttgcagtgcttgctcggtaagaaaacaatggaagttgagatcctcaaagaagctgtggagtacaccactctacagtagttgcgcaaatttggagtggacgataatgtgatcgtctataagggcaacgctatcatagtcttgtcctggcgggtaaaaaagcgcgcttaccttaacgataagcgcgccgctgttcaggccttgagtggttattcaattcctgtggtgactgtaaaagtgcgcgtttgctgcggtgcaacctgaatcagcgtgccattacgttgcgcggcaagatacccctcaggccgacaggttgcaggtaatgcaaaggcggctacctgttgctctccgttataaaggatccagcgtgtcacataatttagttcagcactgtagaaacgagtaacaaacgtagtgccatcgggagagatcatgcgaaactctggctgatctgtataagcgtccagtttgtctgcaaagaagacaatttctggatcataaaattccggttgactcagcgtcgacagagaggcttctccctgcataatccgttgattaaacgccagccactgagcggtgggattaacatgcgaaggcactgattcacgcaatcttaatatttcgtccgggatattctggctgaatgtagcatttggtatatatgcataattcatgtggcacatatattgtagtggcatatctacagaagccagattggttacggccatcttaatatcgaacagtgtagaggatttgtgaaggaccactgttggttgagccagataatgatgaccgaaacccattacatactcgtaacgcccgttaaggcgtaacatatctccgtctaattccagccatgcttcatccatcgcggcacaggccatttcaccgtgtagcagatgagtatcttccgcagatgggcagccattagccagcaaacctgaatgaaaagcaaaacagccataggtctctatcacctctgtcgccggtttaggctggcgaaacatattgcacatggtgaggccgtgtccatcaaattgcgcatcccaaatcatctgccccatccagggaagaataatcaaatgtccacgactgtttgcaattttaagcccctcgacaccgctgtcatagcgaaaagacgtgacagtaaaatcactattttccagcaagatacgaggtttctcgccaaaaagcgcccgccacaaattaatacgcgtactcataacggttctcctcaggacgctgtgacttcagccagtgcggtacgtactttgctttcacgccagaagtagactccgacatagacaaagcagagcatagaaaccaggaatgaaagctgtagtgagtggaacatatctgcaatatatccctgaattgccggaaccaccgcggcaccgacaatagccataacaatgactgctcctgccatttctgtatgttcgttatcaactgtatccagtgttcctgcatagatcgtcgcccagcaagggccaaacaaaacacttaccaggacggcgacatagaccgcgctgaaacttggagccagtgcaacatatgccaggaacagcgcccctataacggaatagagaatcaatactttttccggattaaaacgcgtcataaggatgttggctataaacttgccaataaagaagcaggcaaagctatagaccatgaagtttgaagcatcacgttcgttgatatcgcccaactccagcgccagacggatggtaaatgaccatactgcgacctgcatacccacataaaggaactgcgccacaataccgcgacgaaagcgcggatttctagccagatagcgcagcgtatccattgctgacgggcgtttatagtgacttgtctgtgccactttacaggttgggaagcgggttaaaaggaacaacaccatgaccacaaccagaatcataatcatatacttatacggttcaagggtgttctctaacatcagcaccttaaagttgtgaatttgctcggcgttcattccggacatctgcttctcaaggctttccccctcggagaaaaccagatatttgcccaataaaataccagacgcagcaccaatcggataaaaggtctggctgatattgagccgcaatgtggcataggcttttggaccgatcattgaactgtatgtgttcgctgcagtttcaaggaaactcaggccaatcgcaatcgcaaaaatagctgcaaggaacatagtgtaggttgccatatgcgaggcagggaaaaaaagtgtacaaccaccaatatacagcgtcaggccaattaaaattgccaccttataactggtctttttaatcacaagggatgctggtattgcaattaaaaaataacctccataaaatgcgctctgcaccaatgctgaagcaaagttacttagcgaaaatacacttttgaattgagtgattaatatgtcatttaatgcagctgcgcatccccatagcgggaataaacacgataacaaaataaactggaacaagggagtcttattcagatacccatcaggcatctgaatgatgtttttatcgttcatagtgctacctttaactgtgcaggatgattattcgtttaaggttaaaaattcattaaattgttcaatactcggataagatgattgcgtacctttccctgtgacgctgaaagcggcaaagagagcggcttttttcaaagcggcttcaacatcaccgctttgaacataataatgggaaaagcaaccaataaatgcgtcaccagcgccactagtatcaacagcatttactttgaatgcaggaacatggacttcctgatcgcgggtcatccataatgcgcctttttcgctcatggtaacaataatattgttcagccctttatcaactaacgaacgtgcggccaaacgaatatgatcataagtatcaaccgacataccggttaatatttccagttctgtttcattcgggataaagaaatcacatttgcaggcataagacatatctaactcacgcaatgccggagccggatttaataacacttcaataccatttttcttaccaaactcaatcgcgtggtaaactgtttccagttgaacttccagttgtaaaacgatcaatttgcattttttcagatcttctgcagctcgatcgatatcttccggggaaagaaatttattcgctcccttaattattaatatactattgctcgagttggcattaacaaagatcggtgcaacaccactgctggtacaggggaccttctcaacataagtggtattaattccccatgattcaagattacgaatagtattatccgcaaaaatatcatcacctactttagtcagcatcaggacttttgaattcaatttagccgccgccaccgcttgattagcacctttcccaccacatccgattttgaaggcaggtgcttccagagtttctccttctttaggcatctgattagtgtaagtaatgagatccaccatattggaaccaataactgcaatgtccatttcactacctcttataaactttcgcataacaatggtatttaaataacattagcatgttacttttgcatcatttgtgactgagatcgcgattagcacatcaacccgatgtttatttaatagacttccagtctcatcactcaggccaacactatctaatcataagcaacctaacaagattagtgcccaaaactcagcagcctatacccttttcatttcaaaggggcggtcgtatagtatggtaatgaaaacaatgtttactaacgccaaaatgttatttttataacattcttacggagagagagttgatggaaacgaagcaaaaagagcgtatccgacgtttgatggaactgcttaagaaaaccgacagaatccatttgaaagacgcagcgcgaatgctggaagtttctgtaatgactattcgtcgcgatctccatcaggaagatgaacctctgccactgaccctactgggtggctatattgtaatggtgaataaacccgcgccatccatgccagtaatccatgacgttccaaaaaatcatcgtgatgacttacctattgcaattctggctgccggaatggttaatgaaaatgatctgatcttctttgataatggccaggagataccactcgttataagcatgatcccggatgcaatcaccttcaccggcatctgttactcacatcgcgtctttgttgcgttgaatgaaaagcctaatgtaacagcaatactttgtggtggtacgtatcgtgccagaagtgatgctttttacgatgccagtaactcttcgccattagactctctcaatccgcgaaaaatatttatttccgccagcggtgtgcataatcactttggcgtcagctggtttaaccctgaagatcttgccactaagcgtaaagcgatgaaccgtggactacggaaaattttgctcgcccgccacgcgttgttcgatgaagtggcctctgccagcctcgcaccgatctctgcatttgacgttctgattagcgatcgtccgttaccggcagattatgttacgcactgccagaatggttctgtaaagatcattacacctgattcagaagacgaatgacttactgaaaaaacaccacaatcttgttaaacatcgtcgggttggactgattacgttgcactttcaccacatattccagcttatctatttggcttatcacctactccagacgctggccatccttgaccagtagccagatatggcttttgtcgcagtcctgaatcggcaggcagagaatgtcttcaacgttaagagcgcgacgggcaaaagcccacaaaggtgagtcattacacccggatggtaaacaggcacttccttgttgtagaagccgttatattgtccataatgtctgggttttaatgcatactgggtaacaaccggacgaatcttcgaatatcactggcgctgccagccggtttgaattcatctcacaaccctgcatagagcgaatctcctgcctgtacgtcactccactccatggtatcaacttcacactctttatctgcggctagcttcagccaccagataagcatcgactatgaaagatgagccatgacaacataacgttggtaacgctctgacgccttaatggaagatgcctgccaccatagggaatgtaaacgactgaagtgtggcctttaatgccgtgaacggctcatggtctcctggcacggttgccgccccaacctgtaacaacattccacagtacaatgtctgtcagagtcagagcctcccatgcttgttgtagtaactctaccagttacgaacatccttcctcaaaattgttgtcatatctcgcatggaagaaaagatcctggctaaggagcaacacacaacgtattgcggaacttgcatatttttcctgtaactagtgtattaccacatatggtaatagctacctgtgtggtttcgctggatagcaaggggatttattcgcaagtaaaatgcctgataaaatacacgaatctagtaatcatcaatatttactctggtcgaatgacgcgtgaagtggacggccaacagacgcagtcagtgatctacagcctgttgaataaaaccccggatgcttcccccgattctgcaagtaatacttcggttatttgcactattttatccctgttgaatttggttaagccggtgcagacgcgccgggaaacgcacacctgaaccggcacaataaaatacaatacaaccccctgttactggagaaatgtaagcgtcaacggagcaccgtattgacgcttatttattggtgagtactacgttccatggcaggagttcatcaactcggttggaaggccattccggcagtacgctcaggatatggcgcagatacgcttccggatcgataccgttcagacggcaggtgccgatcagcccgtacaacagtgctccacgctcgccgccgtgatcgctgccaaagaacataaagtttttctttccgagacagactgcacgaagcgctctttccgcagcattattatccgcctccgccagaccgtcatcactgtaataacagagggcatcccactgattcagtacatagctgaacgcttcgcccagtctggattttttcgacagcgtaccattcttctccaccatccattcatgcagcgacgtcagtaacactttgcttcgctgctgcctgacggcaagacgctctgactccggtaatccccgtatttcatcctcgatggcgtacagttcactgattcgcttcagggcttcttctgccgtcgcacttttgctgctgatgtatacatcgtggatttttcgccgggcatgggcccagcacgcaacttctgtcagtgcaccaccttcacgttctgcactgaacaacctgtcgtaacctgtgaacgcatccgcctgcaggataccccggaaggggcggaggtgttgctccgggtgtttcccctgccggttcggcgagtacgcgaaccagaccgctggaggagatgacgaacccacattgcgatcatcccggacatacgtccagatacgccctgttttcgcctttttctgacccggtgccagtacctttaccggtgtgtcatcagtgtgaaccttgcgggtgttcatcacataacggtacagggcatcattcaccggtgtcattaactggcagcacgcgtcaacccagttggagagtaaggcccggctcagttcgacaccctggcgggcaaagatttcactctgacgatacagtggcagatgttcgcagtattttcccgttaacacgcgggcaagtaatccggggcccgcgataccacgctctatcgggcgggacggcgccggtgcttcaacaatacagtcacattttgtacaggctttttttacccgttctgtgcggatcactttcagggcactgctcaccagttccagctgttcagcgctgacttcccccagataatccagcttaccgccacactccgggcaacagctttcttctggctccaggcggtgtatttcacggggaaggtgtgccggtaacggacgacgatggcgcgactgtcgcaactggcggggaacctgaggatcgtcttcccgcccactgtaacgatcgctgtcctgttcacgttgtttcagcagagcctcagccagttcaacttcacgacgcagtttttcagaacgggtaccgaacagcatccggcgcagtttttctatctgagcccgcagatgttctatttcccgttcatcttcttcgatcttttcttcggcacgtgtcagtgcagagcgcaggaaggcttccgtctcttcaaccagactcagttgctggtctttctgacggagggcttcagcctgctcagagagcaacctttccagctctgcgatgcgaatgaggtatttctgactcatgaccgtttttataatgcggtcaggagttttttacaacattgtcagtgagttacggctggatgtttttggctgacgccagtccagcttatcgaggagcattgccagttgcgagcgggtaatggataccttgccgtcacgtaccgcaggccagataaactggccttcctccaggcgtttggtgaacaggcacagaccatcagcatcagcccaaagaattttgacggtgtcaccccgtcggccacggaagataaacaggtgaccggagaagggattatcattcagcacatgttgtacctgttctcccagtccgttgaaggatttacgcatatcggtaacgccggcaacgagccagatacgggtacctgacgggagtgagatcatcgtcccctcccgctcagttcacggatcaacactgtgagcagctctggcgatggattttccagcgtcatgttaccgtgacggaattccaccttgcaggaactggcactgactctggtctgagtggaagtggataaagacggcgcaatggccgccacaggttctttctgctcatccggcgttatttctacaggtaataattcaacgccagtgtcagaagaggtcgttaccggaagacgccgcgaaacacgcccttcgttctgccagagcctgagccatttgaaaataacattatcattgacgccattttcacgtgcaatctgtgcaacacaagcaccaggttgtgatgccagttcaaccatacgaagtttgaattcattcgaatactttttacgaggttcttttcgccagtcctgtaattccatacttagatgtccgtctatatcagatgggcgtctaagttaccaattctcgtctgatggctacatacggcggtcagtttacgcttacggagatatggaggangccggggtccgatatggcagtattgttgcagcctgcggcatggctcaggggatggatttgatgggcaatatggctccgtttattctgcgtggtgtcacgctgaaagggattgatagcgtcatgttcgcgaaagagaaaagagcagcaatctggcaacaggcgatatagtatttgccagagtccagaatggatagtctcactaccgtttatccgctcagtgacgccatcactgtggctgaaaaacttctgagtggcggaattcgcggtcgtgcagtcattcaatatagctaattagatggatgccgagctcaggcttagtataataacgttttaggggctgcggccccttttactggccagttgttgcttcctgagaagactgatagcgtaccgaggttttgaaatagctccagaagtcgtacactggctcagtagaacaatatagtttggaacgcattaccgcaccttcccagccactccagaaaatagccgccagttgtgtattattcatatttgaacttatttcgcctgaagataacgcgtcggacaggcaggccgcaacaagtgcctgccagctctcaagaatattctgtagtactttaatgaaggattggggaagctccggactctcctgcatcatatttccaaccaggcagccgcgggtaaaattgtattttttaatcccctcacaggcatcattgatgaaattttccagacgtaccattggtgtgcaggatgattcatgtagatgttttttgagtttatgctcgaagaaactgtcataggcgttcagaacggtctgagcataatcctctttactcttaaagtagtaataaaatgagcctttagggacattggcatttttaacaatggcatcgactcccgtcgcaagaaaaccattctgcgtcagcagttcaaggccactgcggatcagatcattacgagtatctgcataggtactttctgtctttcgcggccttccccggccacgattttcgcctgtcatgacccatctcctacattttattgtcaaaagaataagtgattttgcgcgagagcttcaatcagtttatccccgcagtggcaaagtgttcgcttttgccgactggacagtggcagtgcctgtcgctactgcgccatcgctgaacagtgcagaattagcaacgtttgcttttgacacaaagcatacgcccattctcacgcgaatgctttgcccttgacttgccaacaaccgaattgcttgctctgcagctatgtttttttattagaatattcgccactaaataaattataataagttgattttattagatatctatcagaatctatatggtcagcacgagttgcatgctctaatgtttcaaatgccagggtatgtgcggcttcagcaaatatctcaggccaacctttactcagcatcgacagtcctttaaggactcttatctgaatctccctcatactggcaccatcgcgcgcgacaggtgagaaaaagtcttccagtagatcgttattctgaagtggtgcaacatgtactgaaggatatttcacttctatttcatcagatttattctgcgcgtaagtggaaagtatacgaacacctctgccaatgacatcaatggcggttccaggatcgttcactgcaggggaaagggcccggcaggctatttcggccatgacgctaagacaaaatcgaggatcctgagcaaatgaacgtgcatccgagacaataatcgtctcaagtaaatcggtgttgattgacgactcctggccctgactcaggtacaaaactggcatggacggatgtatgaaactgcctggctgcgccacgaggtatacatgacggggatcattggtcagcagcttgctaagtttcaccatatcaatatattcaacatagccaatcttcttcggataaactgcaaccgttcctttcggctgttcattgttctcaagccatggatatccgccgagacagggatttcttgctctcgcaataaatgtttcgatggccgcctgttctacttgtgccgttgtctcaccaaccctccccagagaggtcaaatgctgtatccagcgaagcaatgtgatgaggattaaggcaatgacaaccagtgtgacaatgaataaaatgactctccccctttctccataagctcccatattgagggcaataatccctaccagactgaagagaaaagaaccgatgaaggtggccagtacattttgtgtggtgacgtcttcaacaactaaacgcgtagctctgggagtcacattagtagtggctgaaccgtaggctgtgaccatgatactcagcgaaaatgtggtcactgccagcatactcgatgccagtatgttcagaatgttatcgactgcttccgcaccaaccttcacggaaaccgactcaggtatcattgatttaaaaagaattgataaaagggccgttattatcgcgacaattgcgaataacgttgccctgaaccatagttttttaattgtctgcttcagcatccatttccagcgtgaaatcattctgcattccctcatattgcggccgggataataattgccgcccccaggacggcatgttgctattaacgaaccaggtgcaggaagtgcaggtgtttttcgtactggtccagtatgtcattaatcagctgttcctggttccagcccatcacatcataattttgaccgccttctttgagataaacctcagcgcgataatatcgatgttgttcagtctgctgctcatcattatccattgcggcgagcgcgaaggtcggtgagatatacccgcgaagcctcacttcatatataaaattcagctcgttgcccaaatcgacttcaagacgaatacgatcgtcgactgcatcactaatgtggcttatcgtcccctgcttgttcagttcctcctgaaccagcgtcatggcgggctggataacgtcgtccataaaacgtttcacaagagatcgcttcggcagatacgcgatattgcgtaaccttctctgccaaggaattgggttacgtgcagccgtaggagcaattgtcgccatgctcaggctttcacgcttggtcaaatcccggcgcaaagcttttaaaagtccgtatatagatattagtaagatcactgagaagggcaatgcactcgctattgtcaccgtttgcagcgcacttagccctccggcaaggagaagcgcaattgcaacaatgcccatgagcgaggcccagaatattcgctgccagacgggtgtgtttgccactccacctgatgccagagtatccacaaccattgcccccgaatcagcagacgttacaaagaagacgatgaccatcgccattgcaatgaatgacagcacagaagagaacgggaaatgctccaggaaattaaacagggccagcgccacatcctgctgaacagtattggcgaggtctgtggccccctggttcataatgagatagatcgcgctgttaccaaacaccgtcatccacattagcgtaaaacccgcgggaacaaacagcacgccggtgacaaactcgcgaatggttcgcccgcgggagacccgtgcgatgaacatccccacaaacggcgaccatgaaagccaccatccccagtacagtaatgtccagccccccagccagttgctcgacttgggctcatacgcgtaaaggttgaacgttttactcaccagttccgaaagataaccgcccgtattttccacaaatgacttcagcagaagcacggttggtcccagacacaggaccagcgccaggagcaacaaagccagacccagattgagttcagacaggatacgtattcccttatccagaccggacaccactgaaatcgtcgctaatcccgtgatgaccacgatcagaattacctgcaccgtttcattgatgggcaccccgaaaagatggttcaaaccggcattcacctgcaaaacaccgtaacccagtgatgtcgcaacgccaaagaccgtgcctataacagcgaaaatatcaaccgcatgtcctacaggtccgtatatgcgatcgccaataatgggatagagtgcggagcgcagagttaaaggcagaccgtgacggtaactgaagaacgccagaatcagcgccacaatggcataaattgcccatgcgtgcagtccccagtggaaaaaggtcagacgcattgcttccttagctgccgcaacggtttctggagtgccaacgggtggcgaaagataatgcattacaggttcggcaacgccaaagaacatcaggccgatccccatccctgccgaaaaaagcatcgcaaaccaggagtggtagctgaaatcaggctgcgcatggtccgggcccagcttgatatcaccgtagcgtgagagtccaaggaacgtgacactcagtaaaatcagggccacagcaaggatgtagaaccagctggcattcgtgaagatttgttgctgaagtagtttaaaatttttgtcggcgacatccgggaatacggcggcaaaggcgacaagaaggaaaattagcaaagcagatgtaaagaataccgctttgttaatctgacttgtagacttctttgggattgtatcattttcactcataatcatttattccattaattaaattcgcactggatagaaggtactacctctcacaaagtagcaaagttcaactggctatgcggcgttaatcgtaatgcatggtggaatgttgaggtgtactggcaatagcggacactaccatttgttctttttttaagcagccatctgatgatatttttccctgaaggctgccggggagatattccccagacgagagtgacgacgctgacgattgtagaaaatctcaatgtattcccgtattactgagatggcttcatcccggttattaaaacgatagtagctcaggctctcatttttcagcgttccccagaagctttccatcggagcgttgtcgtaacagttacctttacgcgacattgatgttttcagaccaaactgctcctgtatgacccggtaatcgtatgcgcagtactgtgaacctcgatcagagtggtggattagcccggcaggtgggcgctggctcctgagcgccataaacagggctttacctgtcagctcttttgtcatgcgctctcccatggcgtagccgacaatttcgcacgtataaacatctttgatgccagcgaggtacaaccatccctcctgtgtggcaacatacgtcaggtccgccacccagacctgatttggtgctgtaggagcgaacgtctggttcagcagatttggcgcaactggcagattgtggttcgagttcgtagtcgctctgaacttgcgtttctgcttacagcgtagccttagctccttacgaagacgtgccagtcggtcaccgaccaacgatgatgccattctctgccagctccgtctggagccgccgggttccatatgtttcgcgagtgcggatatgtgccaccttaatctccagttttagccgctcatcactttgttttctgtctgagggttcatgctgtacccagttgtaataaccgctcctggatacaccaaatacctgacacatcgcttcaatgggaaattgttgtcgccattgttcgattaacgcgtatttttcagcgactcctgtgcaatttaatatatctcgctcaaggcgagcttcatttaacgccttacgcagttgcagaatttcagattccagttcagccaccgtgcgggaaccaggagtaccgagcccttttctggcggcggtaacccattgtcctaaagtgccttcaggaagagataatcgggaagcgccttcactgatcgaaagttgattttcaagaaccgttctgacagcttcggctttgaactctttagagtaacgttgggtttttctgctcattattagctccttctgatgccattctatttcaggaaggagtgtccgttaaactcaggctacctcattggttcccactacttatttggtggacaccactttgtctaattcgtcagattctgaccagacggttcaggctgtacgcttacaaacaactagtggaaatacttgtactttataatttcaagggtacgggtccgcttcgtttgatttgcgtgtttttaacaattttaaaacccagacatactgttccggatgtggccccaccaaaatttccactgttttgttcatttgtcgggcaatcgttttattgtccgcgctggcaatgcaagcatccattggtggccgaatttcaatagtcagtagatgttttttttcatcataaaccgggaaaagtggtataatcatagcctgactgatgttcatcagacgtccaatgattggtaatgtcgctttataggtcgcaaaaaatcagcaaattcactgtattcaggaccatgatcctgatctgggaggtaatatccccagtatccctggcgtactgactgaataaatggttttatcccatcctcccgggcatgtaagcgccccccgaatttacgccgtactgaattccagacataatcaatcactggatttcgttgctgatgaaacatggcggccattttttttccctgagctgccagcaacattgcaggaatatccacgctccagccatggggaaccagaaaaatcacatttctattattgtgtcgaatttcctcaagaatttcgaggcctttccagaacactcgtttctggaacttttccggaccacgaattgccagttctgccatcaacactatggattgcaatgctgtggcaaacattttgtcgacaattatttcccgttctgtatcactcttttctgggaaacaaagcgataaattaatcgtcgccctgcgacgagcttttttgctcaatctgcccgcccaacgccctatttttgccaagacaggatctctgaataaagggggaaacattgaaatacctgcaatcattcccaaaaggaaccatgtagaccagtaaacaggggaaaggtaatttttcttaaattcaggaataaactcagatttatattttttcattatttagtgcgaatgcctctaccaaaattatcattactgttttattcagagaatacatcaaaccttaatttaaattctgatgttctgagtgtacaggatatgcatccaaagagcggatagtagtttcatggatataatccagcaaagcgtatcgttttcggtactcagagcgttttttactggctatatcgcttagcggctttcgaatcacctgggttggtaatctgtaccagtcaccacaggtttttcctgctacagactcccagaaatcactatagaccgcaacaaaggttttgcgtttctgataccagtatctcaattgccggaaaacatgactgtgctcactgactgccagacactcagagatattgcaagctttcatcaacgcacaaaatgcttcaaaaataatccgttttgggaaaatcccataacaggcccgggttgcgcaccgaataacatcaggtccggtatttttaggggctccctgtaatccgccaataaaagcaatgtgtccattttgagtcagaatgactgaaaatgttaaccgggcaataactgttttattgtaaaacaatgacaacatcaactctccttcccggtcaaaaccactgggagaacactggatatcaaaattctctccatctttcccgatgaattggactaatgataccgatttttgtggaaacaaaaatttagaatatttttctggcaaattttgcacaaagcgataatgctcaagaatatattgtccacgggtccaggcgcgcccccctttatgcaaataagggcgatgaattcttgctggcaacgtggggtgtattgccagaatatcctcaatgcacggcaaggaacgcagttcataataatatcgaatactgacaaccggatttatagaacatcgcaaaatgtacatgaaccgaaattttctgtgttcccacttccccggtagtgaatctgaggaacaaataatccttttaaggaaaccgataaatgataagttacttatagaaaacatattgttacttttgcttcgctaatgtgagtatttttaacgcagttttattaatatcaaaccgctcttctatatcctgttttgccaggcgagccatctgataaaaacgcccagggtcattaaaaaaatcattcagggcgcacatccatgcgtgcttattacctgctggtaacaatgtcccggtctggttgttctgaataacctcagggattccaccaatctgagtggccactacaggcacagaaaatgccgatgcttctgccagcaccataccaaaagattcgttttctgaaggcagaaccaccagactggcaacccgatatacgggggcggcaggaaaaacattgtcagcaataaaaacatcatcatgcatgcccatactgtcaatctgatactgtaaatgttcccgcagttcaggtgaaccagaccccacaatcaaccaacagaactgtcgtccattcatttttaaatggaacagtaaattcaacataaattcgtgccctttttccgggcgcaacattcctacctgagcaattacggggcatcctcttcgggacgccagccaggaaagaacactcggaggcaaactgtttcgggaatcaacgtataattcctggaaatcaaagccaggaggcacaacagtaacccgagttcgacatccttcctgctccagatgtgtcttcatatttgttccgggaacaatcacctcatcgcaaaaatgatttattgaaaaaaattttgtttttcgtgtcaaatatgtcttttgcctgataattctgaatggatgtttccaggtaaaaaaccgtaccaaaccaacaatattactatcatgtccactgtgacaaacgattgcatcgggctgaaaactatgaactattccgagtaatctccatacagtaggaatgtgaagactgtttcgaaataacgcgaatgtgatatcaattccaaacttactggcttcaaaagcaattttgctgttctccctgcagacaagcagaactgaatgccccattttcttcagggccttcatttgagcaacagcctgtaattcctgaccacctatattcggtgatgattccgtaaatagtatattcattattagtcatccggtaatcttggccccttatgaagggccagcaacgatgaaaaaaacggtgttgtataataaaaaagtcgtcttttcagccatacgcaattttcccgttccttggtgcttattcttcctatccgtgtagttcctttagcaggagcattcattcttctttctgttgtatataaataatggaatccaagttcttcagcgatctgaatataatccttgttataataaccttccggccaacacaaatgtttactgcattttcctgtcattttttttaaatattctctcccgctcaataagtcctgccgaagatgtttacactgttcttctcgtgaagtgaactttttatcccaacgtgtatgagtatgtgtatgaacatgaaattcgaccagaccagattgcaacatttcgttcacttcagaccagcgaagcataacattatcagcattcccggttgctatttgatgttcgcaatcgcgatgagaatattcctttccaggagagtgacgaaccggaccatttccaataaaactggtaattaaaaaatatgtgccttgagattaaactcgtttaataaaggatatacctgaaaccagttgtcaaggtatccatcatcaaatgtcaacataacgcttttacggggaagttttccgccccgataaaaaaactccagttcatctgatgacagtgttttccagttgttttcagccaaccatttcatttgtttccggaatgtctcgggagaaagtgtaaccagtcctgggcaatggctgacatgatgatacattaataccggaacatgatttgctttaaacaaaatgccccctccgtttaaaatttaaagtttctggcacccagtaagtagagataaaaggaaagcctaataaaggtggtgaactttatatactactaaatcaaacatcaacaatttataaacaataatatattatcatatcttttaaaaacggctcactaagaaccttgaggtggcacactaaatttagctacctgaacagaggtgatatgctcacctcagaacaacacaggtgccataatgaaaaaagaaatttcagcgcagagtttaaacgcgaatccgctcaactggtcgttgaccagaaatacaccgtggcagatgcagccagcgctatggatgtcggcctttccacaatgacgcgatgggtgaaacaattacgtgatgagcggcagggaaaaacaccaaaagcctcccccattaccccggaacaaattgaaatccgtgagctcaggaaaaagctacaacgtattgaaatggaaaatgaaatattaaaaaggctaccgcgctcttgatgtcagactccctgaacagttttcgataatcgggaaactcagggcgcgttatcctgtggccactctctgccatgtgttcggggtccatcgcagcagctacaaatactggaaaaaccgtcctgaaaaaccagacggcagacgggctgtattacgcagccaggtacttgaactgcatggcatcagccacggctctgccggagcaagaagcatcgccacaatggcaacccagagaggctaccagatggggcgctggcttgctggcagactcatgaaagagctggggctggtcagttgccagcagccgactcaccggtataagcgtggcggtcatgagcacgttgctatcccgaatcatcttgagcgacagttcgccgtaacggaaccaaatcaggtgtggtgcggtgatgtgacctatagtgtgcccggagttcagggcgggcatggatgcttaaatgaaccgcgagtctgtctggaatattgaaccggtaactcacgatgagaaacccaacaatcccaccgggtgtgacggtggagaacctgagcggcagtgacctgcggcatgcccgcagggtgatgtaacccgctgacaacggggattgaggcgagatcactaagccgagatgatcctcaaggttaagtactgaaaggctgaagaacatgaacccgttaatccgcctctgtgggttgaaaacgtcaccacggcctacgtgatctgacaggccgtgcaggaggaactggcagtgatacgtaagcactgccggtcgaaggtgttttgacatgtatgcgaaacaccggggcagcagcgtctatcacacttgcgttgctgacttctgccaacttgcggcaagcaaggataaagagtgcgacgggcagcctcctcagtatgcctgagtccaggcaggtaaaccggggaaggtcagcgacggatgttaagggggcatggctccgatgacgcgctggctggcggagcttccgtagtagtccgcgatggggaaagcccattacatggcgaagggaagcagtttgaatgtgtttgcgacgtgaattaactgacctaacgaggtgaagacctttgataatcagcgaaatgcaacgcaagcttgccacatgggcagccaccgatccgtccctacggattcaacggctgctgcgtctgataacacaaccagaatggctggctgaagcggcgcggatcacgctttcatcaaagggggcccatacccccggcgttgatggcgtgaacaaaacaatgctacaggccagactagctgttgagctgcaaatcctcagggatgaattactctcaggccactaccagcccttgcccgccagacgggtttacatccctaaaagcaacggcaaactgcgaccactgggtatccccgcgttgcgggatcgtattgttcagcgggccatgctgatggcgatggagccgatatgggagagtgattttcatacgctctcatatggcttccggcctgagcgcagtgtccaccacgcgatccgcacggtgaaattacagctcacagactgtggtgaaacccggggacgctgggtgattgaaggcgacctgtccagttacttcgacaccgtacatcatcgactgctgatgaaggttgtacgccgcaggatcagtgacgcacgtttcatgactctgctgtggaaaaccatcaaggcgggacatatcgatgtcggtctctttcgggcggccagtgaaggtgtgccacagggcggtgttatatcgccgctattatcgaacatcatgctgaatgagttcgatcaatacctgcatgagcgctacctgagcgggaaagccagaaaagatcggtggtactggaataacagtatccaacggggccgaagtacggcggtcagagaaaactggcagtggaaacccgcggtggcgtactgccgctatgccgatgattttgtcctcatcgtcaaaggcaccaaagcacaggcggaagccatcagggaggagtgtcggggtgtgctcgaaggcagtctgaaactcaggctgaacatggataagactaaaatcacccatgttaatgacggctttatctttctggggcacaggatcattcgcaaacgcagtcgttatggcgagatgcgagtggtctcaacgatcccgcaggagaaagccagaaacttcgccgcatcgctgacagcactgttatcaggcaactacagtgaaagcaaagtcgatatggctgaacaactcaaccgaaaactgaaaggctgggccatgttctatcagttcgttgattttaaggccaaagtcttcagttatatcgaccgtgtcgtgttctggaagctggctcactggctggcccgcaaataccgtacaggcatcgcttccctgatgaggtggtggtgtaaatcaccgaaaccgggtcagagcaaaacgtgggttttatttggtaaaaccaatcacggcaagctcagcggcgaaatactgtaccggttggtggggcaaggcaagaagctgttccgctggcggctacccgaaggtaatccctatctgaggacggagaccagaaacacgtatacatcgcgctttacagaagtggcaatggcgttcgccagcatttaaatggagagccggatgcgctgaaaggtgcacgtccggttcggggaggagaggcagggaaatagtccgactacgccctgcctcttactctactctggacgggtaagcgctgggcgtacctcgccgttgttctcgacctgttcgcaagaaaaccagtgggctgggccatctcgttctcgccggacagcaggcttaccatgaaagcactggaaatggcatgggaaacccgtggtaagcccgtcggggtgatgttccaagcgatcaaggcagtcattatacgagcaggcagttccggcagttactgtggcgataccagatcagacagagtatgagccggcgtggaaactgctgggataacagcccaatggagcgcttcttcaggagtctgaagaactaatgggtgccagcgacgggctatgtaagcttcagcgatgcagctcacgcaataacggactatatcgttggatattacagcgcactaagaccgcacgaatataatggtgggttaccaccaaacgaatcagaaaaccgatactggaaaaactctaacgcggaggctagttttagttgaccacaacagactacctgaagggagccgcggtcgcctagcagttgcagtagcaggagatcatccagccgcagtacaggtcacgatgactctggttaatgataccggctttgaccccgtattttccggctctatcgctgaatcatggcgtcagcagccgtgcacaccatcctattgttgtgactgggaggctgccaccatgcttcgcgctttccctctggcgaaaaagggagaaggacgggcccgtctgccttcactttatgccagcttcggtaagctgggtgagacaccgactcatgaagatatcattgataacaatcgatccatcaactggcctgtataacgtggctgccggtgattaagaaagctgcacctacctaagtagtagcaaacgcacactttttagaaaaatcgatggtcagaaactggattagcaattccgttccagggttgcttttgatttacgttggcgtctgatcattgatttatcctcaaaagcccaacctcattggtaatgaaccagctccgtgaatgtccgctctggcacagagcgaaattttttgatctccccccctgaaatctaaacttagtcatgtcacgtttttgggtttctaaaattttaacttcgcgtttttcgttgccgtaagggttatacagaaatgtccgttaagcagagttcaaaattgattgccgtgatcacgactggtttgaaagccgcgcccaagcctgtacagctctggtttgcgttgattatgaacctgtcagcctaaagcaagcggatggacgatgagtattggtaatctttcagagtccggaaaagttcagccccagtctgaacaggcttgctggcgccagtccagtttcattcagtcgtggtttggttcttacggcctgtgcaatctacctcattaggcacatcggcctgccagataccggctcggggtgtatttccgcttccacgctgaatactgttctcagcaatcctggggtcatcacctcttctggtgtgccttgcgccataacatgtccgtttgccattaccaccagttgatcgcagtaccggctagcctgattaaggtcgtgcagcacagcgaccaccgttttcccctgagtccggagttcgcccatcaaccgcatcaggtccacctggtgattgatatcaagataggtggttggctcatcaagtaatacaacgggcgtattctgggccaggaccatcgccagaaatgcgcgctggcgctgaccgccggaaagctcggttaaccgacgaacggcaagatgattgatccgggtctggttcatggcgacattaactcgtgcattgtcttcagcggagagacgcccccagagtgacagccagggattacgaccatacgaaaccagctcctggactgtgatcccctctggcgttaaatggtgctgaggcagcagcgaaagcctgcgggccaactggcgtgatgagagcatatttatgggattatcgccgagaaatacggtgccagactgcggcattaaaagccgcgaaaaacagtttaacagcgtcgatttcccgcaaccgttagggccgatcagggcggtgatcttccccgttggcagtgagagtgaaacgtcgttaagtaccttgtctgtcccgtaactgaccgtcagattttcagttcgtaaagtcatttatcgcattctcacaagcaaccagacaaaccacggcgcaccgataatggcggtcagcacgccaaccgggagctccagtgggggatgaataattctcgccagcagatcggcaaccaccaacagcaacgcacctgtcagggctgaaacaggcagcagtctgcggtgacgtccaccggtgatgctacgcatcatatgcggcaccacgagaccaataaagctaatcgggccgcaggcggccacgccggtagatgtcatggcgacagctagtaacaaagcccagaatcgggtatggggcaccgacacaccgagcgtggtggcgcgcgcatcgccgagtgcaaggaggtcgagatcgcggcaaaaactcaggctcagcggcagaaataaaatcatcagcgggatggcaatcttcacaaagctccagtcacggccccataagctgccggtcagccacagcagggcgttgttcacatcctgcgggcgcgagagcatcagataatccgtcaggctggcccagcatgcagaaagcgccacgccggtgagcgccagcttcatcggctggtgggtctttgccagcatcttcagtaatatcaaccccgccatgccgcccgcaaaggccagcagcggcagcaccatcacgggcagtgacggcataagaagtagagcccccacagaggccaggctggcggcatggttaacgccgagaatatccggtgatgccagagggttgcgcacaatcccctgtatcagcacgcccgccacggcgagggctgcaccgacaaacagtgccagcagcaagcgcggcagtcggtactccatcaatacataataatgctcgcgtccggcctgccagtcggtcagcagcgcgcgccacggcacggggatcactcccatatggagtgataacagcgcacagcccgccagggcaagggtgatgaaaataaccagcgcaattttcatcctcgcctcctcacaagccagacaaagcaagggctgccaatcagcgccagcactgcgcctgcgggcagatctccggggaaggccagcgcgcgtgcgagtacatctgccagcagcatcagcgtggcccccagcagcatgctcactggcagtacgttgcgctgatcgaagcctgcccagaagcgcgccagatgtggcaccagcagaccgataaacgccaccggacctgccacgctgacgcacgcaccaaccagaagcagcactaacatattgatgaccaaacgtagcctcgtcaggttcactcccagcgtatgggcggtgctgtcgctgaggttgagcaggttcagttgattcgccagcagtaacacgacagggactgcagtgaccaccaccggcaagagctgccagacatcctgccagcgggcgtgggacactccgcctgccagccagtaaaagatgccgtaagcatgatcttcggccagcagcagggtgatgcgggtaaggcccatacaaaaggccgacagcgcgatacccgcgaggatcagtttgtttctgtcatgggtatgacgaaatccgcctcctgcggtcatgaccagcagccagctcacgccgcccccgcatgccgcgatgaacgacagagaatagcctgcaatcggcgtcggactcagcgcgctggtaagcgccatagccagcgccgcgccgctgttaatgccgagcagtgaaggagaggccattgggttgtgggtcagggtttgcagcagcgtgcccgcgagcgccaggcttgcgccgatcagaacggcgaccaggcttcgtggcaaacgaaggttttgcaccagcgcttctggtagcgttggcgtgtgtccaggcagcagggcgcgggttgcatctgctccggaaacaggaatggccgagtagcaaaacagactcagccagaaaataataataagtgctgcaacgggaagcccccacagcagcatcgggtgttttatcgcggtcatttcacaacggtaagcggctgatggtggaagatttttaccgtgtcagcggcaatacgctctgcagcaaaaataccgcgcatccgcgcccaggtgttactgtcgaccgaagcaacctgctgcttctgcgcggcggttaacatctgccagagcggatcttgttgccagcgtttaacaatgctctcttcgcgatagtgggcaaccagcagccaggcaggattgaccgccagcagttgctccaggccgatggacggcatggacgaacccgccatcgcagcgggaacgttcagccccagagaggccagcacgctgccggtccaggtctcctgagtatgcaggttgaattgctgttcgcgtgatgtgccaaaggccacgcgtgtccctttgggaagctggctggcccactgcgccatcctctctttatgttgttccagacgtgcctgcatctctcgctttttacccaccatttcgccgatgatagccgcagattgcaaattttcagcgtaggtttcgttgcgggacttaagcagcagtaccggcgcgatttgctgcaaggcgatgtaaacccccgcatggcgactgctgtcggcaatgatcaggtctggtttcagagcggcaatggcttccaggctcggctgcgcgcgcgttccgacggactgccacggtttcaggtgcgcacgcacttcgggcaggatgcgttttgcatcgttatcgtcggcaataccgatcgggctgacgtccacggcggccagcgcatcggcgaacgagagttccagcaccacaatccgttgtggcgttttttcgagtgtaaacgtgccgtgttcgtcctgaaccatggcggcaaaggcgtggctgatcaccagcagcaggcctgcaaaaagaaaacggataaatgccaacataatcacattccagctaaaagcccggcaagccgggcgttaacacatcagaacttcaacgacccctgcatatacagcgtgcgcggctggcctgcatagatgcctttgttgttgtcgtcataagagcggatgaagtagtcctggtcgaagatgtttttcacaccgaatgccaggttcagatctgccatctgcgggccaaagtcatacgccacgcgtgcgccccagagcatgaagccgggaatgcggccggtactgccgtcggcgctctctttcaccgtattggcgttatccgcaaactggctggactggaaatcgctgttcagattgaacgtccagtttcctggcttgtagtccacgcccagcgtgcctttatgtttcggggagaatggtaccagattgccgtaggtgtcgcctttctcgcggatttccgcgttcacatacgcatagctggcgtagatggaaacgttatcaagcgttggcgttagcgtacccagatcgtaacgtgcctgcgtttccagcccggtatggcgcgttttgccacgtgcagtgacggtgtcgttggtctggttggagtcgtactgattgttaaagttaatcaggaacagccccatttccgccgtcagcgcgccgtcgtcgtagcgggtaccgagttcccaggttcgcgctttttccggttccacattgccgctttgcacagccttgccaatctggctgtactgtacggtgccgaacgagccttcagtgtttgcataaagattccagctgtcagtcaggtgatagagcacgttcaacgccggaagcggtgcgttatagctcacttcttcgtgcgtgcctgtgatggcgttgttctggtatgactcgatatgttcgaaacgcatacccggcgtgatggtccagttgccgatgtcgattttgtcatccagataccaggcgtgtgcctcggtgccggaacgcgtatcgcggtcgtaagggcttgagccggacggcaactgcccgctgctggtggcggtgtagtaacgcatttcatgcgttgattcattcacatagcgatagcccacgcccacttcgtgcgcggaagggccgatcataaagatctggctgtagcgtggctcaataccgcgcacccagtagttacgcggcgagagggtgatgcgtttgccttgctccaggtagccgctgcgcagggtttgggtgtagaacccctgaatgttgaatttatgctggctgtctggctggaactggtagcccaggctcgccagcttgcgacgaccccagaagcggtcatacgggcgggtggattgccagcgatcggcgtcgtaatccgcgcgagacaggccaccgggcatgtcggcttcaccgtcgtaatattgcagcaggctgttgaaggtgtgcacctcatccggcgcatatttgcttttcagcatcaggtcgtcgatgcgggtggcgctgtgctcgcgccagtcactgccgcgcgtgccggagtagagcagcgcggtgccaaaaccgttgtccgctgtgccgcccaccatcaggttgtgcgtctctttcgggttgttttgtgaagaggttgggctgagctgaccttccacgcccgcctcgataccaaagtcctgcggaatggcacgggtaacaaagttcaccacgccgcccacgctctgcggtccgtaacgcaccgcaccaccaccgcgtaccacgtcaatggcatccatgttgccgagcgaaatgggagccagtgaaagctgcggctgaccgtaaggggcgaaggggacggggatgccgtccatcaggacggtcgagcggctggcgaggcgcgggttcaggccccggatgccaaagttcatcgccaggtcgtggctgccggtgccgttgttttccggcgcgctgacgccagggatgcggttaagtacctcacgcatggtggttgcgccggttttggcgaaatcctcacggcggatcacgtcacgcgcgccagcatgttcaaatacgtcgttttcacgcgcatcacccagccagtcgccgaccacggtcagggcatcttcttttggtgcgggcgcgggctccagcgtccagctgttatttcccagcggttttacctgcagtccgctgccgtccagcagttgttgcaggccgctctcgacgtcgtaatcgccgtgcaggccgttgctctgcttgccgcgcgtcaggctggcgtcaaccgagagggtaaatccgctgtgtgcggcatactgattgagcgctttatcgagcgatcccggtgcgatattaacctgtgcagcaaaagcggaaaacgagagaccggccagcggcagcaggctcaggcgaatggcgttaaccaaaggtgttgttttacgaaaaacgcgtaacggcgtcataccttccccatcatcatttttgttgtgttcagctatgagtcgaacgagaagggtaaaaaggacaatcgaaataagaattattttccttacagtggtgaaatgtttatccagtaccgcgtaatagactgaattttaacgggaagcgtttgcgcgataacgttcaggatcgcatcggtatttttcagcgggaacgtcccgctcaggcgcagcccggcaacggcgggatcgcagcgcagcacgccgttgcggtaacgggttagcgtggctatcacctcacccagcggtttatcgctgaagctcaggatgtccttcgtccagcttgtactctcgtcatccagcggtttcactgcgccaaactcagaggcgctgaactgcaggctttcaccagcgttcacgatgcgtttttgcgcgggggcactggcgagaagcacttccacagcgtgctgctgaacgtcaagctgcgtgaaattatcctgctggcggacggtaaattctgtccctaaagcagtgagctggccctgacgggtcaggacacggaaggggcgttgcagggcatctttcgcggtagtaatggcgatttcaccgtaccagagccggacggtgcgctgatgcgcatcaaaacgcacatccgccgcgctttgggtattcagcgtgagcagggagccatcttccagttgctgacggctgactgtgcctttggcggtgcggtaatctgcccgcagaccttcgccggtttccgactgccagagctgccagcctccgccagcgccgagcaacagcagtaatcctttcatcacgtgacggcgggtgaggcgggtatcgtgcaacgcccggctggcaacgtcgccaggcacaccgccaagctggttgcgcaggttttcaacctgctgccaggcccactggttatcctgatcctgttcataccactgttgccagcgcgcttcctgttgtgggctgacgcgctcgccgcttagcacggcataccagtgggaagctgaacgcagcgcctgacggcgggaatcggttaacaaaggattcataacccatactccagacggaacagcaggcagtgctcgacggctttcgccacgtattttttcacggagctgatggaaacaccgagtttgtgcgcaatctcgctgtatgtcagaccatccagttgcgaaagcagaaacgcttcacgtgttttgccgtttagcccgtccagcatgctgtcgaggagttgtagggtctcgagttggctttcgcgttcctcaggtgaaggcgctcccccctccggcataagcgccagcatctccagatacgctttttccagcgcgtttcggcgaaacaggtccaccatcacgcgtttggcgatagtgcagaggaaggagcgaggatcgcggatcgtcgagagcgtttcgctgaccattacccgcaaaaaagtgtcctgggcaatgtcatctgcatcaaaagcagactggagtttgcgcgtcagccagcttttcaaccagccgtgatgtgtgccataaagcgactcgaacgttaaggaagctgtggtagtggcgcggtcagacatgcggagtgcatcaaaagttaattatcacgtagttatattaatatgagaatggttatcattacaattggaaataaaattgtttccaatagacatttttaacatgttgtttttctaagtgttataaggtaggtataaaatgggatggagcctctgcttctggcatgtgtcggtcagaatgactcatgatgtggtctgctattattgacatcctcactgccctaaaggatggggatttcggtaatgatcttacccagcaatagtggacacgcggctaagtgagtaaactctcagtcagaggtgactcacaagacaaaacagtttcaaccagtaaaaaaacgtaaacaccattcgcatgaatttcgtagttaagatctgaagcttgcagaatgcatcggtgttactgccggagtccgtgaacttagtctgcatgaatcaccacagctttacatctgggtaatgactccaacttattgatagtgttttatgttcagataatgcccgatgacttgtcatgcagctc

SEQ ID NO: 855 - DNA, 324 bp, Escherichia coli
attcgtcgtatagatcactttgcggatgtccgttggataagcggtaagcgtacagcgagggccgtattgacggggatgtgttattcagctggcagtgctatgcgccacggaagcagttcgctgacccggttgaccggccagtctgctatgacgccaagcacatggcgaaggtagctttctggatccacgtcattcagtttgcacgtcccgatcaggctgtacagtagcgctccccgctcaccaccatggtcagagccgaagaacaggaagtttttacgacccagactgaccgcccgcagggcattttcagcgatgtcgttgtcg

SEQ ID NO: 856 - DNA, 1793 bp, Escherichia coli
  modified_base (1)..(2): a, c, t, g, unknown or other
  modified_base (5)..(13): a, c, t, g, unknown or other
  modified_base (15)..(16): a, c, t, g, unknown or other
  modified_base (22)..(26): a, c, t, g, unknown or other
  modified_base (31)..(31): a, c, t, g, unknown or other
  modified_base (130)..(130): a, c, t, g, unknown or other
  modified_base (132)..(132): a, c, t, g, unknown or other
  modified_base (134)..(134): a, c, t, g, unknown or other
nncannnnnnnnngnnaccagnnnnncaggnatttcaacagcggtttcgtttttcgctgacgttcagcaagccgctgctctgccggcattccccttatatccgcctctatggcgtacaactgaccgatcngntncagggcttcctccgtcagggctgacggggtgcgaacgtgcacatcgtggattttacggcgggcgtgagcccaacaggcggcttccgttatccggccatcccggtacagctcgttgaacccggcgtatgcatccgcctgcagtacaccactgaaccccgcaagatgggtctgcggatggatgccttttctgtccgggctgtaagcgaaccacaccgccggcgccagcgttgacccggcgttacggtcgtcacgaacgtaggtccataaccgcccggtcttcgttttcttattgcctggcaacagcaccgggacaggcgtgtcatcaacatggagcttaccgtcagtcagcacatagtcctgaagcgcctcttccagcggagacagcagccggcagcatgcatccacccagcccgacagcagtgaacggctcagctccacgccctggcggccgtacatttcagactggcggtacagcggggtgtgctctgcatactttgagatcagcacgcgggccagcagccccggtcctgcgataccccgctcgatgggccgtgaaggcgctcagcttttccagcagggcacggttcagcgcctcctgttcggcaaggagacgtttcagtgcattgatatcgtcaggaagtgagctgctcataccgggtatattaccaggctcattcagcgtcgaccaggataaagaggcttacaacatagtcagggacgtaagcagtcttttaggctgccgccagtcgataccttccagcagcatcgccagctgtgccggtgtgaggaacactttgccatcccgggctgacggccaggcgaagcggccgtgctccagccgtttggtcagcagacacagtccatcgccggtagaccagaggagccttaacctgactgccattacgcccacggaagataaaaacgtgacctgacatcggatcgtctttcagcgtcgtctgcacctttgccgccaggccgttgaagccgtttctcatatcggtgatgccagcgaccagccagatctttgtccctgatggtaatgggatcaacgtttgagctcccgtatcagcaggttcaggatattttcgctgatggcaccattcagacggagtgatccgtgccggaacgtcacttcacagctgatattgagtgattcaggtgtcgcagcagctacaggttgtgaccggggggaggttgtagggacaacatcttcggcatcaagtgttatcgggagcagctcaggcacgttgttttctgttgttgaaggaggacgtagttttccttcgcgccagtactggcgccacttgaacagcaaattatcgttgatcccatgctcacgagcgagttgcgctacggagatctctggtcgatgcgagagttcaaccattttgattttgaactcaacgggataattagggctttttttacgcactgcggttaatgatttcatggatagcgtccatatttggtgtccactattctctcaggaatttcaggatctgccagacggtgctgagacgacgcttacgattcagtgcagaggtgacctgctttatcaaacttaattgtgacaaaatggcgattgagaaggtgcaattgacttattcggattcggtcgtggcgaggtggtgaccctgcattctgctaaccgggttatga

SEQ ID NO: 857 - DNA, 19175 bp, Escherichia coli
  modified_base (138)..(139): a, c, t, g, unknown or other
  modified_base (178)..(178): a, c, t, g, unknown or other
atattctgatgggcaatttgcccccccccccacaatattgagaacatctggggattcaaagaggtggtgatcgccggtcctaaggactacgtgaaatacaccgatcaatatcagctaaccccggttaacagcatcgcnngggaaaaaaattttttccccccttgcagacgttttaacnggaaaacggtcgcctcctggacacccgtgggcggcgtatttccatcacgctccctgctgtgatccccgatcaggtcatcatctggatgaattaggccggactctgaataactcacggatttatctatgaacaaaaaacttcttgctattatgattgcagccactctgctgcagggctgtaccagtttccgacaggcagagaacaccagaaaagacgccgttgctgaacaacaacgggcccgggaaatgatcgctgagctgcgaaaccggacaccggttgtaaaggaatccccacgtcagtggatcaatccccgtccggtcacggataaaaaccccggtaatgcggtgcccggctgtccgattatcattaacacccggcagagcatcacccttcagcaggtggcccagcggatctcgcaaaactgtcatattcctgtaaggatcacccctgatgtacaggcgtatctgagcgtgaccacctccggcagtacgcagcaaatccagggcacagtaccaccgccggataccggcggtatggttccactggccgccataggcagttctgacacgacacttccccgcctgcagggaaatacggcgtcacttcctgaactgaaggcttcaggactgacatcactgctgaatgcggtcgcttcccgtctcgggatttcctggcgttatgatggttcacatatcacgttctattatcttgatacccggaccttcccggtgacctatatggacagccaggttgcctataatgccaccgtggtcagcggtaccatgtcatcaaatggctcatcaggtgggacagcatcggatgccatttccggtgatgccagtaatacccagaccaccaccgtggatatgaaatctgcgctgtatcaggatgtgaaaaatgctgtctcatcaatgctgacgccgggtattggtcgcatgttcatgtcgacgggctttatcaccgtcacggacaccccacaggtactggaaacggtccggacgtcattgaaaaacgcaatgaagaaatgaagcgccaggtggtgctgaatgtggaaattctgagtatccggaaaacccgtaatgagcaggcaggtatcgactggaacgcagtcttcagcgacagaacgctgggactgagcctcggcagcacattcaccagtgcagccagcgataccgtcactggtggtgtttccattgtgaacgggaaactcaccggttcaaaagccttcctgaaagcactctcttcccagggagatgtcagtgtggtaacccggaattccgccgtgaccaaaaacctgaccccggtaccgatgcagattgccaatcagcagagctacattgagagtgtgacgacggataccaccgccaatgtcggctcatccacctccctgaatgcggccaccatcaccaccggttttaatatgacccttctgccgttcattctcccggactcacagacactgcagctgctctattccatgagtctctccgacaaaccggttattgagaattacgagagtggtggaagcaaagcccagctgccgaatgtggatctgaaaaccatcaaccagacagtggacctgaaatccgggcagacagtcattatcagtggcttccagcagtcagggcgtcgcagtggaaaacagggtgtcggcacaccgggattcttcggtcttggcggtgggatcaacagtgaaaacgacgacaccattctcgtggtgctgatcacgcccaatatcatctgatttgcagaaggaggactatcgtgacagatatttcaccgacagagcgacaggtgtttccgctgacggcaggacggaatgtatttcttgccggaatggactggaaaacactgcccgcaagccataaaaacccccggacgtttgcccgcagtctgggggcagtacgctatatttcctgtgagtatctcagtacggaagataccgatcgtcacatcatggttgcagccgtcagccagaatacaatccccaaaggcagccgcaggtatttctctctcgccatgcttatcctgcctctgctcgagccaggaggatacgctatcgttgaactgtcacaggcaaacgatacagaactttatggttttgtttctgctgttgacggcatcctggtcagtgacctggtgggaacccgggaggaaatcagggaggcccgggaaatattcctcaccattaacagcgcgcctgaacacggctggacatgttatgaaccgccctcgtttaacgggcctgacggcagaggtcccctgccactggaaaccctgacaggtgcagggaaatatccggcagaagcacgccttcaccccgtatcccgtgggccacagcttattccggtattactcatactcacccttctgggtactgcatggtatggctggcagtactatgaacgcctgaaggcagaaaaagcagcacttgctgaagcggcacaaaaagccgcagaggaacggatcacaccaccgtggctgagtatgccggaaaccggagattttatccggggatgcagtgacgtatggtcacgcctgccggtgtcggtcgccggctggcgatattcactcgccgagtgtgctgccaccgggaacagcggcaatctgcgtgcatcatatacaaacatcgccgggacgacagtgaccgcattcagccagcgggtcagggaaattttcagcatccggccgtttatggttatgccggacgggaatagcggtggttttgccctgccggtcaccttcagtatgcctgaaactcccgttgccgttgaggcattaccggaaaacaccctcctgcaggaacggctgaccacactcgcccggtcgatgcagctgaaaatggactggcaggaagtcagcaacagcttcaccgatgaagacggaaataccatccagcccccctggaaggagtatgacctgcagatactgacgacacttccggcgcaccaggtggcagagcatttcagtgaaccctccgtccgttttatctccgtaacaaggcaactggaagagggtcgtttccgttatcaattcacaggtaaatattatgtccagtaaaacaaaagctcttctgctttccgtcctgatcctgccgacaacggtcgcggccagcaccatcagcaacatgcaacagaataaccggcaactccaggtggaacagattcaggaagaaactgcactgtatgaagccatgctggcaagagaaaaggtgcgacatgaactcagaaccctggagcagggagaaccagctgagcctgtgcattcacaggaaagcagttcagccgtcacgacagatacccctgcccccattaccggtattccccggctgacagagatatccggagttcacccccagataaccgccaggatacaactgccgggcggacaaactgctgatgtaaaagaagggcaacacattcccggcaccacattccgcgtggaaaagatcaccactgacagtgttgtccttgaacaaaatggtatcagaacaacactacaaccctgactcagtgccgccatttacagccggctgtcggaatagattattcccccggcccttaatcacaaaaaaatcgtttccgggtaccgctgcccgtaaggagattttatgctggcacctgcagaccagccacctgatgacattctggattacgtggttgttgatacagataaaacaggacaaattcatgtcagagtggtggaaggaaaaaaacaccttcgtgccgtccaggattatctgacccgcctgtgctcccgctatccgggtaaagtatccccgtttgagttcaccacacttgatgtgatcgcccgactcaggcaggagacggtcatttccggggtggaaaacggaattaaccccgtacagcaaaaaatgctcgggtatatcagccatgcggccaccctcagcgcctcagatcttcacatcacgccggggcgtgacagtacggatttcacgtatctggaggcccgtgtccacggagagctggagctgctcgatatcgtcagaaaagatgaggggctggaattactgggggccacctattccggaatgactgacgtcataaagggaacacagtttgatcccggtgtcccccaggatgcccgtctggctgaaagattcctgaaactggccggactgtttggtgcgcgctactcccactatccgtgtgtgggcggactctatgccgtactgcgtctgatcaaggatgacagtcagcatataccgacattcagtatgctggggtatcaccctgagcaggagcgcgctgtccgaaggatgctgcagcgaccggagggcatcgtgatcctctctggccccaccggttccggaaaatccaccacgctgaggacggcttctgccgcctatctggaacagtatggcttcaacgataccggagggatcctgctcccccggcgacgtctgttcacaatagaatcaccaccagaggggcgtatccccggtgcaattcagacggccgttatggataccgctcaggctgggtcgattctgttaagtccgccctgcgccttgatcctgacgctatcctgaacggggagatacgtgaccatgcctccgccatcacggcgataaaagccgccatgaccggtcacctgatgctgaccacccttcatgctaacgacccgataaatattcttgagcgtctggaaatggagggcgttcaggcaaggatgattgcagatccgcagttatttatcggcctgctcagccagcgtctggttcaggtgatatgtccccactgccgcctcccctggcatgaggtggagagctcccggacggatgaagaacgacgcctggtggaaaacttctgccagcccgatgccgtgtatcttcgtaaccataacggctgcccacactgctggcgtggagtgaacggccggaccgtcattgcagaagtgatttccccggatgcgaagtttttccagatttaccgggaaaaaggccggattgaggcaaaaacctactggcaccgggagctcggcggtatgacacgaaatcagcacctgctgggcaaaatcaacagtggtcaggtcgatccgctggctgcgcattacatatcccctgtagacgaggacagctatacgctgctgcactgatatgaaaattctggaaagactcaacaatacggaactggaactgtccggccttaaccgctggctgggcaaaaagacgttcaggcggactacgttttacgagtcccttgcaggcatgatccgggacggcacaccggttatgcgggcactggagttcatctgcgatgtggaaacggattttggtaaaaagaaagggcagtccggcctgtattttctggcgacagactgtatcgccagcatacgcagcagtggtcagctctctccggccctgaaggactgggtacccaaagatgaaattgccctgatccgtaacggtgaagaacgaggtgatatcgctgaagccatgtttcaggtcgtcaaaacggcaaaaggacgacaggagatgattagcagtctggtgagtgtctgcctctatccgctcatcctgctgacactctgtgtggtgaatatgtataacgttcatacccgggttattccgatgatcagcgcctttgcaccggaagaacgctggtcagtacagatggtcattctggccaaatcctccggactggttatcggttatggtttgtggctgctggcaggactgctgctgctggcaattctcatcaggatgtcattcagtctgtataccggtccccgacgacggtatcttgatcgcatcccgccatggtccctgtatcagactttccatggcgtgaattacctttttaatatttcatccatgctgcagataaatattcctttatctcatgcccttaccagaatagaaaaacatgcagaacataaccgatggttaaaatcacgaataagtgctatcagaaaaaatgtcttatccggtcagtcactggcactggccatgaaaaactgtggttatgactttccgtcaaaatcctgtgtgaataatcttcttttaaattcagaaagggaggacagtgttgccagtatggcgctttatgcagaccgctggctggaagaagcaaaaaagaatgtcagaaaaagcggcattattattactgctatatcaggtctgctggtatttctcttcatcatcaatatggtcagtgccatttacggcatcagtgacatgctgaagcagtaaacacagcatcctttatattcccctcgatccaaattctgttttaccaatctcaggagctaatatgagcgtcataacctcttcgtattcagaacataatattcgtcaccttcagaacgatgataaaggcatgaccctgctggaagttctcggtgttctggtcgtcgctgccattgttattggtgccgtgatgggactgatgtccgataccctgtcctcttcagacaaccagaaggaactcaaaaacctgcagacaatcgccaccaaaatgaaagcccaaaaattccaggggcagtatacaggtactgactacgtcaaaatcctgaccgaaagtggtggcctgcctgccgatatgatcgccggtggtaataaggcgaaaaatgcctggggtggtgcggtaaccatcaaagtcagttcagataaatactcctacgttattgaatccagcaatgtgccgaagaaaaactgtattgatctggtcaccagcctgcgcagttcatccatgtttacaaaaatcaacggcaatgtgacgaataaagttgacccgtctacagtatgtaacgcagataaaactactatcaaactggaaaccaacagttaatcattcatcagcgcccgcccgggcgctttatttaaggtcactgtatgaacaggttatttatcctgacagtgattttttcactgttatgctcacttccttccgcacaggcatccccacaggacaaacaatatgatcgttgttttattaccgccggaaaacgttattccattgatccaggattactcaaaattattgcccgcagggaaagcagtctgaatccccgggccattaatcataacaggaatgacagaggaaaaattatcagtaccgattacgggataatgcagattaactccacacatattcccgggctgaaaaaatgggcattatccggagtgagaaagatctgttgaataatgtctgcctgaatattcagaccggagcatggatcctcgcccggcattttcagcgatgcggcgtaaactgggaatgcctcggcagttataacgccggcttcagtaaaagtaacactcaccgccggatgaaatacgcccggcagatttacagcgcttacatgcagggacgttagtccgggagaactgccatgctccagataatcccggcactgctggtcgccataaccgtggtaatacagtgtctggccgttcagatgagtcgctatcgactctcccggatgaatgcccgcccccctcaccatgggctggcgctgatgagcgggatgcttgcagctgccgccattatcctgcgtctttatcagaatgacagcgctgtcggggtgctgtttatgacgataatgaccggatgtatgacactgatgaccctgacggatgctgcatcctgccgtcttccccggcccttcaccatcatgtatctgataagcggcagcgcatttcgtctctggcagggagactggctgacaggcctgtgcagtgcagggttctggttcctgctgttgcttctgttcaggcaatacacctcttaccgcaggaaaacagaaaccataggcctgggcgatgtttttctgattgccggtattgccatctggtccccgccgggagacatcccctggattgtcgcaacggcagcaggcggagccttactttatctgtggtgtaacagacaacgacgcattaccagagaacttccctttgggccgtttctctgcgcgtcacagtacgcatttactttttatcccggtggcctttggtaataccggagggaacgactatgcaaaaagacaacgataaaggttttgcacttcttgaaattctgggaggactggttgtcatcagcctgctcatgccgctgttctggtcttacattgaagactacctgaatgaaatgtgcaaccagagcgccgcatttcatgcagatgcctacaatactgcagccaggacctacatcgccgataacaatgcccgcctgcatagcggaacgcttcctgccaccttcacggcggatgagttaatccggaaaggatatctgaagggtcttaaccgctcgccctttgggcagagttataccaccggcatccgtcgtaacacgagtaccggtcgtctggaggccctgacctgctccaccggaggggagaatatcaaagacgatgccctgcgcagtatcgccagcctgctccccggtctgggcggatttataggaaaaaatggcacagcaaccggtgtttttggtggatggacagataaacccggcgactatggactcagctgcaatggcgggcacatcgccatcgtaatgatgggtgatgacctgcaggaaagcgatcgcctgtatcgctttcaggtaccgggacgaccggagctgaaccagatgaacacggccatcaatatgggagggaacaacctgaacaatgcaggaaacgtcaatggacaaagtgcaacactgaaaggtgatgttacaagcgaaaacggctggttaatcaccaaaaatgataaaggctggaagaacatcacctatggtggcggttttacgatgacagacagccagtggatacgcgcagtcggtggtaaaggaattataaccacaggggaaatcaaaggaggaaaagtcagtggggggacagtccggtctgacggtcgcctttccacaggtgagtatttacagctggataaaacagccgtagcaaatacaaagtgttcaccagatggacttgtaggccgcgacagcaaaggggcaatactttcgtgccaatccggtgtgtgggttggctttgaatcctaccctgtgggaagccctatcccgtggccatctgccactcctccacaaggctatctgttgatgaacggccagtcgttttcctgttcccggtatcctcagcttgcccgtgcttatcctagctgtaagttacccgatctgcgcggtgtttttatccgtggctgggataacgggaagggacttgatggtgatcggaacagacagctcctgagttatcaggccgatcaatcaggcgtctatcacgaacgtggcggatggctgaaagggcatcatagtggtatgccatactgggcacaggggagtaccacagaaatgcgtcccaaaaacattgcattcaactacattgttaaagccagctagggactcacatctgataggtatacacagagaaaacaccgttaccacaggcgtaattttgtgttggtctggagatgatttgatatgacgctcccactggcacggcaaatgaaataaatctccgggcatatcagctggtcagcaaactcgatgccaggcgtaaacagaccagcaaaatttccccttattttgttccctaccctgcaactgtcgggtgcagaaacgggctgtttgtcgtgacactgcacgatttcgaccttgaaacccgtgcagaaacccggggactggcaatatctcatgccagcatgctcagtcacctcctgtccgaatccttttcattcgcccttaaaacagagttgcaaacactcttgaaacacactcgatcataacgatcgaaataactcgcttccgtttaaaaaacactctctttagactcaatttatgaacaaaacacgctgacccgcatggaggtgaaatgaaaactgacagcacaggtattgccgcccgtatgatgctctccctggacagggagcgaatttgcgaatgcctgctcagtcatcgccagctgcagtccacacccctgcaggttcgttatccgcagggagtcagggatgcccttggtatcatgagcgaacagctttctctttccgtctctgacctgacgcgtatcctggtcgaagacgcgttaagtgaaatgtttcttcctgcagataacatcgtccgccgtcttctcagcaggatggagcacatcatgcaggcacatgatatcagcgcaacaacgatggctgcattactggccccctggaatatccgccctgccgtcttccgggagccggacagactcactgactatctgaccggggagattcttgcagcactggctgactggttttatctcagtccggaatggctgaacggcagggtgcattatccactgtatcgtccgggagactggccagccacacaggagatattctgcaggattatttcagcccgcgagaatatggacattattctctggcatggttttccgtttgccggaacgcattccggagaatattgcggcgttctgctcaggcagaaaaaagaaattaataacaccattatttatccggtactttcgttatatccggccagaatggatatagaaaaagaaggctggtttcagatggcccgaaaaatatctccggatatccctgttcgcgccgtaacactcactccggcacaggcagaatatctgataacaggaaaaatattacccactgcgttattcagggttccgttatccccctggtaataatactgagcaataaaccggaataatacaccaactgtttttaatggcacagccgtgccctctgttgttatacccaaaatacctcaatacaggaaactgaaatgatgatgaaaaagcatattacccgtactctcatcgcgtctgccgttttattttcctttaattcgactgcagcaacgtcatattttgaagcccgcaatgatgcgatgggaggaacgggggttgcctcctctcactatggtgtggccccactggcaaacccggcactgctgacaaaatccggtgcaaaagatgacttcagtcttctgcttccgtccgtgggtgcgcagctgtccgatccgggtaatatcgccgacaacgccgacaaaatcagcgatgactggaaagccttcgaccgtgccgtcgacagccactccggggtaccgcagacagcggcccgcctgaaagagagactgcaggacttccggaacacccatgccagcgcacaggccggggtatctgctgtggcggcccttcccggtgataccctcgctgctgcactgatgctgaaaacgctcgggactgtcagcgtcgacggtaaagtcagcgatgccgacctgaactatctggaaagcattgcagacagtggcagccaggatgtggataaaaacagactgacctcacaggcttttgcccgtgccgcactgatcaccgatgtgggcgttgcgctggccactgaactggaaacggccggacaaaaatggtcactgggcttcacaccaaaattccagcgtgttgacctgtttaactacaatacgctgatcaaaaactatgacagcagcgcattcaaaggtgaccgttaccacaacacccaaaacggtattaacgctgatatcggtgccagcatggacctggatgacaactggacgctgggtctggtcgcacagaacctgatcccacgcagcattgagaccaaagaggtacatggtgtcactgaaaccttcaggatccgtccgcaagtaacaaccggcgtatcatggcacaacgacatgttcaccacggcactggatgtggatctgaccccggccagcggcttcacatcagacagcaaacgtcagtttgccgccgtaggtgctgagtttaatgcctggaaatgggcacagttacgtaccggttaccgccagaatctggccagcaacaacggcagtgcattcactgccgggattgggctctcaccgtttgatgtgattcacattgatgtcgccggcctcgtgggcaccgacaacaactacggtgccattgctcagttacagttcaccttctgattatcacgccccgggacgcccggggcttctgacctgaatctgctcgtttccgctcttctggccactcaccgccagtcctgttcattattttccggataaaaccatgcaaaaaaacgtatcacccttgcaggggagttgccatgctctgtctgagcggctgtcatcttcccccggataataccgcaccggccaggaagtacggtgcagcttctgaagtcgctgtcacacgacatgcacagtatcagttgtgggagcagggcacgtattctgcagccctgccttcccgccagcccggaggcagcctgcaggctcacagcgggcgggtttcctttgactgggaaggcgatgctctggagctcctgagcgagctggcccgtctgcgcggacaacagttcagttacagcggcgtgcgtcttcccctgcccgtctcactccatgtacgcgatatgaccttcgctgatgcccttcgtctcacagaggcccagactgcctggcgggcagtcctctcacagtcagccgggcgtttacatctttcctatatgccaacggagaaaaaatgaaaaaacaggtctgtctcctgctgtccgggctcctgctggcaggctgtgccggacagcaccatcgcccccctgccggtatggcaggcaatttaccaccgccggatctccgggcatggctgacgcccactgacaaccaggatgacggcatttcagacacccgtcgccagatgctcacggacgccggacgaacgctgggattccgtggcggaaaagcacagcgctcatgggaactgattcaggcactgaatgcccgggaaagtacactgaatgccctgtatgacttccgtccccttatcagcagggaaggctggctaccccctgttattgatgaagcgcaggatgttgctcacattcagcctgaccagataagaaccgcgtcccgtgtctggaccatcctgcgccccgaacgttttgtcagtaacccgccgggctggcgtgactggcttctgcgggggctttccactaccgccaccccgggaactgagggccgtgttgtaccggaagaccgcgcacagcgcagactctgggaaaacgcactccgccagggctggcaggaaggccgtgacaacgctgacctcaccctggaagccaaccagaaacgcctgacccgggattaccggggaatgatgctttatgccctgctctggcgtcagggcatgatcacacgcccggatgtgactgaacagcggcagaccgtcaccggtaacggcaggaaactcatcaccggagaccacgtccgccgtctgaagacacacgcggaattcaccctgcagaaatcacgctggcgtccggtcgtcagcacggaaggagcccccgatgaaattacccgatgagttcggcacattccctttcgcccgtttcacggccgaagagtttcgctatttttttgcctggtgtgcccgacaccgcgtcagtgatatcgatctgacaggcggctcaccggtatctgtcagtcgctttggacggcgggtacgttcgtccgcacatcctctgccgtcctccatcatgatggcgctgagtgatgaattgtttggacgggaagtccttccccgggtgctgtccggtcatcccgtggaccgtaccattcaggtcagcggtgatgcctccggtcgctacggtctgcaacgggggcagcgtgttcgcctgcgctgtcatctgattcagggaacatcagcaacagaagaaaaagtaatctccgtcaccatgcgggtgatcccgtccgatattccggacatcctcaccatgaatattgaaccggacctgctggatgccatgctccggaaaaccggtctgggtttcatctgcggagagaccggctccggtaaatccacactggcagcggcactgtaccgctacattcagacgcatttccccgaccgcaaaacggtgacctatgaagatccggtggaatacattctggggggagagaatgaccttctgccaccccatcaggccgaaatcgggcgtgatgtggaaagttttgcggcaggacttcgctctgccgttcgccgtaacccggacatcatcggtatcggtgaaatcagggattatgaaacggcagatgcagccgtccaggcaggtaacaccggtcacttctgcatcggcaccatgcacaccaaatcacccggtgaaacctttgcccggctgctggggttatttccaccggaaatcagggattcaatggcagccgccaccctttccctggtgcagttcattctggtgcaggtcctggtcagaacaaatgacggtggcagacaggccgtccgggaatacatcgtcataactgacgaactgcgtgatacgctctcccggcagtcccatgcgacatgggggcattacattgatgaaatcattcgcaaggaaaaacggcggatacgggatcaggttctgaccatgtatcagacgggcagcattgaggcatcagaagctgcgctcttcatcccggtcggagaattccccaaatgaaacgcgaaggcttctggcgggatgtcactccgccactgaatatttatggtgtcccgttgccgtttaccatgatttacctgctgctgtttccgtatccgtcaaaaacaacattctgggtgtgcagcggcattttgctgttttttgtgctcctggggtactcaggatggactgtccggacgctctgccggcgtctgtacagcctggtgcagggtaaacaggcgtcaggccgtccctggtggtaccggcatcgcacagaattaccccgtgaatggcgcggaacggaataaccctcttttgttcatcatcccggcgtatcacaacgccctcatctttaatccccggagaacgacatgaagtccagatatcgaacctggcttgctgtcccgcctgaggagacagaagccgtaaaaaatgcagttcccccgttaaatggccgcaaagctgtcgcatgggatccagaaaaaaagctctggtatgcccgggcgggtaccgaactttcactgctggagcgctggttaccccggccacaggaactgtcgatggatgccggcgatccggtcactgaatttgctcaggtcctggaaaacgccgggctggttattcagggattgccacagatggacggagccatacacagagtggccacccgggatgacaaaaaaggggccaaaagtggcgcatacagggcctatcttgatggtcgtcccgccggctggtaccgcgactaccggagcgccgatgacagtcccacaaactgggtattttccggcggagaacaacacgatcctctggccagactgcatctgcgggcattcgctcagcaacagcgcgatgataacgctcgtaaactgcagcaacagtataacaaacaggccggctatgcccgctcctatattaacaggttgccacaggcaacagcacatgaatacctgacgcgcaagggcatccgggccgcgcctggcgtgcggctgaacaataaaaatgagctggttattcccttcagcaacggccggggagaaatacgttcgtaccagcgtattccggtcaccggcgggaaggatgcccgcattctgaaagactccgagaaaaccggcaactggttcaccttcggaaccccggaaaatggccgccccctgttatttgcggaaggttacgctactgccgcctccctgcacgaagcaaccggccttccggttctgatgacagttgatgccagcaatatgattgccgtggcagaaaatgcccgccaaatctggactgacagcccctttgtcttctgtgccgacaacgatcatcaacgggaaattaacaaaggggtttttagtgcaacaaaggccgcagaagtcacgaatggcgaagtcattattccggcctttacggaggcggaaaaagcacagggactgaccgatttcaatgacctggacgccagccggggacgggacaactttcagaatgccatgaatgcacagttaaaacatatcggtatccccacacccaacagtgacactgccgaccatcgtgaggctgtcgtgatcgacaacctgatattcacaccggtaaaagatgagaagccacaaatgtcccctgaaaacagacagagcacagccccggaaacggagctggcgacacaggatacgccttatgacacccactccgacgatacagaaaaccaggcatatgaagatgactatgccgcctatgcatccctgcaatcagtaactgcggagacgttatccccggataaaccactggagaatattgcgtctgccgctgataccggcacagagaatacctctgtgcctaccgctggcgaccaggaagacctcaatacagacgccacaggtacagacaccgctcacaacagcgacacagcagaaacaggaacgcttcctgaacctgccgggatgcagtccgtgcagcaggcaaccactgaaccgaccgcagaagataaaccacacgagaacgttgtttccgctgccgataccagagaagaaaatgcctctgtggctaccgctgataccggtgaagaaaatgcctctgccaccaccgctgacaaccagagcacgcaggcagaagaacatccccggagtaaagacacaccggaaacctccctctccgacgcggccgggacccagcacaccaccacaacgcagtctgaagaacaagtgcaggtttccatggccagcgctgacgactggagcgcatttgcggaagatctcaacgctgacactccgggggccactgttcacaacaccgacaacgcggagacaaacacagtttctgaaccggccgggatgcggccagttcagcaggtgaccactgaactgacggcagaagataaagcacaggaaaagagcgttgcgtctgccgctgagaccggcgcagagcactcctctgacatcaccgatgacaacaggaacgcacccgctgaggagctcaatgccgatgccacggttgctgttcacaacaccggcacaacagaaacagcctcaccttctgaacctgcagaaactcagccagtccggcaggccaccgctgaaccgacggctgaagataaactgcaggaagagcgtcttgtttccgccactgagaccagcacagcgaatgaagcagcccgccctgaaacgccatcgcttttcagccgtctgcgccgttttctgaccggtgtgaaatcacgcacctcagaaccttccgttattcaggagaaaaagcccacggaggctgaaacagcaacagaggaggtcgcaccaccatcaccaccggaaaccagcccggaagacacatcgtcagcggaaccggacacgattatctttgcaccccgccgtcccgacagtccgcagcggcacaacctggacgagatccttaaaaatcttacacacaaagagtttcccgacaggactgcgctctacagcgttgacggtgaacccgccttcctggacagactctactgtctcgaaatggtggatggcgccagcgcggatgacaaaaaggtcctggctgcccttgctgtggccaccaacttctatggcggcgttatcgagctgaccggcagtgatgcctttaagcaaaaagccatgcagctgattgtcgaatacgacatcaaggttcgcatgaaactcccggcccagcgggcagcactggaaaaaatccgcaaggaaaaagagatggcgcatgatgccattgtcacccacagacccacgccggaactcaaccgccagtcaccggaagagacaacaatggcccaaccggctccccctgtgtcaccgaaggcagaggctgaacaaacagcaggcagtacggctgaaacaccgcatccggaagcgccggtcacggcaaaagctgaagccccccgggccgacagaccggaacaacccgccgccccgtcgtctgcgccagaaaaagcccctgtcagtgcacagccgcagcaacccgacacaccggaggaagagccgcccggcaagctcagccccggtgaaagtgtgactgccgtcctgacaaactacggagaaaaagagtatgcgcccggaaaagggcgctgcttttttgtggaactcaccaaccgcagtggcaaacgggaatactggggaaacggcctggaagaactggtcaaaaaccatcagaagggtgaccccgtcacactgacactgcaggcgagagaaacattccggctgtccggtgaaacgcgggatcgtatccgtaatatctgggccataaccccggtcagtaacggcattaccgttaataatgaccaacctcatgcgggtcagcataccctggagtttccgatggcaacattcagccaggtgatgttacagatgcaacaacactggccacagataatgcaggaagttcgctcccccaaaaatcctcccaataatctgtacattggtgaagacaggcaacctgcatcagcacctcaggatcaatcaatgcgactccccctcgctggtaatgcccccaatgaactgataccagccatcgcctctgccgataaggacaatcgtcagttgaatcttctgctggtccacagcgcagatgatcatctgcagggcgtggtccgcctgaacggcaccctttacccggcactggccaccccgtcagctgacaaccgtcagctggttatcaatgccctgacggataacggtctgcagtttgccggttacggtgaagctgttaaccatgatgagaataatcatcagcgtccgtccccacaaataatgcagtttcacctgaagcaacaggactccccgttgtttgccgccatccacaaaccggaagagcaaccggacaagcttttccgctctctgggttttgagcagacctggaaagagtggtctgacagccaaaaggcggaggacaggcaggaaaaaactctgcaacaggcacaatcccacagccccggccgatgagccggtaaggacgaccatgaacatgaaaaaaacgctgctggtcatactgaccggcatcaccctggcatcaccggtggcaggtgccgccacctgccgggcgggg

SEQ ID NO: 858 - DNA, 33021 bp, Escherichia coli
  modified_base (18121)..(18121): a, c, t, g, unknown or other
aggcattacagtgggccctgggttgattgataaaaaaatcgcctggggctttctgctacatgccgtccacaaaacgctttcggcatacagcctcaagcgcccgccgctattctaatcgttttcctgtccgccacaatccttttcatgccaccacgtattttgtgtcagggacagaaataaagccggaaagtgactacgtgtgcacacatctgttttccgggctgcaggcatcgtgttattttctgaaatgcaaaataataaaaaacaaggacacatcatgaaggatgaaatacacagtaccagcattaacccggatgttgttgagcagtttctggcccttatgaatacacattgtaaatcctcagaagaggcgctcaccatgctgagtacgctttgttacaacctgatgatgacatgcggtatccattccatggacagccagatgctcaatgggcatgggatatccatgcaacttcaggggattgatattgccgaaaagccaggcaagaatattcactaacctgaacagggcctgaaaacgctgtcttttcaggcctctgcaggcaaaaactgatgacaacaaaatttctgcgtttgtaccccaccgatgaaaaagacaaaaactcacaccgggcttctcatcattaaagataaaacccgacgtgtcagcctctacgaaacgccaacggcatggtgtatcagggggcaggagtgctacagcaaaagcactggacgccgctgtggcagccacgacagtctgagcagactgcgcctggacagcattaagcctgttgaatgagtggtggcaccatgaaagataacaacacaaccgccaccccagaaacctggaaaatgcgttttctggccaacgggacatccggcacatggttttacactgacgacattgcagtcactgacgcgtggcttcgcgcgcacccggatgatgtggaggttatccctctctgccggatacagccccgccagcattcccatgaacaacatattgaagaactccgcgcagccctggcccggatgctccatatgcatcatatgatgctggaaaccacacattaccgggaaaatatcaccgatgcccgttgtatccgtgaaatgcatgaagcgccattacaggcgctcaatattctgtccagatacccgcataaaaaggacgaggtgtgacgcatgtggctactgattttctggctttcatcgccctttaatgtctcttccggtgatgcccgtcagcccacactggcggtgcacagccaggcctttcataccgaacgggcctgccgcgatgcattgcgcgccattaaaaaggagaatgttggcgaattttctctgcggggcgtttgtgtttctgacggaaatacgaaggaggaggctgagagctcatgacggatattactgacagacatacacttcgccgtatgtcctggtcggaactcatcacggcaggacaggaagcagaatttcagcatgattacgagcgtgccagaatagtgtggtcattcgccttacatgttgcaacaaccacgattaacaaaaatctggccatagctcatattcgacgctgcgatactttgttgcataaatcaaaggctgtacccggaaacaacccgtgtggttccggtcagcgagtctgagacctcaacatcccgggtgatgattgtcattccggactgacgcagccgctgcacatctgcggcaatacgttgaataccaagccagaacagaccatccagcgcggtgacaattaacccgctttccagcgccagtttcagccgtgctgtcggggctttaacctgcccggctatatcagtgaaacaacgcgtcgtcatgccatagctgtccgcccgccgtattcgcgtcgcaagactgtaactgaagctatccggcacgccggataagtcattctgcagactgtatacacatccccgctgccgctcattgaatacaacttttttctggctgagctgccattcccgccgcacgctgtcaatcatctgcggtgtccgggttaacagcagacgaaacggcagttcaaaactggtcacataatcaacattaagtaaggcaatccgcagccgctccctggctcctgctccggtatcacggcattcacgcatgacatcttcccactggcgcatcagtcgcggtgactcattcctggccctgaactgatatttctcaatctgataatcaatatgttcctgcataccgtcaccggatatctgttgccgtatcatcacggatatcagcgtactggaattcatgccctgcgtgaagtatcacactgccaaaaaaaacacacctgaacgttattatttcgcaatattaattgcacctgttttcataaataaaaaggagacgatgaaatgataaaatatatattttcactcaccattatttttccgcctctctctgtgccgcacagattcaggggcacgtcatccgcgttcttgatggtgatacgctggaaatattacaggacaaaaagcctgtcagggtccgtctggctaatattgatgcaccggaaaagaaacagccctttggacgctggtcagccactcagctgaaggacctggtggccggaaagcccgtaaccgtgcaatacgcgcagacagacaggtatggccgtattctcggccgggtctataccgctgacggcacagaagcaaatcgctggcaggtccgtaacggcgctgcctgggtgtacccggactacaataatgactatactctcccgccgctccagcgtgatgcccgcgccctgaagcggggattatgggcagataaaaatccggtaccaccatggacctggagaaaacagaataagaaataattatttgctgatatgaagaaaaaaaccatttcaaagaaaataaatggcaaaaatacagcatggaaaaaattgccatttttaccgccgcgttatttttaatatttgctgtctgctggtcgtaataagcagaataacagaaaggtgtaaaaatgaacctggttgatgcatttgtcactaaagtgatatccggaccgtatgaagaatacggaaaatggtgggtggatgtagaatatatttcctggggagttccgggtaaaagccggctcatgtttgactcacgggaacaggcacaggaagtgcaggaaggttttcgatttttaacctgagcatattttgttaaagggcagaaggcggtgaccctctgcccttaagtacgtttccgggattatcagtcaaccagttcccggatcagttccaggattgctatcactgcgttagccacagcaacaaccgccctgagaacgatgattaacaggttaatcatccgtttctccatcaatggaggaaatcactgttgtttactcttacattgcctgtcacaacagctctttcattgttagctgaaaagagacttcctccggccagagcaccagacgcagcaccacctgtttgtccggccaggtctttgaatagcacagatccatagtcccgatggattgatgcgaaggtaagtctccagacaaggctaacttgctgattatacttgtttcaggcgatatcgctactcccggaacaatagactgtaacgaacagattgcgatcaggtgaatataacgatattctggtaacgttagttgaaaagagacttcctccgggccagagccacccactctccctgggatcgcaaaaaagccggcctcaccagtcggcttttttgtgccctgtctctcaccaccttctgctgttcctgtgaaaatgccctgctgaattcagccctgcccagtcattaccggcgattgttcgcattaattccactcagcctcatcccgaaatttatctatttatcgatggaggaatccccgtgtcttaccaacagacgtctgccgccgaagatccaatggctatatggtatatcgtcggtgccatatgcctgctctttgcgattatcatctggcgctttttacctgaaatcgtcttcgcctcctgcctgatcctgcacacactgtggggcatgattgactgggggccctttcacaactttgccgccccccgttacaacctgctggccatcactgctaacaacgcggcaaccatcactttcggccagtggctggatgttatgtcccggacagtggggatcctctggttgattctgcttcccatgacattcggctttctgtggatgtggtttcaccatccggcccagccccgttttacccgcaggccactgaatatccacacactgccccatattttttcagctctgtcaccggcgatcgcccccgttctggctgatggagacaacaacagactcttccacggacaaaaacgtcccgagcgccgtgtcgcactaacccccgaagtctttgtggagcagaacaaccttatccgcaacatgcagctcgatgttgcgtccacacgccagtgcttcatggcgcaactggggcaaccactgaccagctggaaagacatggccccacatgaaaaagcgctctttgccatctttggcctgcagttcttcctcggtgaccggaaagcagcggtagccctgatgaacaacctcaatctctcctgcaggctcaaaagtaaacgggaccaggggcgtttcagcacgccggtgtattcactggccagaaacgcctttatccgggtcatcaaaacagaaggcgcacaacagtggctcaggcagcaccgttacgttcgcagcggtctggtctggctttacgcacatgatttgcgcctgacgcctccgaactggctgtggctcaagggcgttgaccggacgctcttctatgcccttcaccgggcaaacaccacaaaaggcttcatcgaaggggccggcgtggtggccgttgcccgggcagaaaatgaagccagccgtctcggcctcccctgcccggaaccctgtgtggaagaggccattgaagggcttcgacgggacatgctggggctgggcctgatatgggacgaacctcagccagatcgcgatcgtaaacgtcagatcaggacccgctggtcactcacggatgacgtgataccccgccgccatgataacgacgaagacactgacactggtgaaaccaccgaaaccaccgaaaccaccgaaaccaccgaaaccaccgaaaccaccgaaaaacagcatcccgccgacaaggaaaaagaacaatgaccatccactacactgcaacactgaataataaacacctgtccctgatcgccctgtaccctgacggtaatcgggaggtgattgccatcctgccagtcacagaactgggcgcactgattaaccgtaataacaggctgatgcacctgtccttcagttccccttttcgcgaaataaccgaaacggtgcttgttgataccgttgatgcagaacgtcccggacatcacatcggcagaatgctctcagcgattgatgcctgcctggatgccgaatatgccggaaaaggaaaacatccctcccggaaaaatggcttctggcggacactgatgtgtggctttatcgccggaattgctctgccggcgacagttgcaggttaccactggatgaaggcagagcccccttccacgctggcttaccctacatctcaggaatggagagctgaaccagtaaccgacacagagacaccacgcccacatacggaacatcatgttaacagcatcccggcccgcccggctcccacacagcaggaaccttcttctgcccccgccccgacggcagtgacggaagaacaacacgttcaggccgctgaggcccgccgtaatctggccacagtacttaaacgcaacgcagaccgggggatgttcaccattaacctgtccactggtcatgaacgcacgctgtacgccttccttgaccccgcatgcatcaactgccgtctgctggaacccgcgcttaagcaactggcccgggaattcagcgtggtgatttatccggtctccgtgattggcggggagtccagtacaaagcggactgctccgctgctgtgtgaaccggactcacaaaaacgggcgaccggatggcatcagctgtattccgctgacagtggtatggcccccaccggcgatgcaccggccgcacaggatggacagtgtctgaccgccgcacgtgctgccatcgatgtcaataaccaggctttccgccagttcggttttggcggaaccccctgggtgttatcagataccggctggcacctgccgtccggcatcctgaaagacgccacttccgttcgcctcttcctgaaagcaacagatagcgaggagtatcacaatgagccagcaccacgttaatcctgacctcatacaccgcacggcctggggaaacccgttgtggaatgcactgcataacctgaacatcactggtctgtgtctggccggcagtatcattacggcgctgatatggccactggcccttcctgtctgcctgctgttcaccctggtcacctccgtgatattcatgctgcaacgctggcgatgccccctgcgtatgcccatgacactcagccttgatgacccctcccaggacagaaaggtcaggagaagcctcttcagcttctggcccaccctgtttcagtatgaagcggatgaaacattccccgcccgggggattttttatgtcggttaccgccgtatcaacgatatcggtcgtgagctctggctgagcatggatgacctcacccggcatgtcatgttttttgccaccaccggtggcggtaaaacagaaaccacctttgcctggctgctcaacccgctctgctggggaagaggctttacctttgttgacggaaaggcacagaacgataccacgaggacaatctggtatctctcccgacgttttggcagggaggatgatatcgaagtcatcaacttcatgaacggcggaaaatcccgcagtgaaatcattcagagcggcgaaaaatcccgcccacagtcaaacacctggaacccgttcgcattcagcaccgaagccttcaccgccgaaaccatgcagtccatgctgccccagaacgttcagggcggtgaatggcagtcacgggcgatagccatgaacaaggccctggtctttggcacaaaattctggtgcgtccgggaaggtaaaaccatgtccctgcagatgttacgggaacatatgacgctggaagggatggcaaaactctattgccgtggccttgatgaccagtggccggaagaagctatcgcaccactgcgaaactacctgcaggatgtcccgggattcgatatgtcactggtgagaacgccgtcagcctggactgaggagccccgtaaacagcatgcttatctctccggtcagttctcggaaacgttcacaacctttgccgaaaccttcggggacgtctttgcggcagatgccggcgacatcgatattcgcgacagtattcacagcgaccgcattctgattgtgatgatccctgcactggacacatcggctcataccacgtcggcactcggtcgtatgttcgtcacccagcagagcatgctcctcgcccgtgacctgggctaccggctggaaggcacagatgcacagaccctggaagtcaaaaaatacaaaggcagcttcccctatatctgtatccttgacgaagtcggtgcctactacacagaccgcattgctgtggaggccacccaggtacgttcactggagttttccctgataatgacggcgcaggatcaggagcgaattgaagggcagacctccgccaccaacaccgccacactgatgcagaacgccggcaccaaattcgccggacgcattgtcagtgacgacaaaacggcaagaacggtgaaaaatgccgccggtgaagaggcacgggccagaatgggcagcctgcagcgccacgatggtgtgatgggtgagtcctgggtggacggtaaccagatcaccatccagatggaaagcaaaatcgacgtgcaggatttgatcagactgaatgctggtgagttctttaccgttttccagggggatgtggtgccgtcagcctctgtgtatattccggacagcgagaaaagttgcgacagtgatccggtggtcatcaaccgctatatttccgttgaagccccccggctggagcgtctccgccgtctcgtccccaggacagtgcagcgcaggctccccacaccggagcatgtcagcagcatcatcggtgtactgacagcaaaaccatcccgtaaacgtcgtaaaaaccgtacagagccttaccgtatcattgatacattccagcgccagttggcaacagcgcagacatcactggatctgcttccgcaatatgatacagatatcgaatcccgggcaaacgaactgtggaaaaaggctgtgcacactatcaataacacaaccagggaagaacgccgggtatgttatatcacactgaatcgtccggaagaggaacactccggtcctgaagatataccttcagtgaaggcgattctgaatactctgctccccctggagatgctgttacctgtaccggatctaactgcatccccgccccataaaaaaaatgtcgctcagacaccatcaggtggaaaacaagagagtcgtaaaaaaagattctgataacacctgtatggctgattttaataacaacctttacgcgattattaatctcctccgctcaccatagtaagcggaggattcaggatttcaatccatcaccagaggtacaataaatgtgtattagtagcccggaaacaaactcatggtctgttatttatcgtaaaaattccggagaagatatcaatatcacttccctgacgtttaaaaatagtcttctggcagcccggacactgatggtgcccgaaaactatatgatatgcatactcagaaacggggagagggtcagacgatgggacagagaaatacttgcaggctcaaacagatggtacaagtgttctcccgataatttcgaaatactgggtaagctccccataataaataaagtcacaaaactgataaaatcataatctacggattttaatcagttaagctaaatcaggatgaacgctttgattatgaattatacatgaaaacaaatatgggcagcacaaaaaatggtgccagggttccccacgttcgtaatagattcacttctatggatattggtatgaattcccagatcccactctattgtaaacaagacatttttatcttttatattcaatggcttattttcctgctaattggtaataccatgaaaaataccatgctcagaaaaggcttaacaatattttgaaaaattgcctactgagcgctgccgcacagctccataggccgctttcctggctttgcttccagatgtatgctattctgctcctgcagctaatggatcaccgcaaacaggttactcgcctggggattccctttcgacccgagcatccgtatgagactcatgctcgattattattattatagaagcccccatgaataaatcgctcatcattttcggcatcgtcaacataacctcggacagtttctccgatggaggccggtatctggcgccagacgcagccattgcgcaggcgcgtaagctgatggccgagggggcagatgtgatcgacctcggtccggcatccagcaatcccgacgccgcgcctgtttcgtccgacacagaaatcgcgcgtatcgcgccggtgctggacgcgctcaaggcagatggcattcccgtctcgctcgacagttatcaacccgcgacgcaagcctatgccttgtcgcgtggtgtggcctatctcaatgatattcgcggttttccagacgctgcgttctatccgcaattggcgaaatcatctgccaaactcgtcgttatgcattcggtgcaagacgggcaggcagatcggcgcgaggcacccgctggcgacatcatggatcacattgcggcgttctttgacgcgcgcatcgcggcgctgacgggtgccggtatcaaacgcaaccgccttgtccttgatcccggcatggggttttttctgggggctgctcccgaaacctcgctctcggtgctggcgcggttcgatgaattgcggctgcgcttcgatttgccggtgcttctgtctgtttcgcgcaaatcctttctgcgcgcgctcacaggccgtggtccgggggatgtcggggccgcgacactcgctgcagagcttgccgccgccgcaggtggagctgacttcatccgcacacacgagccgcgccccttgcgcgacgggctggcggtattggcggcgctgaaagaaaccgcaagaattcgttaactgcacattcgggatatttctctatattcgcgcttcatcagaaaactgaaggaacctccattgaatcgaactaatattttttttggtgaatcgcattctgactggttgcctgtcagaggcggagaatctggtgattttgtttttcgacgtggtgacgggcatgccttcgcgaaaatcgcacctgcttcccgccgcggtgagctcgctggagagcgtgaccgcctcatttggctcaaaggtcgaggtgtggcttgccccgaggtcatcaactggcaggaggaacaggagggtgcatgcttggtgataacggcaattccgggagtaccggcggctgatctgtctggagcggatttgctcaaagcgtggccgtcaatggggcagcaacttggcgctgttcacagcctatcggttgatcaatgtccgtttgagcgcaggctgtcgcgaatgttcggacgcgccgttgatgtggtgtcccgcaatgccgtcaatcccgacttcttaccggacgaggacaagagtacgccgcagctcgatcttttggctcgtgtcgaacgagagctaccggtgcggctcgaccaagagcgcaccgatatggttgtttgccatggtgatccctgcatgccgaacttcatggtggaccctaaaactcttcaatgcacgggtctgatcgaccttgggcggctcggaacagcagatcgctatgccgatttggcactcatgattgctaacgccgaagagaactgggcagcgccagatgaagcagagcgcgccttcgctgtcctattcaatgtattggggatcgaagcccccgaccgcgaacgccttgccttctatctgcgattggaccctctgacttggggttgatgttcatgccgcctgtttttcctgctcattggcacgtttcgcaacctgttctcattgcggacaccttttccagcctcgtttggaaagtttcattgccagacgggactcggggtctgacgctcagtggaacgaaaactcacgttaagggattttggtcatgagattatcaaaaaggatcttcacctagatccttttaaattaaaaatgaagttttaaatcaatctaaagtatatatgagtaaacttggtctgacagttaccaatgcttaatcagtgaggcacctatctcagcgatctgtctatttcgttcatccatagttgcctgactccccgtcgtgtagataactacgatacgggagggcttaccatctggccccagtgctgcaatgataccgcgagacccacgctcaccggctccagatttatcagcaataaaccagccagccggaagggccgagcgcagaagtggtcctgcaactttatccgcctccatccagtctattaattgttgccgggaagctagagtaagtagttcgccagttaatagtttgcgcaacgttgttgccattgctgcaggcatcgtggtgtcacgctcgtcgtttggtatggcttcattcagctccggttcccaacgatcaaggcgagttacatgatcccccatgttgtgcaaaaaagcggttagctccttcggtcctccgatcgttgtcagaagtaagttggccgcagtgttatcactcatggttatggcagcactgcataattctcttactgtcatgccatccgtaagatgcttttctgtgactggtgagtactcaaccaagtcattctgagaatagtgtatgcggcgaccgagttgctcttgcccggcgtcaacacgggataataccgcaccacatagcagaactttaaaagtgctcatcattggaaaacgttcttcggggcgaaaactctcaaggatcttaccgctgttgagatccagttcgatgtaacccactcgtgcacccaactgatcttcagcatcttttactttcaccagcgtttctgggtgagcaaaaacaggaaggcaaaatgccgcaaaaaagggaataagggcgacacggaaatgttgaatactcatactcttcctttttcaatattattgaagcatttatcagggttattgtctcatgagcggatacatatttgaatgtatttagaaaaataaacaaataggggttccgcgcacatttccccgaaaagtgccacctgacgtctaagaaaccattattatcatgacattaacctataaaaataggcgtatcacgaggccctttcgtcttcaagaattttataaaccgtggagcgggcaatactgagctgatgagcaatttccgttgcaccagtgcccttctgatgaagcgtcagcacgacgttcctgtccacggtacgcctgcggccaaatttgattcctttcagctttgcttcctgtcggccctcattcgtgcgctctaggatcctccggcgttcagcctgtgccacagccgacaggatggtgaccaccatttgccccatatcaccgtcggtactgatcccgtcatcaatgaaccggactgccacgccctgagcgtcaaattcctttatcagttggatcatatcggcagtgtcgcggccaagacggtcgagcttcttaaccagaatgacatcaccttcctccaccttcatcctcagcaaatccagcccttcccgatctgttgaactgccggatgccttatcggtaaatatacggtttgctttcacacctgcgtctttgagtgctctgacctgaagatcaagagactgctgactggttgagacccgagcgtaaccaaaaagtcgcataaaaatgtaccttaaatcgaatatcggacaactcatgtctattattacaaatttacgatttaatagacatattaatgtaacagttttacgatgtccgataatttataacatttcgtacggttgcaaaaatgttactaaatgcccgtcaggcagggaggccgatatgcccgttgactttctgaccactgagcagactgaaagctatggcagattcaccggtgaaccggatgagcttcagctggcacgatatttttaccttgatgaagcagacaaggaatttatcggaaaaagcagaggtgatcacaaccgtctgggcattgccctgcaaattggatgtgtccgttttctgggcaccttcctcaccgatatgaatcatattccttccggcgtccggcattttaccgccagacagctcgggattcgtgatatcaccgttcttgcagaatacggtcagagggaaaatacccgccgtgagcatgcagcgctgatacgtcagcactatcagtatcgtgaatttgcctggccctggacatttcgccttacccgtcttttatatacccggagctggataagcaacgaacgtcctggcctgcttttcgatctggcgacagggtggcttatgcaacatcgtattattctccccggagccactacgctgacccggttgatttcagaggtaagggaaaaggcgacgttgcgcctgtggaacaaactggcactgataccgtcagccgaacagcgttcacagctggagatgctgctggggccaactgattgcagccgcctgtctttactggaatcactgaaaaagggccctgtgaccatcagtggtccggcgtttaatgaagcaattgaacgctggaaaactctgaacgattttggcctgcatgctgaaaacctgagtacactcccggctgtgcgcctgaaaaatctcgcacgttatgctggtatgacttcggtgttcaatattgccaggatgtcaccgcagaaaaggatggcggttctggttgcctttgtccttgcatgggaaacgctggcgctggatgatgcattggacgttctggacgccatgctggccgttatcatccgtgacgccagaaagattgggcagaaaaaacggctccgctcgctgaaggatctggataaatctgcattggcgctcgccagcgcatgttcgtacctgctgaaagaagaaacaccggacgaatcgattcgtgctgaggtgttcagctacatcccaaggcaaaagctggctgaaatcatcacgcttgtccgtgaaattgcccggccctcagacgataattttcatgaagaaatggtggagcagtacgggcgcgttcgtcgtttcctgccccatctgctgaataccgttaaattttcatccgcacctgccggggttaccactctgaatgcctgtgactacctcagccgggagttcagctcacggcggcagttttttgacgacgcaccaacggaaattatcagtcggtcatggaaacggctggtgattaacaaggaaaaacatatcacccgcaggggatacacgctctgctttctcagtaaactgcaggatagtctgaggcggagggatgtctacgttaccggcagtaaccggtggggagatcctcgtgcaagattactacagggtgctgactggcaggcaaaccggattaaggtttatcgttctttggggcacccgacagacccgcaggaagcaataaaatctctgggtcatcagcttgatagtcgttacagacaggttgctgcacgtctttgcgaaaatgaggctgtcgaactcgatgtttctggcccgaagccccggttgacaatttctcccctcgccagtcttgatgagccggacagtctgaaacgactgagcaaaatgatcagtgatctactccctccggtggatttaacggagttgctgctcgaaattaacgcccataccggatttgctgatgagtttttccatgctagtgaagccagtgccagagttgatgatctgcccgtcagcatcagcgccgtgctgatggctgaagcctgcaatatcggtctggaaccactgatcagatcaaatgttcctgcactgacccgacaccggctgaactggacaaaagcgaactatctgcgggctgaaactatcaccagcgctaatgccagactggttgattttcaggcaacgctgccactggcacagatatggggtggaggagaagtggcatctgcagatggaatgcgctttgttacgccagtcagaacaatcaatgccggaccgaaccgcaaatactttggtaataacagagggatcacctggtacaactttgtgtccgatcagtattccggctttcatggcatcgttataccggggacgctgagggactctatctttgtgctggaaggtcttctggaacaggagaccgggctgaatccaaccgaaattatgaccgatacagcaggtgccagcgaacttgtctttggccttttctggctgctgggataccagttttctccacgcctggctgatgccggtgcttcggttttctggcgaatggaccatgatgcgactatggcgtgctgaatgatattgccagagggcaatcagatccccgaaaaatagtccttcagtgggacgaaatgatccggaccgctggctccctgaagctgggcaaagtacaggcttcagtgctggtccgttcattgctgaaaagtgaacgtccttccggactgactcaggcaatcattgaagtggggcgcatcaacaaaacgctgtatctgcttaattatattgatgatgaagattaccgccggcgcattctgacccagcttaatcggggagaaagtcgccatgccgttgccagagccatctgtcacggtcaaaaaggtgagataagaaaacgatataccgacggtcaggaagatcaactgggcgcactggggctggtcactaacgccgtcgtgttatggaacactatttatatgcaggcagccctggatcatctccgggcgcagggtgaaacactgaatgatgaagatatcgcacgcctctccccgctttgccacggacatatcaatatgctcggccattattccttcacgctggcagaactggtgaccaaaggacatctgagaccattaaaagaggcgtcagaggcagaaaacgttgcttaacgtgagttttcgttccactgagcgtcagaccccgactcctgcaatcgtcaagggattgaaacctatagaagacattgctgatgaactgcgcggggccgactatctggtatggcgcaatgggaggggagcagtccggttgctcggtcgtgagaacaatctgatgttgctcgaatatgccggggagcgaatgctctctcacatcgttgccgagcacggcgactaccaggcgaccgaaattgcagcggaactaatggcgaagctgtatgccgcatctgaggaacccctgccttctgcccttctcccgatccgggatcgctttgcagctttgtttcagcgggcgcgcgatgatcaaaacgcaggttgtcaaactgactacgtccacgcggcgattatagccgatcaaatgatgagcaatgcctcggaactgcgtgggctacatggcgatctgcatcatgaaaacatcatgttctccagtcgcggctggctggtgatagatcccgtcggtctggtcggtgaagtgggctttggcgccgccaatatgttctacgatccggctgacagagacgacctttgtctcgatcctagacgcattgcacagatggcggacgcattctctcgtgcgctggacgtcgatccgcgtcgcctgctcgaccaggcgtacgcttatgggtgcctttccgcagcttggaacgcggatggagaagaggagcaacgcgatctagctatcgcggccgcgatcaagcaggtgcgacagacgtcatactagatatcaagcgacttctcctatcccctgggaacacatcaatctcaccggagaatatcgctggccaaagccttagcgtaggattccgccccttcccgcaaacgaccccaaacaggaaacgcagctgaaacgggaagctcaacacccactgacgcatgggttgttcaggcagtacttcatcaaccagcaaggcggcactttcggccatccgccgcgccccacagctcgggcagaaaccgcgacgcttacagctgaaagcgaccaggtgctcggcgtggcaagactcgcagcgaacccgtagaaagccatgctccagccgcccgcattggagaaattcttcaaattcccgttgcacatagcccggcaattcctttccctgctctgccataagcgcagcgaatgccgggtaatactcgtcaacgatctgatagagaagggtttgctcgggtcggtggctctggtaacgaccagtatcccgatcccggctggccgtcctggccgccacatgaggcatgttccgcgtccttgcaatactgtgtttacatacagtctatcgcttagcggaaagttcttttaccctcagccgaaatgcctgccgttgctagacattgccagccagtgcccgtcactcctgccagacatgctgattaattttgcccttattaacatcacagacagaaagaacgagggtaccaataccattgatggtaactggcaggccgatgaaagacgccgttaccgggataatgtaagaatctatttttgagtatgtcaacataacctgaggcaaagtacctcaggttccagtgtagtaatcagccaacctgacagtcttctgttagccctacagatatgtcgtggagctaaccgcgcatgtcaaagccggatttttgaaaatctctataaacttccggattgttgaaggccgggaatttagctttatgggctgctgactttatcgcttcgcaataggctttatcgccattactggttgatatttttaacgccgtgccatcccgggagaattccatatgcaacctgcattttttccttttccatttttgcggatcatcaagtttagcattaattgcatccctgattccccgtgcctgctcccccattcatcctgatcatcccaacgtcctgaactgcaactacccagggctgtagttttatggcaatttgaaggatgtaatggcgcacatcccgccnacaaagctgactaaaatagccagcataacgattttctttacccccatatattgctcctcaatccatatagatctcagtaccatagctctgtcagagcaaagaaaatcttaactaatacaagttaagatttttaatatccactcctcatccctacattccaggtgatggtggcgtccactcattatcctgaactggagcataagatgcgccatgccccccggatatgcttttctgttgcctgatatattcgtggtagtactgttcactacgctgacgatgtaaatccacatccgggcggctgattacaaagtgtccatttccggttattccagctgcattatgccaggccaccatttccgcaaatacatcattaaactgttgatatgagccttccggttcaaaacccattcctggctcacgatcaaacaatacaggagcaatcagattcagcttatccaccagttcatttctgtcctgatgatggtagaacaccacacggtccccataatccacacagactaactcgccattcctccgatcacgaaaacgcacactgccatctttctgcagacgggcttcgagaacgccagtgtcttcataaagtggagttcctcccggttcacagagaatcacgcagcggtcggcattcgttgttcgtcgcttgtctttgcgacgatcacgataatcccagccacgtaactgtgataatgcagctctgtctccctgtaccgcctgttgctccacccactgccggtaggacaaaggataccacttaccctccgcaatcagtgacaaccgctcttccttcacactctccttcagcctgatcagcgcctgcatacgctgcacttccgcaatatggtaatgcagcttacgcaattgtggatcccggaactgcacacggatatacgccttgcgccgacggcaggcagcatgaatttcccgtaaccgttctccgtaacgtaagtcgggtttacgccagtgctccttccatgcaagataacgcgcgcgcaaatcttcccgcgcagctgcacgggcttcacggcgttcacgacgcagtacaggatcgcgccggaagccgggttccacttcatcgctggcagcaagttccggattgtagcgacattcaggcttcacccgttcaaatatatctgcacctgcaatctcaaatggccctgcctgcagctcagccctggataacgtcaaatccgggtggatactgctggccttcactggtgtgagctcatgattaaacgcatccacaatcacaagaccatgatgctgtttctgcaacataagccctttacgcgcaaacatctcatggcacgcctgccagctgaaattcccgcccgcgatcatatcttcaatcaacgactcacactgaacagtcgtgtacccccacagactttccttatcagaaaacagttcgcgctttattgctccctgtggacctgtccccatccgcatacgataccattcgtaatcactgacagcctgagtaccaagattacgtccccggaatcgttctccgggtataacctgagtaaaaatatccttcggtacaggctgccatccaccatccagatcctgcatataatccagcgtcattaacggccacacactgtctgcacgtactggtgtctgttgtttatcaaatccatcatgcagtaccagatgcccgtgctggatccccatccataatccagcctttgccagagttctgtgcacatccaggcaactttccagctcaccatttctcgccatttccggtaagcgttcggcaaaataacggcaggcgtactgtttcagactctccgtttctgccactttttccggccggatatcaacgtttatggcttccggatcataacgaccgggtgtccccacctgactgaaaatatctgtcggtacaggctgatattcccccagtttccgccccagtttttcagctgtccatgacggtccgaacgaactgagtgcaacaccttcccgcgctctgtcccagccatccttcaccaccagttccccttcctgcatcgtgatatacagaccatcactggccagccgtttatgcaaagacaaccagtcttgtgcgggctcttcacgcagcccggcaatcgacatctgcgcaatatattccctgaacgtctgctttttcccgcgtcgccaggcattacggcgctcacgtaccagcgctgttttgcgcacaatacggttgccgggtgcatgcacaaagcagccattatcaggcgcgaatccgtgcttaagttcaagttcacgacatgcacggctgagtttttcctggctccaggaaagccagttaatataaccagtttcaggatgtacacgattcacggcaacatgcacatgcagattatccgtgtccgtatgaacggcagccacgtactgatgttttgagagttcaagagatttcagtgtgtgacgcacacagtcaaaaagctgctcaggacgcgggctttcatgcgcaggccaggaaagaatgtagtggaaaacggggtctgtatcattacgggaaaaaacagctttgtccgccttgtactgcatctcttcagcagctgtttccagtgaattgcagttatggaaacaggttacgccatagaaatttacccactgactgccgtctttcatcacatcaatcagggagacaaatttttcgttacgcaggcgtgttgcataatcaacaagccgtctgaaacggttgcggtgagggacatcactcttgatttcgctgtcttctgtgagctcattttcctgcacatcatcccgcacagacgtgtacgcaatcaggtcttcaaaggaagacctgccgtcacgtcttttgtgcggaataatggcattcatcagcagttatctcagcgtcccattaagtctcttcgcagagcattgacatattcagtaatggcaacaagaacctctgcatactccttatcaccagtgcgttttccctccacaaacagatgcttctgaaggcggccaagacgcataatctcatcaatcatacggtcgtcagtacggcagttaaccaccttatccagtgaagagcttcgtataaatgttgaaaccgtctgtccacttgactccgctttttctcttacgatttcagcctcatcctccgtgaatctcgccgtgaattttacaattctcttcctgttctcactgcccgttcgggttttcttctcactcatggtctgctccttaccggggtgtcgggcaaagccctgaccaggtggggaatgtctgagtgcgcgtgcgcggtccgacattcccacatcctgtcccgtttttcagggcattatagcctgttatttttgtgcatcatagtcttatgcagacggcagaggcagggcgcagccctgccaggagtcagtttttggtgataaaatcaggcttcaacattaaacggagagaaagtgccaatggcttctaaaaaattttactcagatgatgacatccagctggcaaaagctgctttatcagaattgccggacctcaccgctcaacggaaaacattgcgtgattttcttgatgccattcgtgatgacatcattgtcctggtaaggacaaagggttatacactggcagatgttcgtgacacgctcaaaaatgcagggtatgaagtaggagagaaggcacttcgtgacattattcgggaagcagaatcgaaaaaaccatcccgccgttcttcctctaaaacagcacctaaaaagacagattcaggcaggaaagatggcatcgatatgaacaacaattgatgtgacaatgtcacatcgtgttctgagattatgatgattacagaaaaaaaagccccggaataaataccagggcttttctgtttaatcagactcgtggcggcaatgcacctggataatgccgtgcaataatatcattcagtttttcaacaaggtcagaacgcttaaagacaatgtgtacggtccctttctggtagccacgcaccgtaaaatattccccttctaacagcttaccgacattgtcgccgttcccgagaaattcacaatactgcgccccgatgctgttcctgaagtcaggaacgttgcgcccctccagcagataaaacggacgtaccaggtcatccagtgcctcccgtccgctgcagtccagcgtcacacgcccgttactccagcggtacagcaggttttcaataatgattttcttacccaggcggcagggattattggttctgtaatcccatgacaatttccggtagacatcaatcagcccctgttcaaacgtctgcatcttgctggcattaagatggcggaatgttgccagtacattgtccagggtgatttcaggacaggtgtcgctcatcagctggctgttccactcatcacgctggcatgaactcatgaaggtgtacatgcccgtatctgtcatcaggcggtcccagattttccggtcggcaagacgggtgatattccttttcgcttcttccggtttatccatgcgacgaacggaatcagtcacgcagtcttcaaacccgtaaagaaaaatatcacctgacgcatcgagcagaatcctgcgcgctgtcgccaggcattccatcgcctgcatgaacagtgcaacaccttcgttacgctgcgcgatgatgcggtcgatggccacagacggaataacatctgtcgtgccggcagtattcaggtcagtagtgggtaaagtctgattcatcacattgtctcctcatcgtcacgactgccgggtcagccaggtcatttcccggaggagcgaagctccttctgccgtccgggtcttcggggatatccccgcagtggacctttccgacgggggacgctcaccacgtcacggggcagttgtccgggggcagacgcaaaagtttttgacgcctgcggcaaaaagttttgtggctggtacatctctccccctggacgactgaaacgggatgtggtcgtgtatgtacccccggaaagtccgtctgcggagaacaggccgcagtgcggcggcagacaggcagagacagctgcgccatcaggcgcagtggccttacacaccgtcaggtgtgcagggagcgccgcatccggcgcgactgaagaaaaacgacggcacaacaatggcatgtggtggtcactggtacaccactcccgcacaggtgaaaacagagaaaacagcacgacatccacaatcaaaaaaagtgaaatttcttcactttttcacacttatttatcgcgctgatttggcaattgtgatgataaaataaagtgaagttttttcactttttcaaaggtgttttatgaccggctgggaactgcgaatctggcgaaaaagcatgctctggtcacgcgaaaaagcggccagagaatttggcgtgacgcagagaacatggcacgcctgggaaaatgcggaacaggtggacgtcaccgtctggaggaccacccaggctctttcagtccgtgacctgctgcctcacatgcaggggatgcgtaaagcagatatcatcagacgactggaaaatgaactgggggaaacggcagaggatgtgtgagcgtgattcacagcctggctgaatgccaggctactgatcatcaggaaacagctttttcagttcttcaccggaaagtccggtcgcctcctgaatccgttccggcgtccagcccatatcccgcagccggcaggctgcttcccgcgccacttcaagcgcacctttcttaaaaccttctttaaaaccttcgtcgaaacctttctgtataagacgttctgcaatcgtcatgctgtttgctctgctcctgctgacaaaaaagcccggcattttgccgggctttgtggttctcatcagtgagtgattttcttcagttcgtcatcggaaagtccggtagcctgcttaatctgctccggcgtcatccccattttctgaagctggcacgcaatagccagggctttttcaagcgctccttccatgcgtccttccatgcgtccttccatcctgccttcctggcgacctttttgctcaagacgttctgcgatagtcatcagtttatcctcatgctgcggcagacgctcagccagcgcccgcataaattccggtgatacagagtcccctgcgttaacgatgtaatgaatcagaacacgcacctgctcgtctgaaatttccaccatgacctgcgggagtttgtccagcagctccatcatgtcacgatggcggatatgcttcatcagcagcgtcagtgcggccatccggcgatggttcatgatttcattgtcatcaacgacagtgatatcaaccagcggaaacggctttgtgtatattttagccgcaagcgccggattctcaaaacagtccagccagttcatgctgtacgggtacgggctgcgctcaccgtgatagaacagcaccggaatcaccagtggcaacgttttgtgctgctccagatgtctctgcatcgccgccacactgtagcgtaacatgcgaaaaggcatgtacagattttctgtgctctggtgctcgatgagcgtataaacatagccgtcttcacccccggtggttttcacgctccagaggatatcgctggcgtactgatgcaggtccggctctacaaaggtggcgggttccagcttcagcgtggacaggtcgcacaactgccggtactccgcaggaagatgcagttccagaaaatctctggcgacgtcgggattcgccaggaacgaccggaacgcggcatcatgcggcgtgggcgttgtggtgtttttcttcttactcacggttcctccatcaaatcagcagcatcgcagcaatcatcgcccaaatccccacaaccgagaggacagcaattgcgttcaaagccatgacaacaatagccgcgttctgagtcacggcgtatttcttcagcaatctcttctgcggaaaggtaatcaaactcctcacgggccagttccaggaccagtagatgttgttctgtcggcaatgtggccacaaaattatcaatagcagcactcaaacgtcgctgatatagctcataaacaagaccacaacggggcattagttcttcggataatagttccagttttgagcgaattctgtcagcgttgaaagtgacttcatcaaaagacatatgaaaagctttgtcagtatcaaaacaagacttcattgttatctccagccctcccgggccctgaatgaaagagaatctgtttcccttttctgttttttgtggagacaccatgcaacacagacgtcgtgatgtttttcatcttgctcacggttcctcctggtaaagtacctgaacacatcctgccacctgcacaggcagacggcaggggttaatcagtgacagacccgttcaatttcaagcgcgcggagcaggtggccccattcgctgactttcatggcggggatacgtacccgcttctgctcactgcagcgtctggcgatatgaccgcccatcgccaggacgtccgggttaatctcatccggtgccagttcctggcgtctgaagcgggtatggcggtgcaggggtttgttctcccgcaggcactcttctcgcagacgctttacatactcggcggttgcgaagataattgatggtctcatggcataatctccatagttagtgaatgagatgccggacttccgtacggggaagcgccagcggagaaaggcagggtttatcgccctgctttttttcattccggacagcgacgcagtgccagcgcgagcgctttcatcttccagccttccggcgtgcggtacatcaccttccagtagccgtcgatgaacacataatggaagcgcacctcttcagtgctttccgtggcgatggcctccctgaaagaacggtactcacgcgcctcactgtccatccggaaaccactgtcacgtccgtaataagccgtcacaccgtccaccgggttctgaagcgtatgcccggcgggtttgtcgcaacggggaccgaggcaacggatatcaccgtgttcaaccagggcttcggcctgctgaccggtggcatagtgggtatgcaggatgcgaccgttccaggtcggctcaccgtgcaggtggcagtaaacggtacggaacaccccgtcgcggcaaaaaacggaaatcgtgctgctgactgtcatgaaaacgtctccttctgctgaatcaggtcgccgggccgaccggttgctcccccggaggggcgaaagccccttctgccgtccacttcttcggggtttctccccgcagtggacctttccgatggggcagcgacagccacggcacggggcagttgtccgggggcagacgcaaaagtttttgacgcttgcggcaaaaagttttgtggctggtacatctctcccctggacggctgaaacgtgttgtggccgcttcagcccccggaaagtccacagcggggaaacaggccgcagggggggcggcggaagggcagacaactgcgccatcaggcgcagtttccttacacaccgtcaggtgtgcagggagcgcaggccacggcgcgacagaggcggcgcgaccggaacggtcgctgcaagcccggggttttcacgcatcggaccgtagcgacagcccgaaaccgcgccagcgggttcggcggagactggcaggtgcgccagcagctgcctgtcggagtcgggcctgacgaccggatgccgccaggcagccgggagccgaagggtgtccccgcccccgggagtcagaacaacagaaacgacaaaacagaaaaatgcctcacactatgacaggcaggaagggtagcgccgcaggcgcggccctcctgtatttcaggcaggcgtaagcctgccagggttttccgggggcctggcaggccatccccccgccggagcggggagtaaatcaccgacggaacacatgaccgtcaataaaggtgaaggagtccaggaataaatcccgcgcatacgcctcatagtcaaaatagagcgccaccgtctccggcacgtcagccagcaggccggtatcactgacgaactcaaccgcaaaagcctcctcactgtcagcctcgccccaccaggcatcgcggaagctgtcaaaatccgtctcaccggtatcatccacccagagacgataagcctcttcgcagccttcatcccgcgcctggcggaagccttcaacccaggcccagttgatatggcattcagaggccatattccccgggaatccctcataatcctgaaacatcagttccgggtcggtttcatcctggtgaagggcacggcaggcggcgaaaaagtcgcgttcatcatcaaacgttgtcaggtcaaaccagcggccagcgatgcttccacagttgtatttgtgccaggttccaacgtatacagcaggtgcaacaacagacattcccgaatcctccatagtcacatgttctgcgacaccgggcggtgccgtgcctccatctttgccgggcctgcagggatgcaagggcgcaagggaagccgcagcccgacgcacacggctggcgggagttggagggtgagaccgcgaaatctgagcgggtgaacgaccggaaaatcacggcagacgggaaggagggaccgggtgaccgcagcggttcatcttaccttgcatcccgcccgcagaagcccggctacgatggaggcacggcacagcccgcacacgacacggcggccacataactgaaaacccacaaggccatgccccgcatggccgggtaaaagcggagccggcggcgacgtccttattccggcgagagcagggagcacaccgcatgatctccagaccacccctggaacgaaacgatcatgaccggcatgtccctgcgtaaaatatacatgcctggttcaccggagaatatctgtgatatccacaagttttctgtcgcgcagccagtcctgcgcttcacgcaccacacaactgtccggtttcaccgctttcagcgatgatgccagtcgcttgatcaacatcaccagttcccgtgtctgtatgtccggcattgtctccggcggagcagggggactctcatttccgacgctcatcccatgcgcttccagtgtggcacggacaaaccaggcggcatcgaccagttgctgtccaatccaggccagatcggcatttctgtcacgggctgccattcgctcgcccgacagcgccttgctgatatggctgcgcaccagattatccaggagtgcctgcgcttcttccggtgaaaagccacctggtatctctgtgcgcaacagccctttcctgtacagaagctgcagcagatcaacctgcgaccgcacagcaactatcagtacataacggacaacattcgcactggcagtggtttctgtatcattcagcagttcttccggatcgttccccccggtgttgcagagcaacggcaacagaggtcgcatccacgcgggaacctggtatttttcgtctgatttcatcatattacgttctccagcttgttcgggatcatccactgctcaagtgcacgtacctgtaccggtgcaccacgaccggcctcaccggcttcaaaaatcagccgccagagtggttcctcctgccagaaaaaccggtcaaatgatgacagtgatggaaaacgcccgcaccacccccagaaaatcgtttccagatcatgctcctcaacaacaccagaccagcgggacaaccagcttccgaccgtggcgggagtatgaaacgcaaggtcaatctgcgcctgagcaaaacatgtctggtattccagttcccgtcgttctgcctcacgttcccgctggcggctgtatttctgctctgtcagcgtggttttctgacgacgacgctcaccttcacgaaaaggcacggacgggaacagacggtgccccgcatcggatggcaggggaagaacacagacttccccaaaactttcaatcagtttatccacggcagccagccacaggagacggttgccatgaaattcctccttcgtcagcgcaggggcaaaaaagcggagatcggtcagcgaaatccggcgactgccattcaggcagcgaaagaaagcggtggcataaggccatgctgaaagtgtgcgtccctgacgacgacgttgttctgtgacagccaccgcctgcatggcggcctgttgttctgcgctgagggggatcagtgcccgtgaacgtgcgctcatgcctgacctccttctgccatcaggatatggatgatgtcgttaacactgtatccctgcgcatccagtgtcgcggcaagcgccagcgtgtgactgatcgcgacaggcgtgaagatatgttgcacctgaacgacggcgaaaggctgtccaccaccattcaccagaaccagcatccagagctgagagacgtctcccggcgaacataatgccaggtggaaacgttcgtgggctggcgtgaaacgaacctggacggggaaaaagcccccgaactcactgccatactctccgttcatcacccagttagccggtgcgtccacttcacgcatcacctcgtgagtgagattacggcgcatatcgcttcccgcagcacggatatcttcatattcctgtgcgttcatggactgcagggcattcagggtcagttcagttttcatcacggtatctcccttgctgccgccccgtctccggcggggcggtgtggttgttcatcaggcggcatcagccaggttagcggtgtgttcagtggcatccgtctgtggacgtggtgcacacatccagccaggcacccagcggttgtctttcatatggaactctgcatgttcagccgcatcgcctttcttcattttctccgcgtcccgtgcggcaccggacagtccggcctcattcagggctgcgataatctgcggctttttcaggtgtccgaagaagtttgcttttgtcggctgccaccagtcgcgcatgtgaaagccgatggcggtttccagcgagtccagcggactgcgtgacgtgtgaccacactcgcgggtctggacaccgttaagactgcacgcggtacagaaactgagcagggataacagcacctcctggctaagtgacaggaacgtcgtcatatcccgttcccatccttccggcagcagggcagcaaaacgagagtgttctgccatcagcgccatgaatgcggcaccttccttccctgacggtgcatcgctggtcagcgcataatgctcacattccaggcgaattctggcgggactactatgcgctttgctgtcaaacacattcaggcagagcgtccatgccagcagtgccagggatttgtccggttgctgcatcagtgctgcctggactgccagcgtgcgctctgaggtcaatttagtcagcaacggcagactaatttcctccactgacgcgctctccagcccctgttccgtgcggtcagcgtcgtcagccacatcatcctcactgcgcaactgcacaccacgctggatacacacattaccgtaacgccaggacaccaccacgccacttccggcacgcatctccggcgtccacgccctgaccttcgccatgcagtcaatcagcttcatttctgctgccagcaggtcagattcctcacactggttttccagcgagtcgtaacgagccatcagttcgttcagacgttcgtcttccgcctccgtcagcaccgcttccggctccggcaggttgcggtatgcccgggcatcttcacggcactcaccgacaggctccatgcgtccggcgcaccattcccagccttcggcttcccgaaggaactctgcgacagcctggagtttttccagcagggcggcatcgagcgccacgcggtcgacataaccgtccccgtcatcgctgaacaaatcggtgcgcagttcgtctggcgagaaggcatcagccccccacgaagcggaatttactgttccccgccaccgccacttcactttcggtcaccagacgacgaatggtctgtacttccggtttaccgccccatcccgactggcaggcggcttcaaacacctgcacctgacgcgcggtgtcgttctccagcgccagcgcctgacagtgctctgtggtgatgcggtcttctgccagcgcatcgaggataaccggagcaaggtctgccagtttcagcattcgctgaacgtggcggggtgaatagcccagcaaatcaccgatttgtgcaggtgttttgccttcctgcgccattgcgcggaatccggcaatctgttcggcagggtgcatatcccgacgctgaccgttctcggtcatcgatgcggcagtcgccagctcctgcggaatgaccttcacgcgtacaggccagtcagccggaaggatgttgcgctctgccagcatgttgagtgctgccagtcggcgaccgcctgcggcgacaccgtaacggtcacctggcagggcatgaacaaccagattctgtaacaggccgacacctttaatggagtccgccagttcgctgacggactccgcagaatacggcaccgtgcgcacattcagcggtgatttaatcagtgaggccagcggcacgctcacttcctccgtctgcgccagcagggcagacaggacagtttcctgcgtttttgcaggtttacggcttgctttacgggtagattttggttcagactttgctactgacatgactatccccttattgtgtagttaatgtctgccggacgtgatccccgtccggcacctctcttacttaaggatcccgaaattccggatgacatggttcatccagtacccggcaccgtcctcaaaattccaggtacgccagaccaggccactgttattgcggacaaccaggcgaaaatgcgctccctgatcatcctcgataaagacattccggtactgtgcggcaacggcttcagcctgttcgcgggtaaaggagccgtcaggcagcccctgaaatattctgaaatattcgctcatcctcatctctccggtgatgccccgcgcagggcggggcggttatcacagtcaggccagtcagaacgggatatcgtctgaaaacccgtaatcctccccctccggcgtttgcggctgaggctctggctgcgcggccttacgtccacggcctttcgttttcgcgccaccttttttcgtcgcgtcagcactctgtggctgaccattctgctgaggcttcggttgcgcctgagcgttctgctgtggtgcactccccagcatctgcatggtgcccgtggtcttaacaagaatttcagtgacgtaacgggtgataccgttatcttcccagctacgggtacggagttgcccctcgatgtagacctgcgcgcccttgcgcagatattcaccagccacttccgcgagcttgccgaacagcaccacgcggtgccattccgtctgctcccgcatctcccccgtctgtttgtcgcgccagctttctgacgtagccacctgcaggtttgccactgcgcccccgttggggatgtaacggacttccggatcattgcccagacgcccgacgaggatgaccttgttgataccacgtgcactcataagaacctcctgactgaaagatgtgagataaaccggataccggcgacgggacgttcatgtgccccttcagaggagcgaaagctcctcctgccgtccacttcacaggggtttctccccgcagtggacctttccgatgggggcccgtttaccgcctcacggggcagctgtccgggggcggacgcaaaattttttgccggggttcatggctaaaaattttgtggccggtgcatctcaccctggacagatggaacgggagggggttacgtctgccccccggaaagtccacagcgggaaacaggccgcaggagtggcggcaggagggaggactgctgcgccatcaggcgcagtttcctcacacaccgtcaggtgtgcagggagcgcaggtcacggcgcgacaggggcggcgcgaccggaacggtcgctgcaagccgggttttcacgcatcggaccgtagcggca

SEQ ID NO: 859 - DNA, 39385 bp, Escherichia coli
tgcccgtggttatgtccccctgaacgttgggatgaagggatcaacgcgctattactgggatattcgtttagcggggctaatatagcgcggcgatttttttgataccgatttgcatttcatttgataccgctgaaaaacgccgatacgcaacttatttgatactaaatcggcgcttttcttttgggttttagaatgagtttttaagcgctcattcactctctttcaaaccagttttaactgtttggggttttgggtaaggctggactttgaatagctttatgttgaggcgttttctggccctcttgttcagaaaccggatgtaacgaaactgtcggaacttatgaacactggctctgtcgatattagccctcagatgttcacctcgttgtccgcctcgtttaatggcattcctgcaaatctcgtgataccactcgccatcaagttcatagaatgttgattcatggctgcctacataatcaaaattgcttgcctgatacacgacaccaagacagccacaacgctcatctgcaaacgactgaacccactgtacctgcggataaagctgtctgataagtttgagtgcgtaactgatggcccttgattcggagtttctcggcatacagtcatgcagccataaccggttaagctccatatattcgcggttctgcgtaccggttacgacgcgcgctccactgtttggattaagggcataaccccattgcattacgccaaccagctctcgttctgaaaatatacccagatgaaggtaggagttatttacgaaacggtggctgtaatgtttattgacgatgaccagtcgggccagccagcaacttattgtctcaacccgtaactcacgggagccataaccgacgatattgtcgttatagagaataagttcaggcgtgctgatgatacgggatgtaacttgttttctgttccccacgacaggatttccttgtgtatgtggggtgctctgtggcgctcggagatgtgatttgattgagggttttacagcgcggacattttacttccagataactgaaactggcccgtgccagtaacttgttgcagtgtcggcaccgtatgtttcgatacatggccgcataacctcctgctttgttgatgatatctttctcgcctaatcgatcgacaaaaacgatcgattcgatgtgtttaattgatacaacaaatagattgaaaagtcatcaacaatgattcagggaggtgattatttactaaaagaaaacgaagacttagggtgtgaaaacgatcataaaatgatcattttattgactttttatccagtgaaggtaggatcgcgcgcatatgtagtatgtttcaaatcaacaggatactacataaaagggaaacccagcatagctggaactatgctgggtcaatctgtaaaaacttgcatcaatgctttacttcgagctcgtggcgtatcctatgatattccccggtctcctgtaaagcagagatatatctgttcaggcaggaaaaatggataaactaaccacagacccaaagttacaggctgcgcgaattgcagctgatattacaattgcagcaatgacatccaccaggggtaactttacctcttttcatacagcaggtgattcatccgctatgcagttatggaacgcgtgcttttctgatgtaattcgtgcaatcagcgagtcagttgaccttcgcgaaccgcaaaaatagcgcatcttggggtacacaggatctgcatagctatccacattgcggtggcgaagtttcgatcctgtaatgtatcttcatcaagtcctgaacgtagcgcattgataatttccgcgcttaatctttctaggcctttggtatcaggttgctttttattcttgtccatgattattgtcctctgattggtatataaagcgcccatgaaaataaaaccgacaggagaaactgccggtttgtattgttacatcatggtgctgtcagttccgggctgagccggttctggttgctctggctgcgcgtcggttttcggttcattatcagcatcactggccgctgctgctggcccaataagtttttccagcacctcatcaacgtaagtgtcgatttgtgcctcaaaatccttgcggacctgcgctttcagcaacttatttacttcaccggaatacagtgcctgttttaccaggtcttcagtgacggtgcctttaatttctggcatgtatatcctccttatgcgggaataaagccctgcaatcagggctgggtcgggtcttttgggagcggagttgcctgcgctgttttactgagtttttcagctgctgcgtcctcaattttgcggcgaacataatttctgatggccttataaccaccactcaccagatataacgcacatactgccgtgcagaaatacaataaaataagctgtaaaaatgtcatcatccctcccaattattgacatggtgttgacaccggtaatatctgttaggtaaaaaggtgcactgcattttttgctttggatataacgatctttttgccgccggtttcttgttttcccttaccggcggcatttttttatcctgcttacgcgttattcacttccaccacgatactgtcaatcagtaccgggtaagtcgcatttttagtgatatcggtcacgcgcaacttgtctgccgtaaacgtgccgaccgaagactgcgacagcatgaatggtgtcccgtccttaccatcaatgaccggcgtcacctcaatactgttgttaccggcaaaacggaagcccagcgtatgccattcgttattaaatgcgccgaatgaccccaacttcgtgttctgcgccgtgtttcctttgtgatacatcacgttaaggtctgtggcatcgctctgtacgtagaacgatgccagcaggttatgaccggcatttccttccagagtaaccccttgcggcagggcagaaaccggccagtacagcgccagtgcgtactgattagccgtaagcgcgccatcgagtttaaaacgacaactgacaagaccacctttacccagcaggtccgcaccattaccagcatcatgctcaaggtaccagggggctcttcctgtttccttggtcagtttcattgccttacccccgctggctccggcatcatccacgatttgagccttgccacctccggcagcccaaccctgtggtgtcaaccgtccttcagactcagatgcccggtaagcaaatagcgtactcatcgtcgtggtgtctgcgggtggcgtggacggttttgatggtgtatcaggtgacggcttctcatccggtggtgtcacggtctgcccgcgcatcagttcagccgtgcgccctgcatggagcataatagctgaggccagacggtctgaaatgacgcccctgcgtgcccatgagctgaaatggctgtcacgctgtgtcgaaacaaaactgccctgggttcgggatgctgcaccgtaatacccgacagccacaatatccgggtcttccgccggagcattcgttggcgtgctctgtccattctcatccgtcaggaacggtacaaagaaaattttctgtgcttccttgcctttgtagccaccgtatactgcctcatatttatcggtgccagcgtttttccagtaatacgtggtatcaccgcaaatccacggcaccgtggtggcatttccactcacgcactgcgcagcaagcggagccaggtcagttctgaactgctgaaccatggccgtgaataaactattatgctgctggcttcctgaggcaaggtctgcctctccctgcatccagaccacagccagaagtttgtttttcgggtttttcgccagcgcgactttggtgcggcttaccaggtcctgatacagaggtttaccggccccccagcgtgaagaatcagcggaagcaccgctggcctcactgaatgagccgtcggctccagtggtgaatgctgacccgccacgacaacagggcaccagaagtatcccggcattctgtgggatatagggaagcagttttttggcaatatgcaacccctgaccgacagtcccgtactggccttttgccagatcagctttcgggtggtttatcccgctcatatcctgaacatcatgcaggcagtggtctgccggaatgatgtcgttgtatgtacacgacgtaccgttgggcgttaccgtactgcggcgtgccagttgcttaatgcgtgggtccgggcggtcaaacgaatccggtaacggcagcccctcgccgtaggccatgccatttgactgacccgcgagaatgacaacaaagtaatattccggctctgaactgctgccattcgtgctaccggaaggcccggcgttatccggtgcattccagtcggagggcgtgagcgttccggccacgtcagatgtgattggaatgatgccagtcacgcctgaactggtgatttctgcactgggattaccggataccggcattacccataatggctctttcgtgctgaagcggatcacgcagtctgcgaaggtgatcccccctttattacccgaagggcggaaagggctttcaataaatgccaccgtgccaccggcaaccttgactgaaaactctccgggcatggcggagagcattttccacttggagtctgacatcgtcttttctgcctgtttctgaattaaacagagtcagaatagcgaccgctgaaaaatatgtgttttgcggaaattcaaaaaagcgtcacggtacttttggtgacggagctggtgaggcaggaaaataacgataaagggtggaaaggccaatatcaaatatcagtgcgatttgtttacgggactcgccattagccagcaaacgggcgatttgctcccgctctttctctgtcagtttctgaggtctgccgccatgacgcccctgagcacgggcagcagcaagacccgcgcgtgtacgttcaataatgagttcccgctccatttccgccagcgcgcccattatatggaaaaagaaacgtcccatgggagtggatgtatcaatattgtccgtaatgctgcggaagttaacgccgcgttgccggagttcttctgttaaaaggacaaggtgctgcatactgcgtccaaggcgatccagtttccagaccagcagggtatcccctggccggagtcgctttaatgcgcgtttaagtccgggacgctcccttgtcttaccgcttattctgtcttcgaaaaacagctcacatcctgcacattccagcgcatttctttgtagcgccgtattctggtcatttgttgacaccctgatatacccaatcagcatacgatttccttattataaaaagccggaattgtcgcatgaggaataaaacagagttaatcctggctttcctgaaaacctcggtttacgggaaacggtgaataaggcggcgaatgctctgccatcggacggcaccgccgttgccgcgaatagactcgccaccccaagaaatattaatggggttccctttgacgggacgcaggacataaacatcacttctggtataacacagcaggatgcggattcccgatatatccaggatatcaggctgggagcagagaacaggcaggtaatgtacggtggggcatattactctgcgtacggtaatgttatggcaggcctgcagattgacagtaaagttgatgcttcaaacgattttatagcattcagacccctgcaaaaattagtcggaggtacatggattacggtatctcagttataaatagtcagtaaataatatattttaaaacagatttatttccaggaggattttatggaactaaaaaatataacccgttattatcctgaaaatatgccatatggtaataatgttcagtatttccagagtgaagatggtaaggatttctacgaatccctgccattattcaccaaaaaatataaactttgcataacacctgacagcggcgttatctgctcaatatcacaggacgcctcggcgctgtatcctgcggggttttctgtggttgaggtcgatgaactccctgaaggcacggatatttcaggaaactggaagtttgataatggcataatctcccgtattccggttaactacgcaagaaaactggaagcaatgcgccagtcatatcttaatcaggcatatgaaaaaattaatgactggagaacggagctacaactgggcaccatcagcgatgaagacagagcagcacttacccaatggatggcatacatcagtcaggtgaagaaaatggaactacccgccattaaaacagaagctgaatttaacgccattaaatggcctgagcagccacagtaataaagaaggccggaaggccttctgaatatcattatatacttgcagccgtcacccatgctccatttaacagatactgcaacggccggtaatacacgccgccgacgttatctgccgtattcttaccgacatcctgtactttaattccggtaagaacattgccgccccccagattcagatcccagctttcccatgttccgggcatatgtgcggtcaccgaccccagtcttatggcggttactgttcctgatgagatagtgatatcctgcgtcccgtcaaagggaacaccattaattgtgtgggcatttgccagcctgttcgcggcaacggcggtgccgtccgatggcagggcattcgccgccctgtttaccgtttcccgtaaaccgacgttatcgataaaagcccctttatccggaatgtctgcgccgttctgctccctgcgcaggtaacggttatcaccttcgcttttgctgtaaacatccagattattacgggcggttcccttattctccaggtcggcgagattctgatccttcgccagggcattaacgtcaccgggaccaagactgttttttgtggcaagcgtccccagaccaagataaccacgggccagacgctgggcctccgcaccggcatcagcaatttctttcaggttatttttccgggaaaaagcattcgcagcgataatggctttaatggacagcgtaagctggtttaactgcgccttatccggctgaatactggcttcagccagaatattcagcagttcggcctggagaatattcagccagtcctgaccaatccagctgatacctttttgtccgtcaccttcagtaaaccaggtggtggtattactctgcgccggtgccagcgcaggcatattcgccacgccggaattattatcaacatgaaacattaaatagtctcctcttcatggctgtttgcatacacgtaaataaacgtctgccatgcaggcttataacggttcagaatacattccagcgcaccgccttcataaatacgcagcggcgtgagaatatcatccagcacattcatattccggtagccggtttcactgttaatcgtgacaatactgacccactgtgaatccggtgatggctgaatatctatttcataaccaaactctgccgcaaaccggatataaaattcacggttaagagagggtttcatccggtatttattcccggcataacgctgacgctcctgaatggttgcgccggtcatatcacattccggtaaccccagataacgctcccagtcttccagcagcagacgggatgaatcaggaaaacgttctgccagcatctggttaccggtccaggaaacacgctccgtggaatgactgaggcccaggcacaaagccgcaagaacggatgacggccgcttatcccatgccagcccgtcaggcagcaactgcaacagggcgcgctgatgcggggtcagggttacagccatgtgatttctcctaccgtcagcagctcactgtctcccgcctgaactgacgtcagcggactgcgcacttcaaaatcctccagatttttcacccctgccaccgcccgccagaaagacgacggcagaaccagaccgccgggccgggattcgttatacaacaggtcggtcagcgcctgttttacggccgcctgattctccggtgttttcgggatgatcctgatgctgaagggcaccggcttattggtcagtttaaacacggtcaccgtcggccccagaggctgtccgacaggctggccggtcgccggatcatcatgactgcggatataatccgccacccgctgaacatcaccgtcaccggggaaaatgtccgggttattatcctgaacaaacgttacccccacgctgcccgcctgcggccattccgggcggcaccatgcccgcgtcacgcccggcacttcacgcgcccagcgttcaaaatcatactgcgtgccgccggacggtggattctgcacccggaaaaccagacgggaaagcagctccggcacggtttccacatccgcaccaccggtgatccccgttccggtcaccgtggccgtctggttgatccccgcctgcggtgtgataaatgtcagttttgtccctgccggggcattccccgcacgaccggcactttcggcttccacactgacattcagcgtaccggccttaccggtcagggaggtggtgatacggtaaaccacaccatcacttcgctggagaagcacaccttccttgatccccgcatccgtggtcagcatcagctgaaccggcccgtccccccgagaggcaggcttacgcatgacgccccagaatgcacagtgtttcagcagttcggcttcatcggcttcggtcgggatgatctgacgcgcaatccaggccagatgctcatgctcctgagcagataaccctgcctgagcgtaagcaatggcattcagggtggtttcattcacacccggctgcgagccgggcaggcgctggctgatatcctgctgtgtctgcgtgattaactgtgccagcggtaaaggctgataaggcattactcccccttaagatcagcataaaaaatcatgggcctcactgaaccatcaggcagggttatgcgcaccgaaagcgccagccgcgcgtgtcccacacgttctgcatgacagaccacggatgacgccacgccatcctgactgagccagcccagcgcctcatccgcgtaagcacgggcacggcttatcaccgaggccagcgttttttcccggcggagaagccacagacgggagccaatgggacgcgggcgaaaactgtctccccaccatccccggcggtcacgcgtaccgtcagggatttcatccgatgccagcgcccggcggtcagtaaacagcgaaatcagaacggccgtcagcagactgtcatccgtcagcaggtcggcaccgttcagttgcagcgaaccgcacccctgatcccatacaattgcaatatcagccattctccggcgctcctgtcttactgcctttgccgttatcctgatgcacatggccggaataggtgatcccggcaataacggcatcagacatcgtgaacagcccgtctgatttacctgtaccatcaagcacgaaattacccttaacatgcaggtttttatccaccgtcacattgcccgtaaaggtggcctccggcgtatccacccgcatcccctcatcggcgtaaatctccagcattttgcatgtcacaataatgcgaccatcctttgttaaccgtatccggtgcccctcatggtgatacacccccgtatctccggctgtgagtccggtcgggcggctgcgccggtcttccaccacaagcaccacagtctgatcccgctgtccgcccagacaggcaaaaaaggtttccgcacccggcaggggaacgctgatctgcccgtactgctggggacgctccacatcatcaaaggtttcgccgtccatgccggtgagctgcacattctgcattttcagttcgtcatgtgtgccggtcagaacgccccggccaaacaacaggcgaataccgcgcgttaccggggcaatcaggcggctgaacacttcatcattcatcaaagctgatcccctgttttttcatctgctggcgaataaaggcatcaacatcgtcaccggaaccaccccggcccttactgtccggctctgccggaacgataaagccgtcacgcggtgccagtaccagccgggtgacttccccgttatgttcatcaagtaaaaactccacctgacagaccagcagttcagtctgttctataccgaaacgcagggctgaaacaccggtcagcagattgacatcccataaccggccatcatcccggaaccagccacgcacggtggcagaaaaccgttctgaacgggcaatcgcacggcgcatttcacgcagggcacgctgccgtgcaccggtggtgtctgtctgttgatcggcgaggatgattttcggccggtagcggccgatctgctcatcactgatgacgcccacaggtgctgccagacgggcggcggattcgctgtctccccgtttgccaccaccgcgcccgtgtccccggacacggtattcgctgtatcgtcctcgccagtccgtgttgtaatcggcatcaagcaggttatctcccagcaccagtctgtccgtctgctggcttcctgcctgggtgaacaccagatcgccgtcagcattactggtcaccagcaccccgcgatgccgggcagcacgggtcagcgcatccgccacggtttctgagttttccagcgtaaaagagctgaaggggcgtgcagccgtgtcgtcgttaacctgccagcgcacggctatcccgaagggcgcacataaatctgcggcaatctgtgccagcgtccggttgcgccactggctgccgggatggatggcggcacagtccaccaggtcgccggttttatcccgaccgctgatgctgatctgatgacgggttgcactgatccgctgactgacctgatccagccagccactgatgaccgtctgcccgttaattctgagcgtcagggactgaccggttcgcagggctgaggggatgcgctcaccgggcagcatcagccccagttcaaacgacccggccagatgctccagcgagcgacggacgctgaccgtcagccagccggaaaaaatctcaccgcccagatacagttcaaccctgctgctcactaatcacctccactgaatggcctccgggaatgaacagcggatcaacaataccgttacggcgcacaaaacgttgccagccggtactgttcccggtggcacggtacagggtcaccagtgcaggctcggtggtacgtacagtcactactgttgcaccgggtagctgaactccccgtgtattcagatcctctgtcagtgccagtctggcatcacgaagcgtcagcgccgtggcggtatacccctgcccggacagtgtcatcacctgccgttcgagcgcttcgcttaagtcacggttaatgcgctgaagatcaactgaactttccagccagacaggccaggtacggtgggctgcgtcactgtccggcagggtttcctgactgagaacctgatccagcagttttcccacggtctgtgcctgggccaccacggcagcactctgcattaccgcccgtatcagacgaatattcttttgtgctgccggtgtcagaccgatgagagtctgcggattatcctgctcatccagcacgtaacgcagggaagataatgtcctgtacagttgcggcattccctgagagacggcggatgtcgtccgaccgatactgcctccgggccgggtattcaggcctcctgaagacagtgacggcagcgatggcagggtgatcagggcactgaaaagccccgcaaaagatgaggccatgcgggaaggtgctgtcagtaatgccgtggcattccctttcagcgccgtgaacgtggcagtaaaggcactgatatcctgtacaatccccatgccggaaacggcattttccagggcggacaccttatcgctgatggtttcggtcattgcctggacatcgtgcattccgtcagaaatcaccgtccagcccgcttccagggtttcaaaaaccttcccgagcgcggtggtactcttctgctccagaatggcggccgtgtcctgtgtgacagcaggtgcggtatcatcacttaccggcgtgacattaatggtgaactcaaccacgccctgttcagcagcgttataacgactttcaaagctgtttatcagcacatttaacgtgccgtaatccgggtgaagcagctccccggcaccgggagcacgaagggcatcacgcagacgatttcgctgtgtctgaacatcatcccccatcacaagtacactgaacgtaaattcagccagtttaggtcccagatcgtctgcaccaccggtttcccgtaacggatactcccgacggacaatgtttcgcccgccacgttcgcgctgctcacgccagacgaggaacggcacaccacggaacgcaccacgaccgtcaccagaggccataattccctccgttccagacattcacatccagtccgtgaccggacgtgtcatcaatatcaatactgcgagcctgccacccttccggggcaaccagctccacacgggcagaggctttttgtaccgcctgtccactgctttcatcatcactgccccgtaatttctgccaggcttcagtcagccatccccccagatagttaccgagatagctgcccaccgtagaaccaatggcaatccccacaggtccggctgccgcccccagcgcaccaccggcaatactgcctgcaagagagccgaccgcttctcccttgtctgtggcactggcgctgccatccagcagaaccggggctgccatcgcgccagcccacagggcacctccacccagccggccggccagtccaccggcactgcggaaaaagccggagaaacgccccagccccatgcggctaccgacagacgaaagtaacccaccggcgcgccccatcatgcgcccccagaaccctgccccaccagaagagggagacggtggcactggggacggtggcagggggggcgtgaccggtcttccgcgccccggtccgcgtttcctgcggccccgcccctgacgtccgcctgaggatgtatcggtcgcgccggtgccggacagtcctcctgtgggccagtttgttacaagtactggctgaacggctgccggatttaccccggtaagaaagtttataaaacgttgccctcgtccctgagatgtgcctggtggtgttccggccggaggagagcgccggaaaggtgaggtcaggaaggccgccgctgataatccgtatcccagcaatgcagcacccggacgtataatccccgttccgacagctcgcgccattttcagggcacgggtggcgagatacatgtacagcaggtatttcgcggcggtctgtgccccctgaccaatgcgatccagcgcatcaccatagcccgcatcccgcagagcctgaagcgtgtcgcgtacctttctgatcgcctgataaaaccctgtcactgcatcacgggcatactcaaagccctggttcatggctgatgccgtgctttccgccagggaatggtaactgccatcagatttggcactgtcaacccatgaaagaaatcccctgagattacccttcagtttttcaaatggcccactgtccatcacatcccgggcaaactggtcccagacgtcacccatcatggccgtcaggccactccaggaattcattgcgtccttttgtgctcccctggcctgttccgccagcgtctgaaataacaggcgaatactgtccggcccaagcagccctttttcaccaagttttctgaccactttctggtccacacccagacgatcagccagcacgcggtaggcattaatgccgtaggtggcaagaatatttgcatccgccgcctgaatactgcctcttgcatacatctgtttcagttgcagggatgccccctgtgcatcggacagtgaccagccgcccacggcaccctgatcctgaagcatggtgacaaaatttcgggcctccctgtcactcataccaaagcccagactggacgtatattcctgcatgacgccagccagcccccaggtggtttccttcgcattctgtattgcccacctgcggacatcatcagttttcgcccgatcccctttgtaaagggagttcaggcgaatcatataggtttccatctccgctgccgggcgaataaatccccggttaaagccatatacagcagcaccaccggccagcattccgtaaagattgctgatccgcccgatggtgccggtaatactgccctgaagacggtcaaaatcagaagtgacatggcggatactgccccgcaccccggccagcgtgcgctgcatcctgcttccgagtacatctgtttcctgcccggcacggcgggcagcatttcccaggccacccagccccgcctggccggagcgtgagaatgcccccagctcctgtgaccactggcgggatttggctgagatattgccgagcaaatcaactatcagagatgctctgagatttcgggccatacttactgcttcgttctgatgattttttctgtctgtcggcagtgccggtaaagttgcgacagggggaggttaagcgcccattccggaccgctttttgtcaccatccctaggataattgccgcttcttcaatctgatcccgacactgcgcctgatcgcccccggtcagctgccagctttccggcaagcgcggtatccagcaggctgaccgctgccatcaggcgggagagatcgcgctcgcttaactgtccaatctgacggggtgacaacggaccttcaatgtctcccactgcggcaatctgacggcgcagcagtgcaacaccgcgtaacgacggagacgctatcagcatcgggccattgtttgtctccaccacgcgctcggcttctgcttctgcgtcaatactgtctttcgctgtcagttcccggaacgtgacacgatattcacgggtctcaccaaacggcagaccatcaagcagatccacatatccctttgccagttgctctgtcagcccggcagtgcgtggatcagccccctcaagtgcttcccggattgcctccatcacggctgcctcggaaactgccgtttttttcttacgtgtggtcattttatttttcctgatcactgaacacgggtactggaggcgctggcgaacttcacggagatctccccgccaccgtcaagcgaggccggttcactgctccaggccttcgtcatcatgtggacttcaccggtatcggccacgaactcaatcgtgaccgcagtccaggtgttgatttcatcggcagccggtgaaccttctccgccagccggaaatttacagtccagcgtcgcctcacggggtttctcgcgatagccgtagactttcgcgcctttcaccacttcacgctcaaagccggacggggagaacgtggctccctcaagggtggcgtactcctgtccgttcacacggatggtggccgtgccctgatactgttttccgctcatgccttacctcacaaaatgaaacggatctgcgcggccatgaagcggaactggttaaccagatccggtgtacacatcacatccagacggttacggtcttttgtgttgcgctccacgagcagattctttttaaaggtgtccagattttcgaccagtcccagatccacccattcttcccccagtgcaatcagctggagcgtcataatctccggcgtcacgatattctgaccgggccggacgggagtaccgttatcggccagtttgtggcgcgggaaacgctgcgtgataaaggtgcgcagagaataacgcagatatgacagggtgtagatggtttccacatccagatagctgggatcgctttcgccgtatgcattctgacggtacatcgtcacctgacgttcaatctgcaccacatcagcggccgcgacggtcaccgtggacatgccggtataaagcaggctgtttcgttcttcccgcgtcagacgagccggtgcttcaggtgccatacgggcaggcagcgccagtgtctgtaatggtcgggccggatccgttgacagggagggcgcacagaccgcacaaatggaggccgcccagacataatccggctctggtgctttaggaatagaagtgcaggtaaacaggaagtcattacgggattcaccaaaactggttgccgtaccgaaggtgccggtatgcgccatccagaccataccgtccgacatttttaccggtccccagcgtttcagcagttcatccgccagaattttgagatttgccgcatccttatagggcatgacgatgtagttgtactgacgattccccatccctgagacgctacgggtgatatcggggtttgttgccttctgtgttggcgcgacgagctccagcgtaagaccggccggtgtagtttcaccgtcataatagttcacccgtaaatcatgagctgagcattcaccgataaagcgggcgttaacccccatgctgcctttaagtccttcagcattatcaccactgacttcagctgcgatagcagtgaatggcgcatcagtgtcagcgttaatgaccttaaccagctcttccacaagctctttacctttttccccttactgacgggcaggaggtaacggcgaccgccgatgtaaacacttaataccccgtctgccaatgctgttccaatgatattcatcacgcatgccctggactgacctgttccagccccctgtgcaatggcatataactctgtgtcagggttaatggcgataaattcctctaccatcagtgcaatcatggaacctcgcccccagagttctcttgcttgtgaagctcgggtaatacgtactggtacatcaagctgaccgcgcccctgaatggtagtgtctttcattgcagcctgaccaaacaacagtaccgcctgacgctgtggtggagtgccggtcacggccattgaattattgatttcaatctgtaccagcggaatgcgattgttatcgccgatataatcaaagttaatcatcaggacgtccccttatctgatgctgcggttttttcagccaccgccgcagttttttctgctaccgctcccgctggttttgcagcctcgccggtattagcagttgtggcagccggggcaggctccgccgttttatccaccacaatgacgtcgccatcattaagacggcggcaccagaacggggtgaagggtttctcttcaccgtcctgtgagagcggagtcatcgtgtcgggatcgcgaatcaggcatcccggcgcaggtttaataaaaatggttgtcatctgttattcctctgacggtccggcgttttcaccggcggcagttgcaccaggcagacggatgtgtgccttaaactccggcgtgccttccggttcggtaaaggtttcgtaatggcgcaggaaatcatccagcgagctgatatccgtcagcgggtcgatcatttcctcgcatgagaaatacagggcgtacatcacggcaccgctgcctgcctgcgtttcggtgtaaccgttgaccgccttttcaaagtaaagcggtgaggttttttctgctctgaagccgtccagcacggtaatcaggcgggccacaatctgataaagcccgggacggctgacctcacggccattgagcatgtcgccgatgacgtagaacacccagtgactgaccagacgcccacgggtacgcccttcaccggcacccagccaggcaacatagatagccggggcgttaatcagcatggtgcgcagtacgctgtcgctccagtcgccgggatgtgtgtcaacagacaccagttcattcccgaaatactcacggatacgggcgatgtacgcctgctcggtttccgtaatcatataaagcccttctggttgcgcccgaacaccgccgcatcagactgcacctgcggtaaatccccggattcaggggccgcaccgtctgtatccacgccgaccggcacgttaccgttcatgacatctttcagccaggccagcgcctcacggtaacggtcacgcgcctgatcggatgcccgctgatcgcacaggtaataaaaggcaatcgtgcagcaatgctgaacaaggaccgccggaaccaccgccagcggcagcgtgtaacgggaagacagatagctgtcgataagggcagacgcgtccgtcagtgcccggttcagcttgcgcgtgtccggttcatccgaacggggcacggccagtaatggcctgagcaaatcctcgcggtaacgtgcccgcatatcggtttcggtggcgtaattcatgcgcgcgcctttttcgcctgtctggcgttattgccggtctttttccggggagcatcctgtacggtttcggcttcggctaaatctgcaccggtctctgcatgaaccacacccgccacggctcccgcatcatcaccaggcgtctgtagtattcgtacagtgaggcatggctccgcttccagtcgggcaagctgctccggggtgacgtcaacctgctggcgtccccgcatgaacaggaaccccgcacgacgaaaatgcgtacgactgcaacgcacttctgccagtaccgtgacaggactgtcaccactgacctgaaggcctgaatcatctgttgctgccacagtgtgatgttcattcatatttgccctccgcaggggccgggccgtaagcccggctcaccgtttacagataatccgcgacaaccagctccagcttgcccttcatctcgttagagactgtggcgttaccgtctgcgaacagctcgcgctccagcagctgcaccgcctgtttttccagcgaggtggggacaacaatatgggtgggtttgatgccgagtttgcggccaccgtcagccttaaagtcacgcatggctgaccagccgtgccacagcgcatccagcgtcagcggtgactgcatcatgtaggccatctgccagaagccgtagcccacattgcgacgggcggaagcaccgaacacaaactcgttatcagtaaacgcacggccttcatcgacttttgtctgggcaaccagttcggccttgcggcgatcctgataaatcagcggttttaccgcgcgggagcagtcaagcagataccaggccgggccgctgtaatccacctgtgcaccgacagagccggtttttgccacaaacatattgctgaccatctgtgcatcaccggagccatccactttggggtaaacagggtgttcggtatcaaagaagttctggccgtcatagcaggccgcattcagaccatcacgcagtgcagcaaagaccagttcatccggttgtgccgccgcagcgcgccccatctcctggaacaacggggagtagatgccaagattgtcgtcttcaaagtcatcgcggctaatggcaacggtgccttcaaaggttttgttcacgatggcgtagccataggctttcatcttctcgatgacgcgggagccgatccactcacggaactgcgggaactgcccagccagccgtaggtgttggatttcgacgtggacggtacggtcatcgcaattttctggtactgagacggagccatggacatcccggcctgaaaatcagaacggtagcccgtcatcagggcggtgatcatcgccggtgtgatcggggtaggcattattgcatttcctctttcattttcaggaactcggcttcggttttacccagcagatgggcggcggcgatatcttcagccgacagcgcagcggtggcggtctttttatccggcacggttacggtgtcggtctgaagagtggtcagagccgcaaccggctggcgggcgtcaagctgtgcagaaagtgccgcaacaccaatctgttgtccgagtccttccatgtatccgcgttcgcttttgaaaatgcgtccttcggactcggccttatccagcaactgctccagcgtggtgctgccgtgttgtgccgacaacgcgacatattcggtacgcagggcgttatacgtctcaacgggcacgtatttcgtcagatcaatagtgccgccagttggtgtgccttttgcggtttccagctctgccgacaggctggcaacctgcgttttcagggtgtcgtgcgcatccgcacgggttttgatcccggtaagggcagacagcgccgccgtgcccagttccggtgtaaattcgtcaccgtcggccacggtcagaccgagcgccgtcagcaactggcgtaattgctcattcatggaggtgtcctttaaaggagggtttaaggcgttataaaggtcatccgccgacagtgcggcgacaggattcatgccagtcagaccggggtcaccggtaatagccagcatccgaagctcaacaggttcaccggtgatttcgtcataaccaatcaccggggaaaaccagggaaattcgttattgcgcaggtgttcaatggccggagggttccagtccggacgcacttcaaaaccccgctcttcactgaagcggaagttttccggtgaggccatgacaaaaccggcagccggtgccggatgccccttaatcagggtctggtggttgtagtcaatttttaccggctgattgagcgccacaacccgggataccatgcgctcaacggccgcatggttaatcagccagccttccgccggtttttccgggcgaccgtcacgggcctttacccgaccggctggcatgatctgacaccagtcaccgtccccgtctgcggacaggctgatggcattcagaatggcataagcaagtttgggcgtgtttttcgtcttcattccggcagcataagccggtgtttttcggggccggttttgcgggacttcagaaagtgctgacaggggaaaaatgagaaaggcgcttcacgcagattttaaagcccgttaaatacaggttagaaaatcacgacacgcgcctgaagagggtaaggcaatgcgtttgtataccttaaaccattacggcgtttctgtggcctttttaaagcgttttctgatttcgtccatgatctcctgttctgccacctgatcaaagcccatatacggacgtgcgccaatggccgccggtcccggtggcataccaggcaggccaccccactgatgaatggccgcataaggttcatttgatccaatcagcgcccaggtatcgccataatccgtggtcaggcggcgggccagatcgccgttcagtgtcaggattttgccgggcgtgtatcccttacgggtacgccacttgcggtaaggatctgaccagtcatgccagcgttcgccgtccggctctttttcctgttcaaacgccatttctgacgatgacagaagactctccgccacactgcgggccaggtcttttccgccgcccacaaactgaagccgggcaaacacccgctggagacgcgtaacgtcaacaacgacagcggcatcaatggatgacatattgcctccgcataaaggatgaatataaaataaacaggcggtcagtgtacgcttaactggtaaagtcggtgcctgcctccgggtggatcatgtatgcgggttcgacccccgccactgaccgttaatcaatttgtccttccagcacctcaagcattccgccccggatatccgatttcagcttatccatattgataacccggtaagcattcacaatcacatccagtttgtcgggctgacgtttcagactgtacggtgcattaacggcaatctgcacactgccatcctgattttccacgatatacatcagattgttgtgccgtttgtcccacagtaccgcttttggccttgccagcattgccggtaagcgcccgaagtcctccggcgtcagagcgatgccgtcattctgatgtttcacactgtccgcatggagcacatttttaccgctcatcgccagcaggcgggccggtggcgttcccgtccggctttccactgcctgcgcaatgctttcagtcataaagcccagcgtgcggatatcgttaccacctcgccgggtctgcatgatgttttttgcccagatgcggaacgccagctgccgctccgggctgttgttcatctcctgaaccaccatttcccgtaacgccgggcttttcacctcgatcagtttgcggatcagcgcctggtctgtgccgaacgctgccgagccggggttatatgaccagcccacatccggtgtcatggttctggtgccatctgaatatgtggtcaccggcatttctctgacttctccggtctgtttatccacgccagcctcaacattgcgggtggagagatgatcctcaccggatgaaacggataaccccattgcatccagacgggcctgagacaatggccgcacacggcagcggcagttccagccattgggcgggtagtgtgttttccagaacggatcgtcatagcggaataccagaccgttaagggcggaatgcgacgggcgggtacggctgtccatgaccgccacatactgccagaacggatgcgtgtccgtgttgttcatcatctgcgtgtaacgcccggcattgtaagccacacgggtgttcacgttgtaaatcagcgccagacgacggggactgcccagctgcacttcttccgcgttaccgtcgctgtccaccacaatctgctttccccaccatcccagcttttgcaggcgtggcgtcagcgtgcggataaattctttctgtgaaatcccctcatcaatggcccgctgcacttcggcctgtaatgtggtcaccacatccagccgtgccgtttttgctgccgtgaatgagcgggcatgaacatccgcggctgtttcgaaccagttccagctgatatgcgcccctttggcgcggaagtatgccaccgtctcttttgagggaagcgtggcggcataacctaaatcaatctcctgagccatccagcatccccttcatttccgcagcaaacatggcatcactgagcagcgtcatcaggcgggaatcatccatttcacgataaagggcaggcaggtctgccagcgcatccgccagcccccgcgttctgatggcatcaatgaccggctccagtaccgggtcgatggcctcctgtaagcggcgggcaggcaccgcgtcccccatatcatccagttcatcacgcggcgtgcttttcgcttccggcagtctggctgacagcgccgtctgctctgttttttcctgtttttccggtggtgtttccctgtcggtctgagccggttcattgccactctgacggacacggaatatggcttcaccgggcgtgggctgcggaataccggtctgctcacgtatccagggatcagaaatatccatccccgtactgagctgcatcaccgcactggtgatttggtgatatcacctggttcttttgtctggaagcagatacgtggcagacggcggatatcaatagtgtgcgtggtgttcagggcgtacagcggatacaccagatcgcggttcagggttgcagccagctgtcgtaaatcagaatccctgatttcccggcgcacctcgttatgtacctcacccagtgagcgcgcgcctttgtctccggcttccgtggtcagcgtgccgccgagtattgctttggagatggaacgctcccccacgaaatcatggtttcaaacggatcggcctgaccgttcgctgccgcctgaaactccagcgacatcccggccgggatgatcccgcctgtacgtcgcccgatatccatcaccgcccgcatcagggcacttttctgctccggtgttgccccggacgggtatttcccgaccttcatcggcaggccgtacacctccagaaattccgccagatcgcgcacggaatagtttttgaaaatgaacggccagataagcgtccggacaagcccggttgcaccaccgtaaccggtgcgtgaacgcgactgatgcactatccagccaaagggctgaaacgccaccccggaatggctgccgtcacgcagccgcagttcgctcaaatcatccgggttaaggcagaaatgcccgctgtcacgccagcggatggcgcggatgatgtgcattttaccgagcatcccgtgctcaatttccatgcaggaatagcccttcaggatggcatccgtggcgtcaaacagcatggcatcaaaccagtctgcggaatgcagatattcgtcgagcatttccgcgtcctttttctcattcgcgctggcgttcggtggcggctcaatactccatggcaccccctgaatggcaagacgtcgcttgcccagctccgcaaaaaggtgggtgtccttttcttcaatatcagcggccagatcggactgggcaatcagatcgccacgttcagccccgcgaaggcactgcgccgcccggttcggggtgatacccgaagccggatgttcaatataacggctggcaatctgcggaatatccagcgcggcactctgcatctccgggtcaaaggagaaaggttttccgtcagtatcaatgatgcgtcccactaccagcccccccgatcaaattcatgatatgcctcatcgtcatcacgataaccgccctccattgcccgcgaccgctccggtagcgcctgacaggctgattcatccaggatgaaaccctccatgtatgacgcccggtttgccatacagagtgccacggcaaaatcaccatggcggcgggcgttcgcagccgttgcgttctggtccttcgtgcgccccttgtcgatttgcgggataccattcaccaccttcacatggcgcaaatcatcaagcgtggtctgatggcgggcgacgaggatattctgatcttcaaactcggctttcagttttggcatccactcgccgtaccacttcggcgacaacatcacgcagtcgatgatgtccgggccaaaggccagcagtgcggcctctgccagatagccgccgttaccggtggcgtcgaacgccgcaccgaccagcgccggaacgcgggtcaggatgtacatcatcacctgttcctgctgggcatacggcaggttgcgcagctccacgcgaaacacctcgcgctttgccaggagttcggtgatttccagcagcacaaagcaggacaggtcaccggtgcgggcaaagtcttccccgaagctgaagcgggaacggggatttaatttctctgtaagcggttttaaatgttcttcacaccaggttaaaacttccgattcacgcagccatgcggcacggctgatgaagtcgtccggggcttcaaacgtcagaatcgggatgtcacgaatcatcgccatttcaataagcgcgtgaggaatataggcaccgccggattttttcgggatacagccgtattcctcgtcggcatcctcacgggtcggggcgtttttgtagagatcatcacgccatttctgctcgctttccggtgaccattcctgatcggtgacgtaacagatacgacggtacagcccgtccgcaatggcatcatccagggttatgcggtggacgctgtaatccttgcgcccctcgcgggcttcctgaatgtactgattaaacagattatcgacgccgttatgcgtggaaataatgcgcacgcgtgcgccccacatggtaagcgccattgccgccttgagaagctcatccagtgactcgtggaacgcggcttcatcaatcaccacatccccctgaagaccgcgcaggtttgacggacgggaagacaatgcctgaattttgaatccactgttcggaaagcggatcatgtaggtcagaatttcttcttttttatcccgatcccagaatgtctgctcatacacatcagcatctgccagctggttaaaggcacgggagaacagcgcgcaggcagaaatatattccagcgccatctcctgttttgaccccacataaaacacattacggccaccacgacgcttaggctttgcggcggtaatgacgttacgcccggcttccgcccaggtaagcccggtgcgtcgggatttctccgcgatgcagacctgactttcatctgcaaaccagcgggcctgataatccagaaacaccggcatatcaccgggcaaatcaaggctgtccggcacatccacgcccagcagggctttttcaccggacagatcaattttgcggggaggtgtcatttgtatcagtgaaggagacttttctttggctttgttcatcaggctttacctgtcagaatgcttttgattcggaactcaagctcttcagtcatcacgtccacgccactcaactcatcagtgacagcccctgccagcagcgaatgcagttgttccagggatatttccccggcaatgctgagttcagtcaactcacgacacgcttttatggtttcaggaggtaactgtgttgcaagactgaatgccttctgatgagcactgctcatcagtgagcggttatctgttaccacgattcacctcctacgccttaccaagcagcatctgcctgatacggaattctatctgctcgctcatgccatccacgccgcgcaactcgtcggtgacggcgttcgccatctcttcagcaaatgcggcccggatttctttttcacgcttaatgctgcgctcggcggcactttccgcacgctgtgccgacaggaggatgtccttaataaggcgcatatccacatcgctgtcgctgttcagggattcggtggcggcacgcagacggcggtacatcagggcacgggacatctccagaatcagtgccgtggtttcaccggtcggcttatcccccagttcggccatcatggcttttgtctgctcgcgtaaatcacgcagattacgggcaatcagctcattacgggaggcttcccggctgatggccgccggtgaaagctgctgctcttccggcaggcctgcctcacggatcagacggttgatttcctcgcggatctggacctgcgtcaggcgtttttcacgcagcatttccagcagcggcttacggatgctgtcggggagcaaatccaccttgcgtacacggccacgcgtcggcttatccatcgttacccccttgcgcgtggtttcttcacacccggaacagtggcacgaccttccgccacatcctgaccccggccggtcagttcagcgatgaaataaccgttaacaagcgtgcgcttacgcaccagtccctgctcagcaagccaggcaatgtgggtgtgaacggtgtcgcgggacacgcggtggccgtaatcatccaggcagtcctgaagcacggattcgcccagttcgccgttgtaatccgccagcgaccgcagaatgacaagacgctgatcttcagtaatgaaatcactcattgtgttttttccttacagcctgctccagcagcagttcgttctgatgagagacggatttcagggtggcgttggtggcctttagctcaccgcgcagggtggtgatttcgatattgagtctgttcacctcctgctgcgtgggcaggccggaaatccggctctccacccgctcaacccgatcggagagtttttcaaaggcctcgcgggggacgaaggttttgcgcatcagcgccatgaagatccccccggccgtggccgttgccgacaggatcggcacaacataatctttaacgatgctgacccacatgaccggcctccatgatgttctggcagttcacacaacggatggcatccggcacggcaaccagacgggcagccggaatatcacccccgcagtccgcgcatacacgcctgcccggtgtctccgccacccggcgcttacgtgtcagccggtcacaaagggcgcgttctgttgcccgctccatgacagcctgagcacaatctgaatcatccatacctttttccttacttcgtctttcctgccggaacagcaggcgttccggccatatcagtaaattcatgttgtcgccgcgcctccagacgacgaatactggccttgtccacgttgcagttcttgatcaccgccagcagttgcaggttgtaagtgaccgatgccccaaacgtgaacggctccggcgcaggagggaccaggcagtcagccagccattcagcggggatcggaaccggctgcacaggcacgtatttcacagacggcccggcgcacccgctcagccacatcatcaggcacaggaacagaggccgcaggcactgttgccagcgaccggcggacaacgctctgctgctcctcgctgtgctgaatgttctgttgcttttcattcgtggccgcctcactgatttgtgaaatgaggtgcagggtgtgctgctgatttgccagcacctgacgcacctcatcccgctcacgcacaagtacctgattattgccctcaagacgctgcgtcttctggtgcattccccatatcgcggcaaccagtacggcgataatccccagcgccgccatgctcgccccggcaatcagggccggtaagggattgttcaccacagccacagtgccccccgcagcgccacaacggcacataacagcgcaatcatgagcggtcgacagagctggttcagactttcggcaagtcgtagcgacataaccattcatccgccgaacggcgggcctcaaggccggggagtttcaccccctttgaataaatccagcggatatactgcttacaggacgcgggcatctgtccggcattgataaggcgcagaagcgtggagttgcggaagttcgtttcaccggcccagaagatccacgaagccagcgccaccgtctgaccacgggtaagtggcacctgaacacgccggtcaatggccgcaaaggcccatttcatgtccttttccagcagttccagacattcttcatcggtttttgtcatacccggtttcacatccgggccggtatggccgtggcagatggtgggggtgccggtggggtcgagatacgtggtgttttctttcccttcccagtagccggtgtagtgcgtggcaatagtgaacgtcccggctccggccagaacaagggcaatcagctttttacgcagtggcgcggggagttttggcattgttacgctgtctcatggtgttctctgagccagcgtaaccgtggaaaaaagggggcaggatttgcggaatatcagaaaagccggggctgcgtgcgctcctgatgcaggcgacgctggttgcggataacggagtaaatctgcgtctctgacatctggtaatggcggcgcagggtttcaattttttcaccctggctccagcgggaaaaaatctcattattgcgcagttcggtgaaaagggattcaccgaccgggagataataaccacgcccgcccatgtacccggcctgtgcggccgcaaccttacgggcaagcattcccgcctgagcagattcaatcccctgacggtgcagttcagcactgatcacatcaaccaggtcacgcagcgtgccgggccagttctttttcagctcatcatcaggaatatcatccagacggtcaatcagcgcgtgcagctgttcgctgtcaccaaacatgctcatctgtgtttcagccatacccgcctccggtcatcattacacagggcaagtttaaaataaaaatcccgcgctgtggcgggatttggggttaaaaaggggaggattcttcatacagcctgcaaacgcgctcataactcatcactgtacgcgctgacatccccagcacatccagcatcttgcgacggtgccagcgtttgagacgctccagcacatccgaggccagtgcggggtgttgctccagccactgccagttagccacaccttcgccaccgttctgcgcggccgtctgcgacttcacccagcggttaagggccgtttccccgccatcagcgataaagccctgccggtgcattaccttccagatggcgcgaattttggcggtcaccgtacccggttttaaggcccggttaaccggtttctgacgcactttaaaaccgcgttttttgaaaacatccagcacgcgggataactcatccggtgacatatcccggcaactggatttgccggtggctgccagcagaacgaatgtataggtttcatcatccagggcaagctcgcgctttgccacatgaatggcggatatcagtttccctctcatgctgtatcaacactcctgctgatatgatagatattattttcccgatcgagctgaacccgatactccggaggaatcacaaaaatattaaaaccatcaacagtttttattcttgagtagtattcccccttatgatatctggcaagtgcattaatcagagaagccgccgccagcccaatcaggtattttttatgaaaaatactgataactttccggcacagccatcgtgtaatgacgaatgcaccgaaaaacgatgtgatatataaacaccagaacaactgcgaactactgtccattatctttctccttattcagtcttctgcggcattcggcacagtcatcaggctttcaaatgtatccggctcgcgattatgagccagatataaccaccgcccacatatactgatattttcacctgttttaaaaaaatgatgcttcttagccatcaatggccgcgcccatccagcgggtagactattcattagctttatcctccatgctggacagaatcatatgtattaatgtcgggcgtggagatatacgcatttcattaagcgtctgaagggcagcaacagcagccattttatcggtgcctctggcaatttctgcaagagaatgcacaatccataacggacttaacgctacggctgaatccagaatcatgtcatccataataatttctggcacatcccgtttgtcacattctttatccataaaagaaacgattttttccgcatcttccggtttcatacctccggcgataagaattttacgatattcataagacgttcttaattcaatgctcatattcatctcctgtaactctgacaaggacgtgatttttctcatttacgcctcccggaaatacgaatgtatataccgatgagaaaatccataataaacaggaagagcgacatcctgataaagaaccaaatgtcaggcataatggacaggtttcctgtaatcgcaaatataaaaccagtcccccacactggaacgataattgcgaaaaatacaagtctctttatcatggcgttaactcccgtaatacagcgtcctcggcggtccgtcgacggtaataaacagcgtgagcagaatgttcagatatgccaaacttttcgccaatttcccggaatgacagacggcgagggtaatcggaatcccgtagtgcacgtataagacgaacatcctcatcagatatacgtgtgccggggcgtaactcaccgcactttgttaatccggcaccaatcattcctgcgcggcacctgacagagtctttattacgtccgagataatcccccatttgctggcaggtcattgtccgggcattttttcggataaatttatcttcatcaggtgtaaatcgcggtcgtttatatttcagcaactccgggtatgtactgcgcaatacgccagtccggttatatacggcccagacacttctttttattctggcggcaatatccttaaccggggtggaggaataaagcgcaatcagcagcgcatcttcttcaggtgtccacgggcggacatgagcaggtgcacgaccttttcgccccatgggttgtaatttcatcatgcatcaccccctgactcgcttttcagcagcataaaactcatcagacagaatttcggtcattttctgatttgcgggttttacaccgcactgaagataaatcacatcgtcaacgcagaaccactccacagggccatacaggattgctgagaaatcaatgcccagccagaacaacagggcatcggttctggcatacgtgacgggcgaatattcacgccacagactgttcagttcgtcagaggcagtgcgcagggctttgggaatgcgcgatgtgcgcggcgtgcagctccagccattcgacgcagtcggttttcgccataagtcgcgatgaaaaggatatttgtcctccgtaaaacgcagtcccttaaaacaaaaaccactgatactgaattcaaataccgaccggcacgcaacattcagcacggcctcaaggcgtttcgcctcatccttaactttctggcagtcctgctgatatttttgccacgcggccagcgcggaagggtttgatgttttaaagaacattacgccacctccgcagatatcccggcaggcgcggccgtccggtcaacaatcaggtaacgcagaacgcgcgaggtgatattccagccgcttaaaccgcagataatgacacccaggcgtatgtcgatatacgccatcacaaaccggggcacgccttctttcatggcctgctcatcaacttcagccaccacataaacggtttcacaggtcagaacgccctgagcaaattcccacgccattgacggaatatcatgcccctcaatccacggcagggattttctgaagctgcaccactgaacatcatcagccgcaccttcctggctgcatttgcgacgaaccggctgcaccgggcggggacgcggaatatcataaaaaccgttacattccgtcagcaccccggcatcgaccgcatcacgcagaaaataaaccatcgaggatggcggcatattcattttttcagccagaatgccgcaggtcagacgcccgtaaatactcagccagtttttaaccccttcaagcacttttgcatcaatcatgaattattcctccgtcagcgccacatattcagaatgtttaatctcctggcattcttcaggaatacccccttttatttccctgccataagcgcctactttaaacaccacgcacagggcatcacgggagagcgacggggtccaccaggagtccatgttaaacatggaggggattctcattacccccagcttttcacagagccagacaaggaaatcaggacgctttcttaactcgcgttcagcggcttcaatcattgcggcaatcgccggtccttcagggcatgactcatcaggtctggcaataaagcacggtccgtccccgataaaagccacatcatcgcgcttacgccagcccgcaggcagagcaccagaaaaataaaactcactgattacgtccatggcaaacggctttaagcgcaatccggcagcgcctgtatttttcagtaatgcccgaagaatactgttgcgtagcggtaaaacagtctgttgatatttggtgaaatatttatttgtctgcacacggtctaatttgaaataaaaatatgccatatatcctgttccttattttcagtttacaggcgcaggcagtcccctgacgcgagcgccatacttaaaacgatgtgatatttaaagatttaatgcggtgttatttattcagtccggcgtcctgttcaaaaggctcgacataaaaactttcagcgcctttattcaccttaataccggcaatgcctttcactgcatccggctccgccaggaccgcttccttgttcacttcctctttcgtgcggatgaatcgctcaagccccatacggcgcagcatttcaatcacaccttccacatcacggctgacgctgcatgatggatttcccagccgccatgacactgttccggtggtcagattggctgttttggttttgccgccgttcgtcagctcatcgcggttggttttgcaccagtcctgaatccccttaaaaagcactttgatttcttttttaaggttttcaatctgcggcgtataacgggcggtgatttctgccacttcatcattcatcgccgtttccagccgcagcgcctctcgctgaatatcgcccagggtacggatatcgcggctgacttcttcgcgggtctgcggtgcggcctcggctacagcctttaattttgtaacgcgttttgccattttgtttttccttattgcaatgtatctggtgcgttctgcaaggagcggcgctcaatgctgcttttcacccccagagcctgcatggaaccctgaagttcatctgtcagaaactgaataattgtggggctgtgatatttaagaatttgcgcataaacatcacatgggcctgtcggtctgttctccgtatcacgttcgatttttacagtggcagtaaccccctccgtgatttcctgactatcattaccggctggctttacttcatgcattacgtggttaaattcaaaaataacgcgtactttgctcatggaattccccctgctgattaaattcattaccgttaataaccccggaagccatgcccctgtctttcatgaatgcactggctttcattgccacaagctctgcgaagtttctgctttccgcgagcataaccaccccaaaaatcatggcgggtccatcacctttctgctttatcccggttgaacgtatgtccagacttacccccatgcgcactgttccatcagcgtttttatggataacgtgctccttatattcgaaaataatgtgtacgactttactcatcctctggtcctcgttctgtttggataactgacccggcgtctgacctcacggcagaaccgaatcatggcattaaaggcttcttcctccgtcaccgcttccggtatccccggaaccagtaactgctcctgttcatcacgtccatgacgcgccataacctcaatcacatgccgtaccgtggcaggctttccggcaactatcggcaatgcaccttccggcaggacgtaaccaaactcaataagaccgctcgaccacgcccacgcaatcagatttcgtttcatctcacacctcccagtaaaccgtgcagccgctgatgcgggtggccttcacacggcggcgcaggccgttggtctgtatggtgatttcaatttcaccggttccctgcacgttgcctaccggcggcgtggttttcagtgcaaaacgttgcggatagcgcttactgcgttccagtaccgcaccggcaagttcggtcagacggcgcgcgctgttcagggagtcgaataaattcattttgttaccgcaggattgcatattcatataacacctcgtttagctgattcgttttgcaccgataaaacgacaaatattgctgtaagcttctttcgcaccttcacgatcaagtcctgccgatattgccattctggtgcgatcattaaattcaaaaagtaaatcgccacattcttcactgtcagacacggagactgctttgacgttatcgaaattcaccaggtgaaagcgtccgtaaatatcaggaatattaaatgcaatcataatcacacctgtgagagtaattcagggttggtataaacctctttaaaggccgcattaatatgtttttctgtcagcgccgcgccttcaccactggcggtgatccatgcctggttaagcgtatgtgtcagaacacgtaatgctcccggtttttcagcgatagcctgcatgacagccagctcggcctcaccactgataccccacgccctggcaatagccagcacatccgcctttttggccttgcgaagttgttttgtacgggcaagacggctgaacaggcgcgataaatcatcaacggcgcggcgcccccccttaaacagtccgcgcgggttaccaataagcaccatcccgatccccgtggcgtcctggattgcacgcagttgttccagaccgtcaataccaagatgatccgcctcatcaacaatcaccagtccacgcgttcccatcaggcgacggcggatggcgcgggataatgcccctttgttcgcgcgggtgtaatcaattcccagctcctcggccagctccagcagacactccgtgacgctggaatgcgcgggagacagggttatcatccaggtgttcggttgctcctgacagtaattacgggccgtggccgttttacccacacccggtacgcccacaatgacgttaatacagcccatcaggcgaaccgcctgaaacagcgcgcgcagctcctggactgtctgcgtttccacaaactgcggcggttccggcagtgcgctttgtttattccagttctcataccaggaacgcagggaagcagccacagcgacgttatcgcctttatatttccccttgcggaaagccgataatgtaccgtcggaaattcccgcctctctggcgatggcatactgcgtcagtacgccgccatcaataagttcatcaatggtcttgattacatcgttaatatcggtcatattattaacctctcatttgataccttgtttaatcaaataacctgagtcgccgctcgggttatttttttatttcaggccagtggatcactttcttttaattttgcttcgagcagttgcaatccccgctggaaattacgctcgtattcttcatcaggttcatcgtcagcgaccggttgctgaacggtcaccgtattacccacagggcggtatatgttttccagccatggctcctgcggcttgtgctccagcacgttgacaacctcatcctcggcatcacggattttttcctctgcgcgtttacgcatacctttaaggcgctgttgctgtttgtagtattccgcgctgaccgggaaggcttcgcgtttattgccgtcccataccgcctcgcaaatcacgctgccatccgggcgacgaacggtaattcgttcggcatcatgaatgtcatagctgataagcaccttgcggccatgctcatcacgcagctcgggcgcgtagtaaatattgttcagccagcgtatttcacagcgtcttacagggcgctccaccatcggccggaacatgtcccgcaattccacatcggacagccattcaatttccgtatcctcttctgccaggcgtttttttctgaactccgccgggctgtaatgcttgccgttcggcttcaccggtaattcatcgtgcggccggttgttgtaccactcaacaccgtcacgaatggcatcaatcagttcagaccaggacggtaaatcacgcatcgctgactgctgccgggcgttcagccgtttgccctgttgcagggcagtaaatgccgagcgtaaatcgcggttggttttacgtaacgtctcgcgatctgcacctttcccgaaataggtgcggtatctgcgggctatgcgcatcggtaatgtgcggttaagccgttcgataatgccccgtccctgcgggttaccggcaattccggtcgggtgattaatccccagtcgcggcagtatccccacaatctctttatccaggatgtcggccgtttccccggagccgttatccgagtaatacagaaacggtttgccgtgatggcgaataccgtgctgtatggcgccggctacggcgaaaacattttcagccaggtcaaggctccagcccaccacaaagcgcgtgccaccgtcgataacaaaggtcacttccggtgcaaatggccgcccgtgaaccgggtgcctgcatttcagcttcatgccgtgaccgtcaccaatccagacataattaaccggcatttttgaccagtcgcggcgcgtgaatccctcaagctggcggtattcactgccggtcacccggcctttttgtttcaccacttccggcaattttttcattgcgcggcgaatagtgtcataagagggcatgatatcgagcatataaggctcatcagcgtgccggtgctgccattcggcgacaaaatcctcgtaagcctcggtcattggtcggccgtttgactggcgatactgcgccagaaattcgggcagccagttaatatcttcggcttttatttcctggcgtttacccggtgccagtaaaagcaggcgttcagcggcgttctgtgccttgttaaaggccgcaatccagcgtttcagcgtgatttcactcaacgcgcggcggtttccctttttggcgttcgctgtctcaaccattgccacaatgcgctcgtccagttgtgagcgtgacagacggtcaacaataaaccggatagctttagcgcagctgaaaccgggttgttgcgcgaatttcagcacctcgctgacaatcgcgattcgtgcatcagccacctggcgctggttttcagtcagggcattgaggcgttcgaccatcagttgtggtgaaccgcgatatgcctccaccgcatcaaccacgtcaggtgagcgtctggcctttgtcaccaccggagccggtgattcgtcggctttttgcgtcatcagttgcagggcgtagcgttcacgcaatgcctgctgcgtcacttcaggtaaacagtcgatgctgtattcagttgctttagagcctgagcgacgacgggaacaacagcttttcccttgtgcgtaacgttgtaatgcctggcgaataccttttgttgtagcaggcattccgggcgcgccaatcagttcttttgcaatgacatacatatcatgacgcctttctcatatagctcttaacctggtatctactgggccagatttcttcaggcgataccccaagagcatcagcaattatttgctgatacgggcggcaaggagtacgtaatacgcttttcagcgagtccctgctgtaaccagcctttaaagataaagagcgcagtgataagccagccatgtgtaggcgcgccttgatgatttctggcggccaatcgtgatctgaaacttctcttctactcatacttcctctatcctaaaaagttacccgcgcggatattcgtacggatatctgtacgggtaaataatgcatcactaaaaataccaaatcaaggtatttttggtattttccttgttttttcttttatccttatttttcaattggatacacagaaagaaacctttcattagaaaagcaccaagaggtatctttatgtcgcagggaaaagaacctgttattgaacgtattgggatgcttacaaaacgctatccttcaagaagtgcagctgccagagcgtggggaattaatatcaacacattaaacagctatttcaagggagggcaaacacaaccagccccaagagaaagcattcttatacgaatttctaaaagtgaaggtgttagtcttgagtggcttaaagagggcaagggagaatcaccaaaagacattggtatttctggtgattttggttgttctggtgataagggagatcagcttacacagatgctttcattcctcacgaaagacgaacgagaacaactaaccaatctccttgctcgcaaaggtgtagagactgttctgacactactggataaagaaaaccaggatttattacaactagagggcaggaagcgcctggctgctttgatgattgtggatatgcctgacgatagtgtcagagagattttggaaaaaaccgagacaagtaggcaatcaaatccggtagaatctaaagcgggttagtttggcgagactggcccgtattttagttaccatatagatttaatgaagttttaaacgctttaaaaggtttagatcacagtatcaaaagttttgccgattttagaataaacgattaattattgcacaatcggtatcaaatagacttttcgcgcccagattgaaatcacctgttttatttcagtatcttacaggtgatttcacctcctttcactaaaacccttgtcggtatcaaatgattcacctggttatactaacagtattcatagcagcgcagacagtgattctggcgacagctattttctgaatttaaacagtg

SEQ ID NO: 860 - DNA, 5627 bp, Escherichia coli
  modified_base (1943)..(1944): a, c, t, g, unknown or other
  modified_base (2135)..(2135): a, c, t, g, unknown or other
tgctggtcagctatcaagtacagtcatagtcctacgtacttgagcctacggagtccctgagactgccagcgttcaatcgtccgcgggtccacgttgaaaatttcggcaagcctctttttattaaccttcatgaaaacaacccattatcaaatacaaaggccccgacatgaaaacgccagaaaaaggcattttcggacactttcatgtcggacctttacggatgcaatattaaaaaaaacaaaaagttatattcgagaagtaccgacacgattttccctgaaaaattttcataaatagtgaaaaaccgcgaggtcgccgccccgtaacctgtcggatcgccggaaaggacccaccaaaaatgataatgattgtcaaatacgtttatcacactgatattcagaatcactactgaaagactccctttgtggtgcgcgagggatgcgcataaaaaaaccaccagcaaatgccagtggctaaagatattcattgcgaataaccatcacaaaacaacttaactcgtgagggtagaaattttactcgaggccaaatttcttctttaaataggccttcgttaactccagcccaacatctttgattgtactcaaaggggcatcgctcattgactttaatttctcaaaaaccgtaggttcatttaatgcctgggcgaattcttgtccctgcgcagatagtcgcacgtcggtacccatatctagcatatggccacaatggcgcatgtagcccagtttagttatgtcatccgttattagatctttattactgatataaccttgctcaataagaagtagataatgaaacatcccttcattcgagcagatatcgtaccccgcattagctaagtcttttgtagatataaagggagttttcgctttcaaaaatacctcaagcatccccttcatgtattctaaatttttaaccacaaaaacctccttaggataattggaggtctagaataccgtttgcaagcacgttgataaatcattatcacaggcactcaatgaatgcctgctgtaattgcgtacggtaatgaacgtaaaaaaccgcccgaggtatatttagacattagatggcgctttgtcagtatagacccggtacgccctgacaaacatcccgttacattcagagtccgccttgatatacgccaattcgtaaccccgatgctttagctcttcacgagctcttttctcttccttagccatgaagttaagatctttaatttctgagtaggtatatgttcccactataaaatctctgcctggccgtccatttatcagttccatgtgtcctcccaaaaagttggtagtcagaacataccatgctaagcgaggtgaaagcacctttatcaagccccccgcagatagactttgtaatggctacttcttcagaaatgattcgatgaactcacgccggggatgacgatagttcagaatatcttctggcatcctcataaagcggttgttgccgtctttggcagtaacgaaacagcagtgaactccgcagacatccgttttgatcgtgtcgccatactcaaaaagcaactgcgccatcttctcttgccattcttgcggcatagcctccatgaatactctcggcatcacgcagaacgacgcatgcgtcaggccaaaccacaattgcaggtctttacgatattcttcatccatcgtctttacctttgttgcaataaaaagccccgcgaatgcgaggctaaatcctggtgtttgtgatgaactggctcttatctcaacgcagccccttaccgcgcgccagatgctcaacttcaagcatcagcaatgagatgtttaatctggattcactccagaagtgatcaccaccctgtctacagagccagatgtgaaggatgataagtaaaattatcgctatcatcgaaggcattgcgtcctgatgtattcctgaagcgttctcannctgcgcggttatcctgtcgattccacttcggagacggtaataattgagttcagcatctgctgtaagtcttgggctttctccatcgcccatgctgctggcgtccggtccgttagactttgcacaggtggcggcgaacttgcaggcgcttacgaccagcagaaacatcagcacggagactttcgatagtcgcnttagcatcagcaagctcctttgtatatctggcatcgagttctgctacgtcacgttgacgcttctgcatgtcagcgatgatggatgtggctttatctcgctgctctttgtaggcgatggcgttatcacggtaatgattaacagcccataacaggcagacgatgatgcagataaccagagcggagataatcgcggtgactctgctcatacctcaatctctctgaccgttccgccagcctctttgaattttgcaatcaggctgtcagccttatgctcgaactgaccataaccagcgcccggcagtgaagcccagatattgctgcaacggtcgatagcctgacggatatcaccgcgatcaatcatcggtaaagcgccacgctctttaatctgctgcaatgccacagcgtcctggcttttgggagagaaatctttcaggccaagctgcttacgataggcatcccaccaacgggaaagaagctggtaacgtccggcggctgttgatttgagtttggggtttagcgtgacaagtttgcgagggtgatcagagtaatcagtgaatagctctccgcctacaatgacgtcataaccatgatttctggttttctgtcgtccgttatcagtcccctctgaccacgccagcatatcgaggaacgccttacgttgattattgatttccaccatcttctactccggcttttttagcagcgacgcgtttgataagcgaaccaatcgagtcagtgccgatgtagccgatgaacacgctcgttatataagcgagattgctacttagtccggcgaagtcgagaaggtcacgaatgaaccaggcgataatggcgcacatcgttgcgtcgattactgtttttgtaaacgcaccgccattatatctgccgcgaaggtacgccattgcaaacgcaaggattgccccgatgccttgttcctttgccgcgagaatggcggctaacaggtcatgtttttctggcatcttcatgtcttacccccaataaggggatttgctctatttaattaggaataaggtcgattactgatagaacaaatccaggctactgtgtttagtaatcagatttgttcgtgaccgatatgcacgagcaaaacggcatgaggttgttagcgcagcctcttgccacccgctttcacgaaggtcatgtttagaaggccgcagcgtaactatcactgatgaattcaggatagccagtggctacggctcagttatggtgctggttaacggacttgaaccgctacccattcgcttacaaggcgactgctctaccattggagctaaaccagcatgtttggcgggacagcgtggactcgaaccacgataagaaggttaacagccttccgtaatgacctttatacgactgacccaaataaaaaagccaccgttgcaacttaagagtcactaacggcagcttacctgctaattatggctaaatggctaattgcatgtcaaggcttttaacagcaacatgcttaactttctcaacacgtttacgcattttgaaagcattttgcattggctggtacaaaacaaataacgacgctttcaggatgtcgtcaatttcgtttctacaggttgccagtgaaggttttctccatccctcgccaccacgtccacacatcttgcgtggctttgcagtcgcgtgatagtaggatgcaattgctcgcttagatgaaccatgagcgtagtagctgaggaggatgccaaaggctttcttgtcaatgtacatgacggaatcgacgacctgagaaatcaacattccatcatcatcattacacattggccttgtcataattcttcccggctctacgctctccatgaacttcgctattacgctgctcatgcgcttttccagacgacctgaataaacccatgcgccccacagttcaagccagccattcagccactcatgctgttctttggtgaggtttagttctcttatgcccatgcgccttctccctgtacctgaatcaatgtgaggtttccgcagaacactgctccggtatcgatatacatttggttggcaaatttaagtggtttcactgctggcgtatgaccaaagatgaacgtgtccgcgcctttgatttctttcacgatcccgtcttgtgagttgctgattcgttcgcggttccagattacctgctgatgatcaactggctttccaaactcgtattcgtcacaaggataatcggcgtggcagatgacatattttttaccttcgctcaccagttcgatgattaacggaagttcatctgctttatgagcaagagctttagccagaatttctttgtcgtaatcgagattaaagaaccagccaccgccattaagcatccagtgattgacgtttccgcgctctgataagccatcaatcatcatttgctcatggtttccacgtacagctcggaaccaggggaatgtgattaattccagacattcgacgttctctgtaccgcgatcgaccaaatcgccaaccgagataagcaggtcttttttggtgtcgaatcctatcgtctccagttttttcatcaggttcgtgtagcatccgtgcagatcgccaactacccaaatatttcggtatttgctgccatcaattttttcgtaatagcgcatctctttcactccatccgcgatgaaccatgagaacgtcgttgacgatggcgtgcattttcccgtctttatcatcaacgtattttctgaccgtaccgcgactacatttcagtctgcgtgctacttctgtctggtttccgtatgcttcaacgagcatgtctggaatggtttttactgagaacgtcatgcggcctcacttctgctatttcgcaggtctttgagtttctgctgatactccgccttgatggccctgcactcttcgacagtccagcgatggcggttatggtttgattcgatttcgtctactgcttcctgcccgatgcgattaatcagttcgacgcgatacggaacgagatttccgcttttgtgctggttgcacaccacgcattgcttgtgaatattgcgttcatcaaatcggagttgaggtgccgcagcagttgtccggtaatgtccggcatcccactgagcagacgtgagcgttccgcacgagatacatggtaagtcgcggtctctttctctgatgaaggcgtttacggcttgttgggcttgtttaatccagtaactgcggggctttaaggcgagttttcgaatcttaagtttatctttctgtttctgctcctctcgtcgtcgtttcttctctgctgctttttccgctttttcgcgttctttgcttcgtcgttcgagtgctatcttggttccacactctggagagcaccaccactgattagcgaatgcagggtgaaaccattcccgacattcatcgtttttacatcgtcttcgcgctggtttagccatcgtcttcttcctcgtacattgagctattcggatcgctcatcagttctgcgcagcagtgctcacacacgtgaac

SEQ ID NO: 861 - DNA, 2678 bp, Escherichia coli
  modified_base (41)..(41): a, c, t, g, unknown or other
cgctcgctacgatctgaccgaagatgcgtccactgagactncatgctgttcggcgagctgtatcgccacaatggtgagtggaaattccgcgcagtaggccagggttatgctggtggtctggcatctgtatgtgctcagtacggcattaacgcgtcctgatcgaaaagtaacttttcatatctggggctgttaattcagcctcattcaactgtttgcaggagctaaaaatggcagtttctctcgtaaaaggcggcaacgtatctctgaccaaagaagcaccaaccatgaatgtcgctatggttggcctgggctgggatgcccgtgtaaccgatggtcagggttttgatctggacgcttccgtattcgcagtaggtgaagacggtaaagtactgtcagatgcccatttcattttcttcaataataaaaccagccctgatggcgcagtagagcaccagggcgacaaccgtaccggtgaaggcgacggcgacgatgagcaggtcaaaatcgatctgaccaaagtctcagcagacatcaaaaaactggtatttgctgttaccatctatgatgcagaagcgcgtaaacaaaacttcggcatggtgagcaacagcttcatgcgcgtttacaacaacgacaacgggacggaaattgcccgtttcgatctgtctgaagacgcctcaaccgaaaccgcaatggtcttcggtgaactgtatcgccatggtactgagtggaagtttaaagctgttggccagggttttgccggtggtctgtcagcgcttgcttcccagcacggcgtcaatgtctaaaagacgctgagtctgaccccggcaatgccggggttttttgggtatcgatccgctatcaacgggtgaatatgggaaaggggggcggggggggcagaaagcagagctatgttaattctggcatgaaccttttatgcaggccccgggtttatctgtggttgctggttaaagccagtattccgtgtctgatatcaacagcatgcccttcggatatatgttacttttgcgacttatgaaggaacgggccctggaaaataagatacccggtcaatgaaaattccaattcaacaggtatagaaacttcagcgttatgaaaaatggtgtcataccatatttacgcctcaccgaatatccagcgtccagaactaagcctagggaacatatataaacgctgcgcattaataataatcaaaaatcaggagagttaatatgaatttacaatccggacaaaacataccccttcagcaatctacgatcaggctgaatcttcagtaccctgccaaatccggctttaaaggcgaacccgatacctgcctgttcatgcttaatgctcagggaaaggtcagtggcgattctgactttatcttttataataatttgtcttctcctgagggggcagtcaggctcgttaccggttcgcagcaggccagcattgagatagcactggatcgtgttccggcgaacgtcagtaaaattgcgatcaccgttgttattgatggtgaagataccatcagtgggctcagtttattgagcattcaggctcctggtatcgctgatttccaggctgagactcagggccgcagtgagaaagcaatcattctgggtgaagtatatcggcacaatggcgcctggaagcttcgtgcgctagggcagggtttcaacggtggacttgagcctttggccattaactatggcgttgatgtcgcacagccagctccgcagccagcaaagcctgctcgtatcagtctggaaaagaaactggaaacccgatctccgcgccttgtaagcctcgctaaaaaagcctcggtcagtctcactaaaaataaactggacacccttgaggctgcggttgcgttcgtacttgacgcatccggctcgatgagtggccagttcagtaagggtaacgttcagtctgtgctggaccgcatcgccgttcttgccgcccagttcgacgacgacggtgaaatggatgtctggggatttggagagaagcataagaagtatccaaacgtcactctggacaatctggacacgtatattcagtcgattcgaggggctggtaagcgttcatcctgggagaacctgccgggccttggggggacaaacaacgagcctcctgtgatggaagaaatagtcgactactttaaggactcgaaaatcccggtatatgttgtatttattaccgatggcgggatcagcaagacccgggcgattaaagatgcaatccggcgttctgccaactaccccatcttctggaagtttgtcggcctgggtggttcaagctacggtatcctcaaaaatctggatgactttactgaccgccgggttgataacacccacttctttgccatggatgatttcggttcgattagcgatgaaaagttatatgataatttactggaagaattcagaccgtggatcgatgaaacaaaaaggttaggcatcctttaatacatatagttagagcatgggtgaatgagctctacagcagcttaatactgtagagcctttcttcattaaaaggtaaacgtaaaccgaccgccatatgtagccattagacaagaattggtaacttagacgcccatctgacacagacggacatctaagtatggaattacaggactggcgaaaagaacctcgtaaaaagtattcgaatga

SEQ ID NO: 862 - DNA, 2715 bp, Escherichia coli
tggcttcccaccaactcagcgatttcaatgcttgtcattttgatggcattgctatttatcagctcattcattgtcatgtcctctcacattgaaaattcagcaataaaaaacccagccgaagctggttttttaagttgtcaattgtcagtagcgatgcagtgaaggcggcaactctttgttcttaagcctttcccatgccagaaggttcgtcggcccgtcaggctcataaatatctatatcccgcgtgtgattaattaaaacgcccctcgccctcccgatgatatacgagaactcatagccgtagtcgtggcatatgccggaatagccagactgaatcagttttaatgcgggatacaactcacggaacaatgcctgtgagcggttggcataatcccacagccatacaagtctgtctgtttcttttgcggaaagcccgttgggcttcttctcttgtttgccagtatttttctcgcactggctgaaatagcagtcttccagtttttcgaacacatcccacgcctgatcggtttctagcatttttgcgtgacgggctgcgccgcgttctgtccagaggatgagggagcgggcatttttaccaactaacccgattgtttcgggtctgttcttaaactcgcgtaattcgtttttttcaattttaaagtaatgctttccgggcatgaatcgcgtcgtgttgttcagaaagttatcagaaatgtttttgatttttgttccgtaaaggtgagccaacagttcagtagtaattacggggatctggttataggtaacaggggaaaggttttcgacagaaatttgaacagccataatgacctcgcgtttcgataatttttacctcgccaccgtcaggtgctaatcatcgtggtggcgaactgtgcggggttagcactaccggtcgaaacatccggcgagcctttcggctcccccacacagcccgccataaatcgcgaatgtgactgtgcttagcgcataaaaaaaccgccagcgcggttatgcaccgtttcgatatccggggtgctaatcccgacgccaggttttgctggcgcgtgaggaatatagccccgaacacgcgacgttgtcaaactgatggcattgcagatccctacgcaatgtaacactatgtgttatacattaataacggaacaaaaaatgcgcatttttaaaaacgcctggtttgagcgatttgcacgcaaaacaaaatatccgaccaatcactgcgcgaaattgttaaacaggctgataacgggcttatctcagcaaacctgggtaacggcgttatcaagcaacgtctgccacgagtcggtggcggcaaatctggcggttatcgcacaatcattttctatcgcgtcggcacaagggcctttttcgtatatgcatacgcaaaaaatgaacgtgaaaatataaccgctactgcggaaagtgcatttcggaaggcggctcctcacgtactcaatctaacagatgaacaactggcacaactgattctacagggtcagtttacggaggtacccaatgagtaaaaattaccgcagtgatgcgcttgcatccgtacatgaaatgatggaatcgcttcatgatatcggcgcagtaacgaaacagactatgcgagaattcgatgaaacttgtctccagccagcgccggtaatgtctccggaaaggatccgtgcactgcgcgaacgagagcatctgtctcaacctgttttggccagatacctcaacgtcagtaaaaacctgatatcagactgggaacgtggtgtaaaacggccgggaggtgccgctcttcgccttctttcagtcgtagagaaaaacggaatccaggtaatatcatgatactccaatacaacaaaacccgccgaagcgggttttcattagaagcacctttagttttgctgttctattttaagcttgatagtttcatacaaaacaatagttgcgcctgttttacataattcccggctgtcatacgcacgagaccaataacacaaccagttctcgagatcttctcgagtataggttttgcaggccagtccctctgccatttccacgatttcatcgcctggtgctgttaactcatagccattcaacaacaagaagacataaccagccatcatagctgttcgtttgtttgcattagcaaatggatgattctgaatcagactttcaatcaatactgatgccagtacaaacatgtcattagtctgttcataccatcgaaccatgctgggacgagactgagaagaacttaaattatcaacactcagcacactaacaggttcatctggtgtttgaagctcaattaaaaggcgattaatttcggtaagatcatcaaacgaaaggtagtgcactccttcaacaatctcagccatagagcacaatacccatcattacacttttgaaagttcttccattgccttctcgtaacgagaaaaaccgaaatcgaaagcatttttcacctgctcacgatgagtgcaattttcatcgatagccgggcgcggagctgccacaacgcttttatcgcgagggggaatagtcaatcgcgggtgtttttttagtgcgtagctcattgggtgtacccttacttctccgtcctgttctttaacaaaaatcaagtcaatacaaaattagtcaggctaatgttgttagcatagcctaataccaatcgtattcacaaccacagtaagtgaaaaacccgccgaagcg

SEQ ID NO: 863 - DNA, 5541 bp, Escherichia coli
acgccattgagcgtgataaggcgctggcatgggtggagaaaaacatcagagtgccactgaccgaaccgcagaaagcgggcatcgcgtcattctgtccgtacaacatcgggccttcgaaatgcttcacctcaacgttttaccggaaactgaacgcaggagaccggaaaggtgcatgtgctgaaatccgccgatggatatatgacggcggcagggactgtcggaaccgctcaaataactgttacgggcaggtatcgcggcgtgaccaggagagcgcgctggcgtgctggagtatcgacagataagcagaatattctgctgaaaaatgccgttgaccaacgcgaacggataacacgaaaccctgcgaactggcaaaatttaagtgagtaaaagtaaaaaccccgtttgttggcagcaagcggggttttgtgtttctgaccttgaataaggcaagggagaaattatgggtagggaggttctttccctgtgaggaagtataaaagattctttctgaggttgtccattatgaaaggcattgaggtggagacgccagcaagtctggatttaacaagagcggcagcttttgccattcgtattgtggcaattgctgttctggtctgggcaatccgttggtggtgatatgaatcgtgtgctgtatggcgtgcttattgtcctgctgcttggttgtggatcgctgtggctggcaacagaccattaccgtgataacgccatcacctacaaagagcagcgagatgatgcgaagacaaaactcagccaggcgaacgccaccattgctgacatacagcagcgccagcgtgatgttgctgcactcgatgccagatacaccagggagcttgctgatgctaacgcgactattgaaagtctccgtgctgatgtttctgctgggcgtaagcgcctgcaagtcgccgccacctgtgcaaagtcaacgaccggagccagcggcatgggcgatggagaaagctcaggacttacagcagatgctgaactcaattattaccgtctccgaagtggaatcgacaagataaccgcgcaggttaactacctgcaggagtacatcaggatgcaatgcctcgattaacagagccagctcaatcgctggccttttttatgaggagagatataacctgaatcaatgccagtgcattatcaacaaatggatcactgggtaagctcgtttggttttaaatgtccgtcgagaatcagattgtgattttcccgatgcagaaccagtgtgcccatataatcaggtttaaatctccatccattcattttttttgcaattctggacagacagtgattatgtgtgaaaatcacagtaacatgatctgattttgatattttaaggatattatttactgcgttatcatcacatgtcgatatgtccggaatagttgctgtcttacctcccgaaaaaaagtggctgtctgcattgttcggagtgtgtctgtagaatagagactgtagtatggaaacattcttctgaatttatctccatattgttgagctttgttagctccgtttactgtgattccctcatgtgctgaaagacatattctttgggagcgatcgcatctttccccatgccggatgagaaaaataatgggatgtttctggttaatctcagtgacatcgttcacatcaagtctgactggagttcttacaatgtatatgatggatacagaaacgattatgacaagtaaaaatataagaagagattttgttagcgtttgatttaacatataaattcccttgtctgtgttgaaaatgggcattattatgcgtaaatcttatgtaatccttaaggattgtctgacgtggtgatatgacgcgaaatacagtgggtacacagaatgctgtgaacaacgacgaaatgggcattggtagcggtactggtgctttttttattggttggttgctcaagtcttgataaagcgcgttagctttttggtattgcctcttaggtctgtaaaattgccgacggtgtccggcagtgcatgcagggctgatcgtctatgagaacagaatatattgctaaaaatgaagtgtgcgtcaatgcttataaagcatgcaattctgtatttctaactattcaataaaataaattctttctgtcgcagtgaatatacaaatgttgatcagcgctcgatgtggcgacgggtttctatatcaggagactttggcatttatccgcgaggcagcctatctggtgctgtagtggaatgaagcggatataacctaaataaggttaaacattaatcagacatggctctgctgtgtgaaatctgaaaatttacagcagtcattgtgcatcagtttttaacagagaacgtcagaaggtgacatggcaaagctggactggaaaaagctggagcaggcatttcgacgcgaacatgtcaaaaccggcataaagcttcaggactggtgccgtcagaacaatatcagttatgacacggctcggcggtacattaaactgcgcaaacactcccccagaaatacagagaaaagtgcgcagaaaaatgcgcaaattgatgatcaaaaaagtgcgcagaaatctgacggcaactccagtcatgacgagccttcaggcgatgatggttgtgatgaaaaatgcgcaaatttggcagaaacgaaacggactcgtggttccagacttttgccaccttcaaatgctttttctcagcgtaacacccacgccgtcagacaccgtggatacgcgaagtatctcgaggcagataacctcatagatgatgcagtcggaatggaacttgccgatgaactggtgtttacccgggcccgcgcactttcagtaacaggaacactgaaaaaaatgttcgccgacctgaaagaggcggctgacgtggaaacccgcgttgctctgtacgacaaaatactcaaagctgaacaggcccttgaccggaatattgcccgtatcgagtcaattgaacgctcattgctgacgctggacgtcctggctgaaacagcaccaaaacttcgtgctgaccgggaaagaaccaacgccgccagagataaactcagagcggaaaccgatattctgaccagccagcgtcggggcgttgttacgcctgtcagtgacatcgtgtcatcgctgcatgaaatgagtaattcggggagactggatgacattccggaagaatgaaccgcgatgtgatgaaccgtcagaaatgacagaggccgaacaacgtctgttcatcatgactaaactgagcaatccctggtggcggctcaatcatctctacaagatacagaacgaaaaaggtgagctggtcaccttcagaatgcgaccggcgcagcgccagttcgttccggagcatgcacaataaaaatattatcctgaaagcgcgccagctgggattttccacagccattgatatttatcttctcgaccaggcattattcattccgcatctcaaatgcgggatcgtcgctcaggataaacaggctgccagtgaaattttccgcacaaaaattgctgtaccgtttgatcatctccctgactggctgagagcctcattcaccatcgttgaacgtcgtagcggtgccagcggtggctatatcctgtttggtcacggctcgagtatccaggtggcaacctcattccgttcaggtacggtgcagcgcctgcatatctcagagcacggcaaaatttgcgcaaaatatccggctaaggcgaaagaactgcgaaccggtacacttaatgccgtctctgatgaatgcattatttttgatgaatccactgctgaaggcgtgggtggcgatttttacgagatgagtaaccgagcacaggaaatcactgcatcaggcctagcgctgacgccacaggattataaattccatttttacgcctggtggcaggatcccaaatacagcgccagagtgccggaaagcggactgaagctgtcacgggaaaaaaagacgtatttttctgcggttgaaaaagcaatgaacatcacgcttaccgatgaacagaaacactggtacatcaacaaggaaactgaacagcgtgaggaaatgaagcaggagtttccctcaacaccacaggaggcgtttctgacgtccggacgacgggtgttcagtgccgaaagcacgctgcaggcagaatcattctgttcgccaccgatgattgtttatgacattgaaccggttacaggaacgaagaccaaagcgcagtctctgcgtgaaggaaataaaaacgaacagcaccggacgctgatgaattatctgctggtatgggaactaccggatccggatgaagagtatgtatgcggagcggataccgctgaggggctggagcacggagaccgctcatcgctggatatcatcagatgtagtaatggtgagcaggtagcccactggtttggtcatctcgatgcggagcttttcgctcatctcattgcgcaggtctgccgtatgtacaacaacgcgtttgtggggccggagcgtaacaatcacggacatgccgttatcctgaaactccgggaactctatccgacgcgttatatctacaacgaacagcaccttgaccaggcatatgacgacgatacgccccgtcttggctggctgacaacccgccagagtaaaccggtcctgactgagggaatgaaaacgctgctgaataacggcctgtcggggatccgctggacgggcacattatcagaaatgaacacctacgtttatgacgcgaaaggctccatgaatgcacaggaaggctgctttgatgatcagctcatgagctacatgattgcccaggagatgcgcgccagaatgccggtgagggtaagacagaaaacggataaacgcagaaccacacactggatggctcactgatgaaaaatgaaactaataccatggcgacgaaaaacgacaacggagccacgccgcgtttttctcagcgccagttacaggcgctttgttctgatattgacagtcagcctaaatggcgcgatgccgcaaacaaggcctgtgcgtattacgatggtgaccagttgccaccagaagttcttcaggtactgaaagatcgcggtcagccgatgactatccataacctcatcgcgcctaccgttgatggtgttctgggaatggaggccaaaacacggactgatctggtggtgatgtcagacgagccagatgatgaaactgaaaaactggctgaagctattaatgctgaatttgccgatgcatgccgccttggcaatatgaataaagcccgctctgatgcctatgcggaacaaatcaaggcggggctcagctgggtggaggtcagacggaacagcgatccgttcgggcctgagtttaaggtgtctactgtcagccggaatgaagtgttctgggactggctcagccgggaagctgatttaagtgactgccgctggctgatgcgccgccgctggatggataccgatgaggcaaaagccacattcccgggaatggctcaggttatcgattatgccattgatgactggcgtggttttgtcgataccacggttactgaaggccagcccagtc

SEQ ID NO: 864 - DNA, 1181 bp, Escherichia coli
attgctgggtaagatcaacgttccgttaatacacgcacgccattctttgtcaggtggaatccagactgattacaggtaatagtgatatgacaaacatcattgccaatatatacggcctccatagctctgaacctaacattccagaaccaagaatatggggatgattcagacaaaaaagacgcctctggatatcgttaaataacggattcatagtcaaatcacaatagaatatttctcaccagaacttcatcttataatcatctgtataagaagttaaacctagagaaaaacagagtcgtcctgttgcttcagatatcgcagtaacactcgtccttccgacatagatgttattccgtgacggaacagactgacgtctctggtttcaggcatcaatgacataactcggctccctgggttggtcttgtttctgcatcaccactttaataaatttaaagtgaggctcatatttcagcagcacattctgaacatgtctccggggattagatttcaaatcacgaagtaggctacgcatagccagcactgccttaaggcagtgaaccttctggacaactgatctccggcatgaaatcgttcatcttgcggaagaacaattttcttctgtgctcctccggtatgtaggtctggtttcagatgcccccttgtttttgagctctcatcctgaaatgaactactcatgccttcaccaatgagatcttcactccaagagcacgtttccgcaaaatgtaccctccttccatacagatttgccctaaacgattatagggcaatgctctgaaaatactcaagtcaaatgcatatcaggttatacaatggggatttctattatttatctcaagaaattctgcaaaaagcagaattataaaaacaaagatgacagttaacgtggtattttagaaaattcttctggtaaacatttccaatgtggaccggatatgaggagcgaaatttttgcttgaaaccataaagccgatgataaatagcgtgggctttcagagccatgaaacgtaactatgctgagtattttctgaaccgccccgggtttcctggagagtgttttatctgtgaactcaggctgccagatcatcatttccgatggaagcataataagctttttctgcttctgccggaggagtatggcccagcctttccagcaatcgtcg

SEQ ID NO: 865 - DNA, 3127 bp, Escherichia coli
  modified_base (2984)..(2985): a, c, t, g, unknown or other
ttattgatgaagcctcgctaggcacgaggattagttgttccgggcattctgggactgggatgtgcccgtaatgtaatcgttgtaggggatcgtaagcaacttccacatgttcctgtattactcccgaacagcccatctccaccggcagaatactataattgtgagaaatatagtctacttgattcggtttgtatgttgttcaggaacatggtgccagtaacccttcttaaagagcattatcgttgtcatcctaaaatcattcaattttgtaataagcagttttatgataatgctctgataccgttaacggttgattccggtgaagcctcattatctctggtcatcacggcaaaaggaaaccatacccgtaatttttcaaatctcagggagcttgaatctctggaaggtcattactgggatgaagaaagtagcaggggatacattgccccatataatgcacaggttaatctggctgaaaaagtgctgcctgctgattttgtgaaatcgacggtgcataaatttcagggacgggagtgcgatgaaattgtgttttccactgtgctggataagaagcgcagcagccagcacagtcggaacatcgcgtttgttgataatcctgaactggtgaatgtcgctgtttcaagggcccgaaataaatttacactggtgactggtaatgatgtatttgaacgccacgctggacatattgcggcgctgattcgttacatcaaatactacgctgatgacggagaggttttcgagagcccggtcatatcagcatttgatttgctgtacagtgagtatgacaaatcactggaacgactgaatagtagattgaattcaaatgattcacactttaagtcagaacagattgtggcctgcctgttgcgggatatcctgtcgcaggatagttatcggagtatgatgtttcattcacaaatagcgctgaatcagttggtgttgctggagcggggggattttacacaccgtgaacagttattcatgcgtaaccgggccagttgtgactttgttgtttactataaggtcgggaagactccattaggggttattgaagtggatggaggttatcatctgaccagtgttcaggctgaacgtgatgaacttaaaaacagtatactgaagaaatgcggcctgccattgctaagattacgtactatagacagtgatatagaagggaagttgggagcgtttctgtcaggcctgacaggctaaagtctgaataaaaaatattgcagcgggaggtctcaaacctgatttggtcatgtgccacacacaattgtacgaaccccatggacacaggcttctttgttttggttacatcaacgtacgtattcctgatacatataaaaataagtgctattgctcaaagcactcaaagctaacagggaatggttctgttgaataattccttagtgaataaactttatcaggggggattctattacagtgaatacttcctgcaaaatgatatttgaatcgttcaccatctgcatcatatttccttatttacaagttgaaaggatagtatatattgaaaatgcatggattttccaggtgtgttaccagtaagaagcaggtggataaaggatgcgataacaaatccaacaaccagattaatatctgacgagttttatttttattatttatccccaaagcggtgagttattaatgaagtttgtctgaatgtataaacagaattattcgacataaagccaggaaaatgagtgatacgcttttaaccgaaaaaattcttaccggagaaaatgttttgcgtgccgcaatcgcccgcattgagtggatttttgaaacatttccgtcggtatgcctgtctttttcaggtggaaaggattccaccgtgcttttccatcttgtggcagaggtggcccgcaggagaaaacgtcatttctctgttctgttcattgactgggaggcccagtatcagtgcaccattgaacatattcagaaaatgcgggaaatgtaccgggatgtgacggataccttttactgggtggcacttcccctgaccacggttaacggtgtctcgcagtttcagccggagtggatatgctgggagtctggtgtgacctgggttcgccagccaccggaagaggccattacagacatgacgtattttcccttttaccggtatgccatggcgtttgaagaatttgttccggcattttcttcctggtttgccggtaaccggtgtggagtggcaatactgactggtgtccgtgctgatgaatcgctcaatcgctttatgggactggtatctcagcgcaaactgagatatgcagatgataaaccctggaccacagcgtcgcctgaagggttttattacaccatgaatccgttatatgactggaaagcccgcgatatctggatatataacgccagaacctgtgccatctacaatcctctgtatgacctgatgtaccgtgccggcgtgccgttacgcaacatgcgtgtctgtgaaccttttggtcctgaacaacgtaagggactgtggctttaccatgttctggagccggaaacctgggccaggatgtgtgagcgggtgtcaggcgctgccagcggggcgctttatgccaatcaaagcggtgcctattttgccctgcgtaaacgtatatcaaaaccggcccatcacgcctggcgcagctatgcgatgttcctgctggatgtgatgccggaaagaacggcagaacattaccgtaataaaattgctgtctacctgcgctggtatcagacgcggggcttcccggatgacatcccggatgaacaggagaatgacctggggagccgggatattccgtcctggcggcgtatctgtaagacacttataaagaatgatttctggtgccggaccctctccttcagtccgaacaaaccccggcactatgaacgttatctgcagcgtatgaaagaaaggaggaaggaatgggggattctgtgacaccggagannggagataattggcaacatgattcgtcagtacttcagccaggaacgaccagaagaagagaccatacaggcccttggtaatgctgccaacttactgatttagtgtatgatggtgatttaaggtgcttgcgtggcttccatttcc

SEQ ID NO: 866 - DNA, 1509 bp, Escherichia coli
  modified_base (5)..(5): a, c, t, g, unknown or other
  modified_base (8)..(8): a, c, t, g, unknown or other
caatngtngcatcctaaatgggtgcggttgggaatcaccagccttgaagagtatgcccgccactttaactgcgtgatacggaatttttaaaaatcactaaagaacgcccaagagcatgttttttatttagaagaatcaaagcgttgtatttccatgtcatataaaaatcggcaaagttcatatgtaacaaagtgtcccaatcatgccccaaaatgccccacaacaaatatttttgccccatgcatgccccaaaaaatcactttccttcacccttgacactgtttatccatacagttaaaaatgatactgtatacaaacacagtgtagagggtcttttatgcgtattgaaatctgcatagccaaagaaaaatgactaaaatgccaaccggtgctgtggatgcgttaaaggaagaattaacccgacgcatcagtaaacgttatgacgatgtagaggtgatcgtaaaagctaccagcaacgatggcctttctgttacgcgcaccgccgataaagattcagctaaaacttttgttcaggaaactctgaaagatacctgggagtctgctgacgagtggtttgttcactaattaacacgtaaaatcggtaacggctggaaatcattcaatactcgcactatcgaaagttcaccatccaaccgcagcacgttcttgcttaagacgtgctgcggcataatcccaatgattactccctgacaggattcgcaggccactcaatatcaggtgcagttgatgtatcaacacggttcagcaacacccgatactttttccaggcttccagcaatgaggtttcttcctccgttgcaatttccagatctgcagcatcctgaagcggcgcaatatgctcactggctacctgcatcaggttgttttttgtttcttccgcctcccggatccggaacagtttttctgcttccgtatccttcacccaggctgtgccgttccacttctgaaactccccttccggcgataaccaggtaacattttccggtaacggaccgagttcagaaataaataactcgtcccctgacgctacgtcataaaccgttttaccccgatggtcttcaacgagatgccacgatgcctcatcactgttgaaaacagccacaaagccagcaggaatatctggcggtgcaatatcggtactgtttgctggcagacctgtatgaggcggaatatatgcgtcaccttcaccaataaattcattagttccggccagcagattataaatttttatggtccgtggttgttcactcattctgaatgccattatgcaagcctcacaatatagttaaatgcgatgtttttgacggtgttttccgcgttaccagcagcgttaacggtgatggtgtgtccatgtgaaccaatcgcaacggagtgcgtatgagcaccaataccgacagtatgtgcatgtgcgcctgcgcttgcagcagtgccggacagcgagtgggtatgagcaccatctgatgatgtcttccctgcattacgagtctg

SEQ ID NO: 867 - DNA, 4637 bp, Escherichia coli
tggcggtccattatctgcattatgcgttgttagctcagccggacagagcaattgccttctgagcaatcggtcactggttcgaatccagtacaacgcgccatatttatttaccaggctcgcttttgcgggcctttttttatatctgcgccgggtctggtgctgattacttcagccaaaaggaacacctgtatatgaagtgtatattatttaaatgggtactgtgcctgttactgggtttttcttcggtatcctattcccgggagtttacgatagacttttcgacccaacaaagttatgtctcttcgttaaatagtatacggacagagatatcgacccctcttgaacatatatctcaggggaccacatcggtgtctgttattaaccacaccccaccgggcagttattttgctgtggatatacgagggcttgatgtctatcaggcgcgttttgaccatcttcgtctgattattgagcaaaataatttatatgtggccgggttcgttaatacggcaacaaatactttctaccgtttttcagattttacacatatatcagtgcccggtgtgacaacggtttccatgacaacggacagcagttataccactctgcaacgtgtcgcagcgctggaacgttccggaatgcaaatcagtcgtcactcactggtttcatcatatctggcgttaatggagttcagtggtaatacaatgaccagagatgcatccagagcagttctgcgttttgtcactgtcacagcagaagccttacgcttcaggcagatacagagagaatttcgtcaggcactgtctgaaactgctcctgtgtatacgatgacgccgggagacgtggacctcactctgaactgggggcgaatcagcaatgtgcttccggagtatcggggagaggatggtgtcagagtggggagaatatcctttaataatatatcagcgatactggggactgtggccgttatactgaattgccatcatcagggggcgcgttctgttcgcgccgtgaatgaagagagtcaaccagaatgtcagataactggcgacaggcccgttataaaaataaacaatacattatgggaaagtaatacagctgcagcgtttctgaacagaaagtcacagtttttatatacaacgggtaaataaaggagttaagcatgaagaagatgtttatggcggttttatttgcattagcttctgttaatgcaatggcggcggattgtgctaaaggtaaaattgagttttccaagtataatgaggatgacacatttacagtgaaggttgacgggaaagaatactggaccagtcgctggaatctgcaaccgttactgcaaagtgctcagttgacaggaatgactgtcacaatcaaatccagtacctgtgaatcaggctccggatttgctgaagtgcagtttaataatgactgaggcataacctgattcgtggtatgtgggtaacaagtgtaatctgtgtcacaattcagtcagttgacagttgcctgtcagactgagcatttgttaaaaaaatttcgcatggtgaatccccctgtgtggaggggcgactggtgaaaaatccttgcttgtgattcattatcgacacgggttcggtggtaccaggccgaactcaccgggaggcacccggcaccatgcagtatacagagattaggcatataccaaggcctctcatagcaggggcctttttacatgtaaaaaagcccgagtgggttcgggcaattgcatgagatactcgttttaataatcgaaagcattttaaccaggattcataaggctgcgcaactgcgcggcctttttcgtatttcgggctgtagtcttccttctgccattgtcctgtaacttccggacttcagcccgctcctcatctgactcacacattatcccgaccgggaggattcatggcatttaaacactatgacgtggtcagggcggcgtcgccgtcagaccttgcgaaacgaataactcaaaaactgaaggaagggtggcagccttatggtagtgcgctgatttcgacagctggttatggtgcggagttcatccagccagttgtgagtgaggggagcatctcatcaccagaggagccaggcaaccgtccgacgacctcagcgccttctgttgcgccagaatattactatgtgatcgcgcttgctggtcagtccaatggtatgtcatacggtgagggactgccattaccggatacattcgacagccctgatccacgaattaaacagttagcgcgtcgcagtacggtgacaccgggaggtgcagcatgcaaatataacgacatcattccggcggaccattgtctgcatgatgtgcaggacatgagccgccttaaccatccgaaagcggacctgtcaaaggggcagtacggaaccgtggggcaagggctgcatatcgccaaaaaactgctgccgtttataccggcgaatgcgggcattctgctggttccgtgctgtcgtggtggttcagcgttcaccaccggagccgatggcacatacagtgacgcgagtggcgcctcggagaattcaacccgctggggtgtggacaagccgctgtataaggaccttatcggtcgaacaaaagcggcacggagggggacactgagaagaacccgaaaaatgtgctgtttgccgtggtgtggatgcagggggaatttgattttggcggtacgccggcaaatcacgcagcacagtttggtgcgctggttgataaattccgtgcagacctggcggatatggcaggccagtgcgtcggtggctctgctggcggtgttccctggatatgcggggacacgacgtatttctggaagcagaagaacgaatccacgtaccagacggtgtacggcagctacaaaaacaaaacggaaaagaatatccatttcgtaccgttcatgaccgatgagaacggggtgaatgtgccgacgaacaaaccggaagaagacccggacattccgggtatcggatattacggttcgaaatggcgtgacagctcagccacctggacgtcacaggacagggcgagccatttcagttcatgggctcgccgcgggattatttccgaccgtctggcaacggcgattttgcgccatgcgggaagagtggcgctaaacgcgggggcatcatcgacagtatcagaggtgcgcccgtcatcgccttccggtgcagaagccacaggcgtcacaacactgctctcttaccttgccagcgagtcagagggaagcctgaaagtacagggatggtcagccagtggcggcagggcagaagtggtcagcgatgcggagggaaccggaggtaaggcagtgaagctgaccaaggaagccggtaaaagcagctgggtgctggagtacgccgcgggcaacggtgcggctctgttacagaaaggggggcagattcgctgccgctttaaggtttcgggagcgctggctgcgaaccagtatgttatggcgttttactggccggtatcttcactgccacagggcgttgccctgaccggagacggggggaataacctgctggcagcgttctacatccagacagatgcaaaagacctgaatgtgatgtaccacaatgcgaaagtagcgacaaacaacctgaaactgggaacctttggcgcatttgataacgaatggcatatgctggctttccgctttgccgggaataacagccttcaggtgacgccggttattgatggtcaggatggcacaccgttcacgctgacgcagtcaccggtcagtgcatttgcggcggataaactgcatgtgacagacattaccaggaatgcgacttacccggtgctgattgacagcattgcggtggaagtgaacaacgcggatgccgcggcatgataaaaaaagccgccagttgcctgagacctctggcggtgtgagattcatggagaatcaaggaaagatactaccactttcgtcatcggcatttttaaatgaaaactgtttacttagtcaaccataacggtaagaaattatgacatttctgaaccagttaatgctgtacttctgtacggtggtctgtgtgctgtatctcctttcgggtgggtacagggccatgcgtgacttctggcgcagacagattgacaaaagggccgctgagaaaatcagcgccagtcagtcagccggaagcaaacccgaagagccgctcatttagcggcaactttcttaatcacatctttcgacgagaaaatcccatgtcagaaatcacatccctggtcactgcagaagcagtgaaggaagtcctgcgctctgaagaagtccggagcgcactgaaacagaaacttcgccagaacctggaagcgcgtcttgatgcagaagtggatgccattctggatgaactgctgggcgcaccagcagctccggagccggaaggcatcgcgggtgacgggagtgcttcagatagcggtgaacccacaccggacagcgacatgatgatgtaagcatgcgcaagggaccatcggtgtgtgccggtggtctttattattgttgtgagcttccggattgcgggagacggggtatgaaccagatggaaaaaatcacaacaggtgtgtcatacaccacgtcagcggtgggaacgggctactggttcctgcagttgctggacagggt

SEQ ID NO: 868 - DNA, 4634 bp, Escherichia coli
cgccgcacgctacaggatatttcaagattgtcagatcgaaattcccgaaaaggcttctcgttaagcctgtaacttcccctaccatccccgacatcccgtcggggttttcatatctggagacaaaaatttgaaacagatcgctttctacaggcgttctggaaggcccggtgccttccgtgggttaaaagaacgcgtcacctggatgattcagtctcgtggtcgtcctgttactggcagtgaaatagcagagaaatttggtgtttcactttgcgagttcaacaaggtagctcgcggcctgacaaagggcagtaaggttgtgaaaataaaggcttcagaaccattcaccacagacaccggaatcgttgatcgctttttctccctcgaatcaaatcctcgtcgtgacacacctcgctcacgcaatgccgttcctccattcagtcgcagaagccgtgaacacgcagcaaaaaactgtcgcgaggaatacgtgcaaaaggccgaacgccgtcgccgactgattaaagcaggactttacattgatgagtttgaaaacgcgctatgacgaaaaaatacaccctcatttacgcagatcccccctggacattccgcgacaaagcaaccgatggtcaacgcggtgcaagttttaaatatccggtcatgagtcttctggatatctgccgcctcccggtatgggaactggcagccgataattgcctgttgtctatgtggtgggtgcctacacaaccacttgaagcattgaaggttgtagaagcgtggggctttcgtctggtgacgatgaaaggattaacctggaacaaatgcgggaaaagacagaccgacaagctggtcatgggtatgggtagcaccactcgcgctaacagcgaagactgcctttttgcagtgaaaggaaatctgcccgaacgcattaacgccggaataatccagtcattcactgcaccgcgccttgatcactcccgcaagccggatatggctcgagaaaagcttgtgcaacttcttggcgatgttccccggatagaactgttcgcccgccacacctcgcatggatttgatgtatggggtaaccaatgcggcacaccatccattgagatggttccgggtattgttaaatttctggagaaaaccaatgagcgaaaaaacgacgttgacaaaggcatcaccagttgaattaaggcagtgtctggaaatcgcaaatcaacttgccagaagtggaatacgatttgttccaatcccgattacagcagatgcagaacttcatctgtttggtgaaattctttcccgaaagctggatgaactggaaaagctggtagaagaagctgacacctcactaaccgtataacagccccaccgacattaaaatatcaggagaaaaaaatgaacgcagtgctcacagaattgaacaaattaggaaaagcatcagccgaaagtatttctaaaggtctcaatattgatttgaatgacgttattgacactctatggaagttaaaaaaccagggggtagtaactgtaaaaaatggcatctggcaggcagttgcaagggaagtggacaaaaaaccaaatatcgccccagtgcagccagtgcagcacaacattataggtgacctgctacgtaaatcacggaaagaagcgcgccgcgccgggcggaaacagaaacgatgggagggtgcatgtaaggcgttgcaagaactgaataaataccgtgacttgatcaacgaattgtcagagtgagcgaatcacagagagaatattttgagaaacaacccgcgtacattaatattgtttttcctttctctaatgacgggcggtatcctgttattcgcaggaacaacattatttatttttgttgcccggctaactgcgaggataatgacatgaaaatcacatttgaaagttacggtttaacagcaagtgtggttatatccagctctatattcgaaaggcgcaaacatcagcatatcgttgatgcagtgaaactcaaagccccggaagttaccgtcacaacacatggacttttcaggatacgaacgacgttgactacaacacacctctcggcatgccgtgtttatgatatggcactcaaggaatacaaccagtgttcgtcctgatccagcgcgggcagtctttcgttgatgccaacaactatccggtagaaatatgcaaggtaactctgactcaggtgatctaccgaaggctcgacggcagaaccagagccacttcaattagtgcatttaatgaagaatttgagcgaatcgagcacaacgaactgcatatgattaaagcggaaattgagaaggaaaagcatattgccagccttcgaaaaatgcgccgtacatcaatcaactgacaaccgccttcgggcggttttttcttacacatgcagaggcaacttatgcgcgagttagtaaaccaacataaccatggcattcagccagtcatcacacctgttgtacagataaatgcgaatgaatgggtaacactggagcttttaatggctgtaacaggcctgagaaaaggaacaatattacgcgccagggacagtgcgtggatgaacggcagagaatataaacaaatcgcccccgacggaacgccaaagaaaaacagcgaatgtctctatcaccttcctaccatcaacacttggatcaaaaaccaacccttaccatctcaggatgtttaattcttgtccataagagtataacctgagcgtgctcttggacgcaggaggaacaatggcgaattcagcctatccagccggcgttgaaaatcacggaggaaaactccgaataacgtttaagtacaggggtaaacgagtgcgcgaaaatcttcgcgtgcccgatactccgaaaaacagaaagatcgctggtgagttaagggcttctgtctgctttgcaatcagaacgggaacgtttgattatgccgagcgattccctgactcacctaacctgaagctatttggcctggtaaaaaagatatcaccgtcggtgaactggcacagaaatggcttactctgaaagcaatggaaatcagtagtaacgccttaaatcgttatcaatcagtgatgaaaaatatgctaccgaggcttggtcctggcaggctggcgtcatcgattacaaaagaagatctgctgtttatcaggaaagatttactgaccggggaaaagggaagcaggaaaaccagcacgtcccgaaaaggaagaaccgtacccacagtgaactattacatgacaacaacagccggaatgttcagctttgccgccgaaaacgggtatctggagaaaaacccgtttaattcaataacaccgctgaggaaatcaaaaccagtgccggatccactgaccagagatgagtttagccgtctcattgatgcctgccatcatcaacagaccaaaaacctctggacagtggctgtttttacagggatgcgacacggtgaaattgccgcacttgcatgggaggatatcgacctgaaagctggcacgataacagtgcgacgaaattttacaaaaataggtgattttacgctaccaaagaccgacgcaggcactaaccgggttatacatcttctggcaccagcaattgaagcacttaaaaaccaggcgatgcttactcgtcttagcaggcagcatcagatcactgttcaattacgcgagtacggaagaacaattttgcacgagtgcacttttgttttctgtccgcaaatcgttcgcaagaatcacaaggctggtattaactacgcggtaagctccatcggagcgacatgggattcagcaataaaaagagcgggtatccgatcccgtaaagcgtatcagtcacgccatacctatgcgtgctgggctttatctgccggagcaaacccgacatttattgcatcacagatggggcactccagcgccagcatggtctacaatgtttatggtgcatggatgcctgagtgcagcgtgactcaagttgccatgttgaataatgtccttaatgcccgtgccccagacgtgccccaaagtgaccaggaggatgaaataaaattatatttttcaaaatgataaaccatatccttagacatgttgaaaccatgaagcattaaaaacacagaattaccgaagatcgtccaagagcatatacttttcaatatgttagacctcattttgaccataaagaaatcgattttacaccgttctttatacgttcttttttgccccaaatatgccccaaacaaccacactttgccccaatagcgccccaaagatttaaggggatttaagtatatatttcagataattaacgcaagtttacgatgtgaatttacgttaattttctgggtagggtatttaccgtcattcgttcatcaatatttctgcatattgacaaatacgcctgagctatcgcgggagaaatgcaatgaaagcagcaaaaggcgatgttaatcaccctgctcatctctgtattaccgtcattgtgacggcactgataacgaagaaagacctctgcaagggaggaatccctcgccacctctgatgtgtcaggtatcctcaccctccccaatcacattagccccgcacttccgtacggggccatttctgttaatccactcccacttttttgttgtactcgcggttaaaccgatcc

SEQ ID NO: 869 - DNA, 2101 bp, Escherichia coli
  modified_base (1947)..(1948): a, c, t, g, unknown or other
  modified_base (1950)..(1950): a, c, t, g, unknown or other
  modified_base (2070)..(2071): a, c, t, g, unknown or other
  modified_base (2073)..(2073): a, c, t, g, unknown or other
  modified_base (2078)..(2078): a, c, t, g, unknown or other
  modified_base (2091)..(2091): a, c, t, g, unknown or other
  modified_base (2101)..(2101): a, c, t, g, unknown or other
tgtctcagccaggacgtccagcgtcagcaatgagcgttcaattgactcgatacgggcaatattccggtcaagggcctgttcagctttgagtattttgtcgtaaagagcaacgcgggtttccacgtcagttgcctcttccaggtcggcgaacatccctttaagtgccttagttactgaaagtgcgcgggcccgggtgaacaccagttcatcgaacagcaccatgtcggacgcatcatccatgaggttatctgcctcaagatacttcgcatatccacggtgtcttacggcgtgggtgtttcgctgagaaaaagcgtttgaaggtggtaaaagtcgggaaccacgaatccgtttcgtttctgccgaatttgcgcagtttttttcagagttttttgcgcatttttcatcgccggaacccgcgtcattgcagggttcttcatctgagatgtcatgatcgatttcatgatcggttttatgatcaatttcatgatcgattttgcccatttttatacgggttctggcggtgttgtaattaatctttttcttccggcaccagtccagtaatgttattcccgtttcggcatgttcgcgtcggaatgcctgctccagctttttccagtccagctttgccatgtcactttctgacgtcctgtgttaaaaactgatgcataatgaccgctgtgatttttcagatttcacacagcagcaccatatttgatcgatatttgcacaatgcggttgttttatccggtttcttccaccaccgcaccggacaggcggcttcgcgggaaatcgctcccatctcgtgaaaaatgagaaaacccggtgtgcatcgtttttgattatccccgcacactcacgcagataaggtggctgcagtctctgttaatgcgggaatacggcgacgatacggcgcatggctatgtcaggctgaaatgcctttatcaaatccgggtaacgcaatctgcccctgctgctccagcctgtccagccttgccagcaactgaggcttcttcaccctgccccagcgattgagcaaacgacctgacatactggcgacatctttctctttcatgtactccagcattacagcgttgcgctccgcctccagattcgccagaccttgctgaataagctcagccatccagttgaaagcctgaatgtacgcttccttaaaggtcatagcagccttccccgtaaaaccaaataccaacatcgtccaaccgtcttttgtcattcgatatatgggctggggtttaccgttctgtaactcattgttttcatagcaaagcgcaaaattgcgctctgcaaattcttttgagcattgttgaacaacggctcttgttttccgcaatacatctttgtgttctttgccaaatgctacggcaacctttcgggtatccgtcaccggctcgttgcctgtcacaaaaacaagatctcgaaaatcgatgccgttaacgatagttggataattcatcagtgcacaccttttagtgatgaaccttgtcacacaggattccggcccacagaaaggcaccgatcaccaaaccggcatcctcaagggtcatcctgaaaggttctgtgttcataagtcgcgcgtgtgaagcgcgtttactgcggacataaaaaagccccgcatcgcgaggctcattaaatggactttgtgatttgcaaaaaaattatttcagacattgcgtcctgatgtactcctgcaggtagttaacctgcgcagttatcctgtcgattccacttcggagacggtaataattgagttcagcatctgctgtaagtcttgggctttctccatcgcccatgctgctggctccggtcgttgactttgcacaggtggcggcgacttgcaggcgcttacgcccagcagaaacatcagcacggagactttcgatagtcgcattagcatcagcaagctcctttgtgtatctggcgtcgagnncngcaacatcacgctgacgcatctgcatgtcagtaattgccgcgttcgccagcttcagttctctgacatttttgtcgcgctgggctttgtaggtaatggcgttatcacggtaatgattaacnncngactnacaggcagacganggtgcagatn

SEQ ID NO: 870 - DNA, 8200 bp, Escherichia coli
tgatgctgaaattaccgctgctatggaaaataaattgaagatcaacatggaacgccagtggcctgaaccaaaagatggtgagcctcgcttgcacattaaagaacgcggcaactctccggtaactccgggtggttggataagctgtagtgatcgaatgccggaagacaccaaaatgttactggcatttagtcaaggtgaaatcgtggccgcatattggaactgggttgtaaatccaattgattacaaaaaatatagagctttcacgtatttatcaggaaatatcttggatgacgtaactcactggatgccgctaccagaaccgccgaaggaggtacgccaatgacctagcctgaagcatttgcaattgtagtggctgccatttcgatcgcactgattgtttttgcgatttgccgctgggggtaaaatagttcacctgcatggagatttgatgccggggaattgtgggggagcattcaaacctctccccttcccggttaaagactccattgctttgcggtcagagagatacatcagcttcatcagcttaatgaaacgcatagatccgccatgctttttcagcaaatacgctgccatttgcgcaactttttcttcattaaacataaatcggctctctgtctcacatgaaatactctttctgactatatgttaatagctccggttattacaggttaatgtgtgtttatttcttaatcagccccgcacttccgtacggggccatttctgttaatccactcccacttttttgttgtactcgcggttaaaccgatccacggcaaccttcatatcccgctctaccgatttcaccatcgccgactgctgcgccagactgagagaactgtcggcataaatggcatcacgctgtttacgcaaatccttcagtctcttccgggtatcctgcataagcccgttcatcaacaattttccgttgttctcgtcaatgaacgccgttctttctgcaccggtcagactcttcagctctgcgtgatactgcgcaacctctgtcatccggtcgtacatcttctgctggtcaacatacggcatcacctcacccgaaattttccccaggaaaggcacctgctgttccggtatatcaataccattcagcgatttcaccgccgcatccgtggttttggaaatgaagcgccctgtaccaccagagatatagtcaacccagaatttcagcgattccggtgtgatatccaccgcgccggaacgatactggctgccacctgagaacgcattcagccagaatgcaaacgccttgtacgcttctggcgttgaacgtcttcccagctggctgtcaggttttggtgtaccaaacggcatgttctcctggtaaatctgcgcccccatgaagttttcattcatggaaagattcgcaaacggacgcagaatggtcggcgctgcatttttcagcaatgcccccgacaacgtttccgacgtctcactgccaatcgggctgaatgcaccaagcacaccaccaacaacattaccggcagcacgggaagcagtcaggtcacccgccgccacaccttcagcggtatgaccaagcaggaagaaaacgttgtacccgtaaggcagaggaatactccagtactcaccggccttgcccccgaacaccgatttcataatgacgaggttacgctctttcacatgagacggcaccttgtcataccagttaaccccgtcatcatcctcacccgcaacactgcggttaagcgagccaagcagataacccgctcccacagctgcaagcacgattttctgcggtacattgagattcttccagcgaaggcgctccagtaacggcccgtcgccattaagatgtccgagcgttctcaccaggtttgcggtcccctgaatgctggcgttggcaaacatgtacagcgagttcatcagcgctccctgctcaccacgacggttaaagttcaccgtcatgtttttggcaagagacgccgcctgctggcgtgacaaaccggcatcacgggcgtgcttataggcagaaagacgcagagcgttttcaaccgcaccgttggcatcctcgacaaggttaaggaacgaatgccatgcaccgatactctggcctttccatccccccttcgccagcgacacaaggcgatccatttccttctgctggccctcaaggtcacccatgttaaaccagccggttttacctccgtcctcaacaaactctttccacaccttctgccactgtgcacctttgcccgtgagggttttaccacgcagactggcgtatacggctgacatggcagaacggctgtctttcaccacagccagcgcggataagttatccagccctttcagtttaccgtcgctccttccctgctcagccttcaggttcatcaccgcagtctgcacgtcacggatgaagttactgaccagaaattccgggttatacgacgtgttcaccgttgccaggaagcggttaactttccccagcgtacgaacaaaggcattactggtttccggccccatactcttcatcgcacgcatcaggcgcggatcatgaagtttaatgtagtaagttttgccgtcctttttggtggtgaagtaccgatccgccatcattgccatcggtacagggcgttcgacaacttcgcgaatggtttcaccagtttcctggtccttgcgctctgcaatcacacgcatggtatccggtctgtcatcagtgaatacctgccagtaatccttgtcgggattatcctgcaccagtttcaggaaggcgttacccacttcatttttgcgatggcggatcagcgattcactcaaatcctgtatcgcctgagtggaaggagactgtgcccgggatgcacgccccatggcctgcctactttcacgcccgccgatggtgaagcccttacctgtacggggcagtgacaccacaccgtcaacatcctgacctttcaggggaacgtagtaacggtaggcgttctgccaggcatccaccacaccgttctcttcaagtccggcctcacggataagctcacggcgacgggccagcatatcgtcaataatccctgccagacggtcatactgtgcctgtttgccactgttacgcacacgctgcatgatttccgccgcttccgcgttggtcatccccgaaccgccgtccggcattttcgggttgattttcgcaatatgcacgttacgttccggcgcgtgacgggcgtagaggtactcatccagatcggcctgcgcaattttgtagtccgccagcaatttagccagcggctgaacgtagcgctccttcatcacgttcaggtcgttttccgccttcccgtggaagagttcttcagccatataagcgttattactgtcatccactttgccgccagttttacggatattctcctgaacagccttcagcacctggaatttatcctgcatctggcgaacaaaacgcgatgcaattgtctcttccggcgtcagactgctggtacgggagtaatacggccccttgcgaatatcttcaggatagagtattttatcaacagagccgcgataagaatgttcccctttgggcaattggagccctctgtgcagaaggttatcgcggcttaatttttctctccggtacaacgttaaaccggtcatttccatactcttcagttttttcccattttccgtaccgtaaacagaagccaccttgttgatttccagacgcgaccggacagccttcatgtgtaccgctgacaccaccggatcaccatttttatccacggcatcaagcagcatcacaaccgcgtttctttctgtcgcggaacggtaaattgcatccggatcgtgcatcagttccggtagtctctcgataacatccatcggcaccacatgtttcacaccattggtggccttacgcacagtatcgcgggaaataaccagcggcaaatccggtgcaccaaggtgacgcaataccggcggcgtacgcccgatgtttaccgttaaatccgtggagcgcagagacttcatcattctggcaaggtcatcacgataacgctcgccctcaccttccggcactttgaacggatcacgcttaccactacgggagtactgagacgatgcgcccgcgccatcctcacgcggcgtgtaaccttcccgcacacgctggcctaacgtacgaatagtctcgcgaacaagtctgatatcgttcagttccgtcggcttcagtaaccccgtacgacgcagtacccctttgaccagggcaacaacacgctcccatgccgccacgaatttattcggctgtttctccgccatatgtgccagaaattcacccgcctgtacttccggtgattccttaccataggaagcatcaaccttacgccaggcttcacggatggtgacgttatcactgtcgcgggttttcagcacggttttgataatcgtctgatattccgctggtgtgacaacatgctccatggcatggtgaatgatctcgtgacgcagcttctcgcgaacggtccgcccgtcagggatgttatccgccaccaggacaatttctcgtttatccggacgatagaatgcgtgcaccctgccgtaaccatcgaacaattcacccgccagcgcttcagcctctttctgtgacttcaccacacggaccttcaggtcactgtccttaatgccgctcatcacgccacgggcaaccgcttcaacctgcgggaccgggctgcctttggcttccgcactacggttaacatccgaaatgagattaccttcaggtgtgcgggtaacgcccttacgggaataaaacgcaacgcccttgtccgtctcacgggttttcagggtgcggaacaggtgatcgaatgcctcacgaataccgccatccagttccgcattcgtcggataagcccaggtgttatctgtgttgtgctcaggtgccttacggatattgaccagataatcattctccacgccagccatacgcgccttatcctgaacataacgctcaaaggcacgtgccgccatttcaacatccgttgaccagtacggttttgagcgcacctcatcgagaagcactgaacgacgcggcatgtcactgtttttaatggcctgaatcacacctttaaaagcatcgtaaacctcctgacgtaccggatattcagcatcaacatacctgccgtctttaaatatgcgcctgacacgctgtgcttccgtcataaagtcgccacctgacgtaattttcccgtcattggaaacgtcataacgaccaaaataattatccagagaatggaaccattcgtgcgccagcgcacccggtccgttaccttttgtcaggttgattgccacctcacccggctcatagtgtgctgccgccttacccttaccacgggcaccaaatgccaggccaagacgaccgttcagggaaagcgcttttgtcggtacattcaatacttccgcaaggtcatgcagcgagtcataagcccggttcaaatcagcctgacgacgcggaccttccacgtagttaccaaactgcacaccacggaaaccaaacgcatcactgaactgctccggtgaaacatcccctttacggcgttctggtccggtacggtcgcggttggtggcgttacgctgctcctcacgcgaaatctcccgcatctccttcacatgacgaacaagctcatcacgatgtgaatcaatgtacttacgcgcatcactggctgacttaaagccacctctcacccgcattttgtttttgccataagcgataaaaatatcgccactgcgggtattccggtaaacgtcaaagcggattttgtcatccggtgacggtgccgttttttcatctcctttcgcctgtgacttttcctccagctctgcaaaccagactttcgcctttgtcagtaattcatccctgctttccgagaaaaagaggttagtccccttattgtccttattgcgcagtgaataaagtttctgtggcggatcgtaacgcttccctcctgccgcctgatacacacccgataccacccgataagcagaagccttgtccatctgtgagggtggcagagtgcgtaacagttgccaggtatccgcgtaacgggagggcattctgccttccatccattctgcgaggcgtttcgcgctgaccgttccgttaagcatttccgatacactgtgtcgtactttttttacgctctccccccagccagccgtattgtgtttcgtcttcgccggaatatcgctacgatacagcgctatcattgccagggtgtcagcatcagccccttcgctcgccagttttgcgtagtccggtttcgggaacagtttgctcagcggctgcgtggcataatccctgtcttccagcgttttacccagtgtttcagcaagctgtgcataacggtgtttggctgcccctttaatttcctcgccaaagtcttcaatttttttgcccctgacttcacctccgcgcacagtagcttccctgtcagtagagacagttgtttcagattcaggtgcgattgtctcaggctgcgggatgtcacgatttcctccggcctgtcgacgtacttctgcctgctgtgcgagctcaggcaatgagttacgaacagttcggggaagctgatcaggctgaggcatacggacattgtgtgtaatgtccggagccggtagcccttcacgtaccggtgctgtcgcgttctgcgcatccggtgacggcagaccacgacgaaccatttcaccctcgagtgtttccccctggcgaccagcggcgttttccggtgccggagcttgtcctttctggaaactctggcccttaacctcaccggttgtggtaaaacgaccaccacgtccggcctgattttcatccggcgtacgcgccacttctcccggtaacggatatccctgtccgggatgaatatcgccgggagcgggcaggcgcggacgctcagttaactcctgtgctgtcggaccggcatcaccttcagccatctgtgaacgtacaagctcctccgccgtcggcgcgttgccacgggcaaggcgggcctgtacctccgtatcatcccccgtgaaaccacggaatcgcgggtcacgcatgaacgcgggctgctccatcgggtcagcatcagcaatacgctctctgtcagccagggtgttaatggtttccgttgccacatcttcagagaacgcaggattatccatttcaacggcatactgattctcgcctttcttcactacggacggtttcaggccggtggcgccggcattacggaaaacatcactccccatggcgcttttctcatccgtgaaataacggttgtccgggcgcaccttctcaatgcgttccgctggtctggacgcaccattcccgttaatttcaatgcggacttcattcgggtcccggaaccgcaccgtcgggtaaatgctcccgttaccatcctccgcattttcaggctgtgactgtgcttccggcgtcacttcctgttgtgggcgaatgacttctcgtattgcctgaaactgttgttcttcagtctcggtgcgcccctctttctggctgagtctgcggtattcctcaagcagttcagaacgcggcttcgccttcagctcattcatcacagcctgtcgcttcgtctgttcgtccagttcattcaacaactggctggcagcttcccggcgatgagctgcggatgcgtcaccctctgttgccatatccgcatcagcatactgctccagaagctgctcgcgattcatgccctgcatggattcacgctgctgcgccaccggatcaacagattctggttgcggggctgcgtcgtcctgctgcacggtttcagcatcacgcatggcggtttcttctgcggcctgacgtctgccacgatatccggcaaccgcaccgaatggagcccccatcgcagcaccaagggcagcaccttcgatcgttgcgtcagccacgccctcccatggcgatacatccattccggcggtctcacgcaatgccgtgttttcctgatagcgtgaatagccgccctgcgccgcattaatcgccccctgtgcagtggcatttctgacaatgccgcttttaacggtcttcgctgtgcctcgtgtcaccagattaaacagttgtgcgtcacccagttttgccgccatggcattcacagccagcaattcaggatcggttgccagctgcgcgcgcacctcatcggcaacacgctcttttgccagatccatt

SEQ ID NO: 871 - DNA, 7032 bp, Escherichia coli
ccaggtcttcatgtaattccttcgcctcctcaatggtgaaaccaccaggcagaagagccggagttaccggagagctggttgacgcttccgggattttccgaaaattattggttgacgaatctttattttcccgaaagtttccggactgaagcatggcttcgcggcaatcgttccagcctgtagcgtatgcagccgctttgctgctgccttcaactggcgcatcctgccaatacatttcttccggcactatcggcgctggaggggcggcaaatagatatccgccaaagtcaggaagctctctaatggcctgtacgaatttttgtttgcctacgtcaacccctaatgggtaatgagctataatctttgccaccggctctgcttccagcgatgccagcgcaatccgtgccagctcttccgcttcttctgctggaagcacaacgttgctacccggtccgtatgtttcgcgccaatgctggattgtcagcagtcgatctttggtaaaagtggtcatagctatttcaccttaatctcaacatttcgcagctttagctctactggcaggtctgactttcctgttaatgctaatgcgagattttctggagtagtgagaacagttattgttttccccctcgccagacgaataatcatgtgtatctcgctatcgtcacatgctcctggtcgaacaattgagatttgtccgttcatctcactctcctttgatgcgaatgccagtagcgcggattgcatcgatgacttcagaaactttgtatgccattaccgtttggtaatcatcgtgaaaatctgttcgatgaagcatgctgctacgttccgggagcagtatttcccgcgcttccagttctgcaatgcgcttttttgctgcttccagttcatccagtaattccagcacggtagccggattagccttggcaacaaaatcccggactggcttacaatcaatctccgcaatgggttgatacgatgtgtagccatgctgtcttgtataactaccgtgacgaataacgaaaaaatcaccatttatttttttagcctgccacttatcttcaccggctttctctgccgcttcacgcagtgcctgatagtcaatcttgctcactggttgcctcctttgcgaagccgttccgcccattcttcaagggatttctctgcatattcaccggacaggccatcaatcggatgcgattcattagctaactcttcttttgctgacagaatcatgcgcgtaacgtcgaaaacttcacgtaaagacttattgataaatccgtggttgaaagcagcagcaagacggcttgcggtatagttaatcccctcgttgcgagcctccgcacgaatttcagccagaaaagcatcggtggctggaatttgcggcatccctccatctgttgcgcagatatacgcatcagatagctcatcctgctcgccatcaaacacgtagcaactctgtgcgataaatttattcagccccgcattctccgccgccagagccgaaaacttctcgtgtgccaacttaacagccgaatcagcctgcttaattgactcaatcgctttctgttggtcttcggccagcttcgctaaattagcctccagttcggctatgcgttcgtttaatgcatctcgttcatccagtagtgacagcacggtttctggcccggccataattttaaaggcgtgaatcgcatcaatatcaataccaagctccttgagcttcttttcgcttaataaatcatcatcacctggtaatattgacagatgtgtcatcgctgtaattgcgcgttccgacacgtcacgcaatacctgatagtcaatttcggttgtcatattttcgtctcgttatgggaggggaattggttgtaagctggaattgccggatgtttacccgtgtccggcgcacgacctcacgttgcagcgtacgagaatagactattgctcagtatcgtttgatgtcggctgaggacattcgccttgctctcacaacagagcaagaagcatggacaccccctcacgatgtgatgattggtgagtgtcgatccctgaatgattgatgttgttaaactcaaacatcttgctcctggcaatagcctcaacggtattccagaatactaatagttctgttttctgctctgttttatcagcaacaggaagtttgatatgttgttgacatttattaatgcaaccattttgaatatgttcctcgtgcttttcattgtcataagcatacagcccgacaaaaacatctcgcacgttacgggaaatattttccagattcgtctttggttcctttattaaattaagcaccgataaatgggctttaagcgtatccgcagctattttctgaatatccgctggtaaatctttaaattgcatagtataccctccaagaactgtgtattttctcgtgaaatatgagcgatatgtcgtgacgtccctgtcacagatttcatcacactgagaacgtgccgatgaaggttaagatatcttcttcttcgaaacgctctttcagcaggtcacggaactctttggcaatttcttcttccgcagcttcaacacgcacgatacgtagcaccagaacaggctgttcgcttgtcagaatgcttaatcgcagcgtgaattccctgttgcccaggccctcgtatgggatgcattcaaagcggaaagtggcaggcatgatttctttgcttttagcctccacggactccatgactgagcggctaccgctgaagttttgctcttcatattcagcactgcgttttgcatcgatggtaagacgacggacagcagagatagcctgtttgatatccagcacattaccgtcgctgtcataggctgtgaggaagtcggcccagtcttccagccattcagcgagagatttctggagttgttttttgccgtcaacgtcacgcaatgcgcgatatggtgatgtggctttcagttccagcagtgccttgttgtcagcgtgtccaggttgctccagagtgccgatattgaacacagtgactgctttcatcgtttccgcgttaatgaagcagcgggagtgctcatcggcataccctttgctgtattcaacaaagtcatcaatactggttgtggtcatgactccacggaaacgaaaacgttctgtcatgaatcgttccagactttcgatatttacattgtccggcaataacgcaacagggcattccgtaagcggcaaattttcaccagaaaaagcagtagtggtgagttttacaatttctttaatggcattgctatctaactgagacatgtatatttacctttaatttatgtatttagggataatgcgcgagcgttttaaggcggggaatattcagcgtaaaacagcgtcatgttggccctgtttatcaaaaagctgtccctggtctttctggaacaaagtaagctcaccacctttatttacaaacatcggggtgttagttgtgtcttcttctgatttactaccacgcattgtcgggcgtgtgaattttagtttatgggaaactgatacgcgattttcatcaagtgaagataattcgaattcaacacatacctttccttttttgtttgtgctgtttacgccaaaggcaacttcacttaataccgcgccaagtttgttaacaaataccccgccgtcgaggtcgttaatgaaaacattaacatcagtttgatgctggttcatattaatatctccgtgtagaggtgtgttaaggcttcagttgttcactgcatttaaagcctggttttgtttgtgaattaaaaactatcgctgccgtactgccagtaacctgggtcgtccgtgtgattcgggtttacgtttttgctgcgattgtctttgtctttgagagtggaaaccatatttgctaccgtttctggtttctttccttcagctttttctttcagtgtctgccctgtttctgcaatgaatggaatgcggatttccatctggtaaccgtctgcgccagtctttctgtttgtggttaatactttctggaggacgagtccgattttctttccgtgaaactcaggtgcaacatatttactgacggaaaccatatgttgcgttaactgcccaattcctgtgcatcccatcatggcgtgaataatgctcgccccaaatttattttcagtaccgtcattcttctgaacacaaacactgagatattggattttccgtccgtcgtcggattctccagaaaactcaatgaatcgggcacctttttctgattgcttgagttctgcttcggtgatgttaatgatatgcgcacccgtttcggtaataaaactaccttgtccggcggtcagtgctgattcttcgttataagtaaaaatcacttcatccattagttattaaccccccattgctccccaaatacaaaaccaatttcagccagtgccacgtccattttgtcgatgaactccggcaccatctcatcaaaactcgccatgtacttttcatcccgctcaaccacgacataatgcaggccttcacgcttcatgcgtgggtcgtagttggcgaagtaccaggcgtccttgtctgtaacccacatgctgaattgcacctgggccatgtaagcaggcttgatagcgtcaaagccgccaagccggaatttcatgaagtcgcgggaagtaaaagggcatttaagctcaagaccgttaccgtcgctgcataaaccgtcgggagagcaggcggtgcgcatgctttcgtcacgaaaaattattggcgtttccgagacggtaacatccgcgataaattcgaagagggcacgggcatcatcttcgtattgctttccccatgcgagcgacttagcgttaacttccggtgccacgccagtacaaacttcagccagcagggtgtggaagtatgacatttttgtatcaggccatttgctgccggaacgtggctttgctatcacattgtgaacttctgaagcagtgataacaccgagtctcagcttgtgccatccatcatcgccctggtcgaggctggtaatatccacgccagttcgctggagaataatttctggtgtcatgacacggcctcgctgttattttccgtggtggcgtgaattttcgcttccgccgtggccttgtttctggcagctttctttttgacaaaatcaagcgttttgacagcttcttcctgactgagatattcatgtgatgcaatcgtgcgacggaatgttttggaacataagggaagcaggtcatcccatgtcttgttaatttcggtgattgcctgagtgatctcattgataatctcatctgatgcgggagtgacgtcacgctcagggatgtgatcagcattcaggatgataccttcaccgccctgagtgttcaggtagtcgatagctgtatccaggcgatcgcgacggggccagtatttgctggcgcgcttaacaatggcttttctggccatttcatcggggaaactatcccacgggctacttcctccgttatttccggctttgctgcacgccctgatgacctcgatttccctgttgctcatctcttcggtcagatagtcgccttcggatgtttttacgacacaataaccgccaatgcgtgcgcccctgtctacgaaggggttgtatttgtgcgtgggggcgcagtcaataccgttggactcgtaaatgtccttctcgtaaacaagtttgcattgcccccactgaatggctcctgtgacctgtgccagatgcagaagccccatataactgatatccaggcatacagccttttttcgtgggaccagatacgccagcttgctggccgggttcagggttatgccgatggcggcaacattgatgatagcgttctgtgcgctgggcagatttgcccttgctgtgtcagccagaaaggcatttttctggaattgctgaattgcaaactgactttccttcgcccatgtcagcgtcggttcagttaatgcctcgcagaaaaagcgctcctgctgcttaacaaattcaacgatatcgaacattttttggtcctgaaaatcagaaaggacagggggagaattttctctcccattcttcttccgcccgagcataggcgatcgctgagatataatcgttgtacgcctcttcagctttttcgccagtgagtgctagttgggcttctttgggtaaaaaaaggctgctcataagcaatggtttatcggggaacatgctgataagctcctgcgcccgatcatcaatccatttatccttttcatcctgaatttgctgattaatccagcgacgctcctctatgcggtcgcaggtgaggtatgcgttcatggcggaactcctgattccggttaatgcattaaattaatttgtcgggaaagctgacatacagggcagttacattcttcctcctgctccttagcgaagaaatatgcagcggcctgtaatgcgatatcttctggatgttccgcgataaacataacattgccttccgtatcaataacagaaatagcctcatcagacaggacgacaaaataggcgatgattttatcatccataaaaacttctcccattatcgttcctgctggagttacgacgctttttacattgatatttattttttgattgagcatgatatttcccttcaggctggtgagattaacggttggcctttattgttcaggtaaacttctattgcatctgagataatgcgaatttttcaatcagtgaatgtgcgtaaagtgcattattaacgttcgctgacgccatgtaataacgcccgttgtaaagaattgctgtgccgggtttaacgtcctcgcgagaaactaatgcggttccgtagtgaggtttgagcatgacaaatcctccggttaattaatccagatatttaatttaatccccgatatgtggtcggggatggggttaattaaagatttacgttgaaaccaaagcgggaagacttttctgatgtacgggaaatatccagcaatttacggcgcatttcttccgtcagatgcttgaaggcgttaaattcggcgacagcggcgtcaacgttatagcctttgctgtgtagctc

SEQ ID NO: 872 - DNA, 9702 bp, Escherichia coli
gtgtagctcattgaggatgcgcatagttgggcttggcatatcgaagagcacggaagcatcaaggctgataaccttgcgatcaacatagttcatcgtggcgtaggggtgatgctctgaaaaccacgacaaagggaaattgatattcatcgcaggagaagacagggccagttgtttctgttcccatagttgtttttccatgcgatcgaattcagcaatgtaggcttccttgaatgcagctgcttttttgccggtgaagcccatcaccagaaaaacgaagccgtttttggtgatttggtacattgggcgttgttcgcctttggcgtcggtgtaggtaacgtcctcaaaattgagggcgttaaatttctctgagcattcaatatttgcaatggcgcgcaatacgttatcgtgtcgcttgcaaaaatattcggcaacggcaaaggacgtagtaacagcgcgaccattggaaatggtgatttcaggttgagaaaggactgggatagtagccataatggcagcctccttgattggtgattgataaccaccgctggaggtagcaagctcgctggcggtggactgtacagggttgctacaactggcaatcaagggaaccagcccgaccgaagtcggccccatacagcccaccattgataagatgtgcgtgtatgtcgatacaaaaaaagacgctggcgcgtctgtatcgcctcgattgtcagcggggtagcaatcccgacacccgttttatgaggtgttcgccaaatatagccccgacatcacacgcagtcaataccgttctttctcagaaacgctttggcggtgccgcctgcaccccaaaacattccctgtattggtcagcgccaacttcctgccagtgttgcccgttctcacgccgttctcgctctcgcgcggggatactctctcatcgaccggatcgcacccgatgatacagcacgtttacgtgtaggggtctaaacaggtcattgacgctgtaaagctccagattgttaaagagcattttgcggcgggttaagtcgcgccgtacgactgatttatgtagccctgtgtaagggcgcgatgtttctggcttgaaataaatataacttgcggtgattttcatgtaaataccgttggtgctttttaagggcgagaaattattacttaactgatttttaaagtgatttattttttaagggggcagataacaggaggggatatgcaaagaaaaacccggcgcatgggccgggctatttatctggtcctgttctcattcagtagagtaggggccaagaaatcgcactccgttgaagtgaataagatgagaaggtgcatcagccacccatacctctgtttcccatgcgatttcaccaagatatcgccccatgatggagcgatttggaaaagcggtcacatagacaagtccggctgttgatccggcaaacagcctggcaagctcagcatgccgcttcccatcaaccggtccatgactggtgacagactcaaccagtagcagccagtttttcgcagtaaaatgtagcaccacatctggcattttaccgtgtgaatccacatcaacacctagcccggccagcagtggagcgtcgaagtagccccacttttcgccagtgtcgccagcatagaccagcacgctacccggagcaaaacgtggggcgaagtcctctattatggcacggataagttcgctgtgctcgccgggactgagggttatttgctggcccgcagcaatttcaacagggatacgattctgttcgcgctccttagcatagcgggtaaccagcgtttcacgctcggctaaataggttgcaaggctatcgtgccatgccgggctgccgaaagtgcgtagcatggacagagcagcaggttcgatctgataaacagccttcgggctgttcactgggcgatcgggcttgtccggattgtagagggctactccagcagcgcagaactgatgcatagactggcggcggaatgtctcacgagtattgggtgcgtagaccttgccgtagtgctcccgaacccaattcatgattggtgtaatgcccacaagcggattttccgcgtcggcccatgcttttcccggtgtgaggttcaggagtgccagcaaacacaaagcagaacgctcattctgctgcgctctgggcaggcctaaggatgctataatttgctgagcggcctcaatataatcattttggttgttcatgcagtcagagctcctagcttagcgtcaatatgttcttgcgtgagagtttcttgttgcatagcccacttgccaagctctatcagagtgtcacggcttgggtacttaatcatcttgaggtcggttgcattgacctgtgtatgcccgttgaagcgacggaaatacttatccactgcggtagtgttcaggaacacggccaagccacgggccagcgcctcgggtaacccatgtttgttctcatgaaacacgttcatgtgattttcaaatcccaacactgaatactcactgaaggtagcaggatcaacgacgcttgctaccactcggcgcttttcctccttcgacgagaaacgacgcaccacacaataaaaaccgttcgggtaaagccacttttctgtctcgtcgttgcgcatgattgcgttgggtttcttcaaaccttccacaggccagacagtgctactcatactcaaatggctcgggtagatcaggggaacagttccttcttctggcatgctgcgcaaatgagctttcagtcggaaatcaactatcggtccggtcgataccttcacgccaatatcagccagcgaacattgtacggcagatgataactcaatggtgcttttctcgagcgtggtcggcacatgaataaaccgctccgaatcgtccgggtacacaatctggtcaaatgggtgttcgtaggtgactaggtcaaaaaagctatcatcggtcgaagttgtgactgtaacagcctcctgacggcctccacgctccaggcggatgataatattttcctgcaacacatcgtcatccctgaaagctttgctacgtgattcgaacaaatgaatatggcggattgctgcccgctcaagtatgaaattacggaacggacggtaatacggtccgttgcagaaactacgtgggattatggccactatctgcccgccaggtgcaacctcacctacagccagtgcaacaaaggcggaatacagatttaccgtctcgataccgacagtgcgaagagcctgccggtgggctgactggctattgatcttcttgtaaggcggattaagtattgcatgggtataacctcgatcctgtagaccttcggcggttgccagctcaatataatccccttcgatgatgcggggcgtcactctcctgtacccggttaagtgcttcgcaaggtgaccacacagctttttgtcgatttcgtaggctgttgcctcgacagactcaaagccaaactcgccaaccagccaacggtcgaggaaggcgcaagacagtgcgcctaaaccagcgcctgcgtccagtagacggcaagttttcattgtgctcggtggaaacaaggaggccataaaacgggccacgccagaaggcgtcatgaactggccgaactctgctttgtgtttacgcgcggtacggggagacagctcgcgacgcacgctgtctgcgacgtctagcttttgaagcataactaatcctctttacgtggcatgatgatgccaacgtgcttttgacatcctccacattcttcaggcgtgaaggatgtcaaatcactctgtgagctcaatcaaaagtctcatcattccactgcgatttgatgacctttccgacaaactggcagttttcgttacactcaatcatgtcgaatcgtgggttgagcggctccaggtacgctttaccgctctcacgaatgaatcgtttgaaggtaaattcatcgccgttcattcgggccacgcaaaaatcgccatcctcgatttcccgttcagggtcaacgagtatcagcataccttcagggaagctgggtttaccaccctgcggtgcggtcattgaatgccccttgacctccagccagaacgacctgtcactggcttttgtggtggtggagatccatttaatcgcatcttttgcggtgtacgaaatatcatccattgagaatgcgccagcttgtacgcaggagagtaacggatattcgtaagcggggacacgagttaatggctcttcaattgcgagcgccatttctgcaatagattttgccaggctgggactgaaatctccgacctttacattcagtatcttagcaagctgtgctgcgtggctggcatttatggcgttgatgccagccattagctgattaacagcgctttgggtaacacctaattcataggctaatgattcctgcgacaggcctaactctttctttttagcgttaaaaatacttttcagacgcttggcgtcttccagttgctcaggggttaacggtttctttttcatgttcataccatatcacctttggttatatgtaatgaaatatctgcggtgttgacattttaataactgtgcgtaatgatatgggcattttgaaggagtcagttatggcgatgaaaaaagagaccctggctgattacgtatacaggttcggccaaaagaaagccgctaaggactttggcgtggcgcagagtgcaatcagtaaagcgcttctcgtcggacgagaaatatacgtcaaaacctttgatgacggcacagttgaggcggaagaggttcgtccgttccctgcgttcgtaagaggcgatgattaatcctggacacacagcccatcggaggtgtgagtgaacaggcaaatcaaaacggttatgcccgagcagtactgtgatgctgatcgggactggatacaggagcaattgttacagctagacccgaccacccgggtaaaaattgcagcagagtacgcgagagtgtaccaggaagagtgggacaaggagcctgtatcgttcaggaagggcaacagggcaagacggagcgccaacacccggttacgggtgtatgtccagaagtacgcgagagccagccgtggctggatgctttcgccagtagcggtacggaagtttcccccgacaccatgatggcggttagttgcgctagagataatttcaagtgcaactaatttcctgaaaggaagcgaggagggggtaagggggtggagtcgttggtaaggcctgtatcccttggcctaggccagaaggcaggtacataggttaggtagatcactgtataagcgcgcgatagtttctggtgaaatgattatcgagctaactattgagtgataaactatgtcggcagcaaccaaatcggcactgatccgtacactgagcactgtaccactgagaacagaggagcgttacagctttctggctgatgttgtaacgatccttgagtcacaggggatgcatgtggcaagcaatgtcacagtaagaatcgatggcagaaatttccgtgttgatattctcgcaacagcaaaaactggtgggagtgtggctatcgagatcgatcgtagctctccgcgaccccgctcagtcatgaaattgcgtgaattggcacgtcgtggcactgaaggctttgtgttgcttcgaatgccaaagaaactgaccagttatagcgatgctgggatcgatatcatcccggcgaatggcaagggggcgtcatgctgaaaatcaccccaaactttgctcaggagcgcggtttaaaccagctgcggcaccagtggaaacagcatcgcacgtacctgatgtatgcacccactggctctggcaaaactggtcttgcagcattcgtcactgccggaatggttgaacgtggtatgcgggtgatgtttgtctgtccgtacaccatcctgctgaaccagacagcggaacgtttcaccgaatacggtttgccgtgggaagaaatcagttttgtatggcgtgatcaccctaactatgacccgtcacgactgattcagattgccagtgccgacacgctgatccgtcgtgagtttcctgacaacatcgatctgctgatcatcgatgaagcacacatgaagcgtcgtgcgttacttgaggttatccgggacaaagatatcagggttcttgggctttccggcaccccgttcgcagcctggatggggaagtactacgaatgcctgatcaagcctacaacgattcgtgaacttattcagcgtggtgatctgagcgattatgagttttttgccccctcaatgcctgatctggctggcgtaaaaaccagtaacaccgtatttggacgggattacaacgaggaacagctcgcatccatcatggggagttcggatctggttggcgatatcgtcagcaactggcttgagaatggcgaggatttaccgacgatctgcttctgcgtgaatgtggctcatgcgaactttgttacccgtgagtttttacagtctggcattggcgcagaggtgatgacggcagataccccccatgatgaacgacaggacatcattcgccgttttgaagagggtgcgaccaaaataattgtcaacgttggcgtactggttgcgggatttgacagcgatgttcgctgcctgatctacgcccgtccgaccaaatcagaaatccgctggttgcagtgcatcgggagagcgttacgtactgcgtctggtaaaaaacgcgcattgattttcgaccattccggcacggttcatcggctgggcttccccgaggatatcgagtatgacgaacttccgggaaaaaatgacggaatgaaagcgtctgctggcgggagtgaggttaaggctgagaaacttcccagggaatgccccaaatgccacttcatgaagcctgctggcgtgcatatgtgtcccaaatgtggatttcgtcctcttggtggtgatgacgtggcgacagatcgcgatcgtaagctttcacgcgtcaacaaagggaaacgcgaatacacccgtgaggaaaaacagcgttggtggagcgagatcaaggggtatcagaattaccgcaacgcgacaggtaagccactgagtgacggatggtgtgctcatacctacaaggagaagttcggggtttggcctaaaggcttcagtaatgcgccgctgcaaacctcagttgaagtgtacaacttcatcaagtcaaagaccattgcctatgccaaagggcgcaagaaagccatgacaggaggccagcatgcgaactagagatgcagccgtggggcactggagccggatttttgaatattacggcatgcctcctgttactggtgtgaaacattacaacggaccctgcccgatatgtggtgccagaggtaaatttcgctgtgatgataaggatggttccggttcatggatttgcgtctgtggtcacggggacgggatgaatctgttgcaacttgccacgggtaagccctgggtgacgttgtgtgatgaaatcgatcggctgatcggaaatacctggaagagggagaaagtcagccagcctgtaacagagataagcagaaagcgggagctggtcatagataagtttgccggactcccgtgtctgcggggtacaacaggtgaggcgtacctgcaggggaggggaatactccagttaccgaccgaatccgtgcgtttttgtgaccgtcagatcgccagcgggcgcgaatatcaggcaatttacgccattgcaacagatgacaaaggttctctttgctatctgcatcgtacgttgctggatggtgatcgcaaggcgaatgtagaggcggctaaaaaatgaccgcgctacaggagttgcctggtttgcagcatgccaaatcggtggcaatacgcctgtatccggtgtcgtccactctggggatagccgagggtatcgaaactgcgctttcatgccgtcaaatcttccgctgcaatgtgtggtcaacaatgaactccggttttatggagaagttcattgcgccacctggcgttaatcacctgattatctttgctgacaatgatgcgcacggcgcaggtctggcggctgcctttaaatgtgggcataagaatctcatgagttgcaatgacgttgagaaagtcagcattcgctggcctgacttgccggattttaacgacatgctcattcaggggtgtgaagcccgtgaacatgtgttgacgcgcaaattcaaagcggaggctgcctgatggaaatagagatgatcaaggcggctaatggcgtatttgtaccggcgtatgagcgcgatttaccccgactggcaaaatttaaaaacggtgagctgtatacactggaagcaaaacttacccgtaacccatcttttcaccggaagatgttcgcttttcttaatttctgctttcagtactggtgcgctgaacatgctggatacgaattctctgatgaagcgacgcagtttgatgagtttcgtaaaaatctgacaattcttgccgggttctatgatgtggtcacaaccataagaggcgaggtgagatatcgggcaaaaagcctgagttacgcgaatatggatcaggatgagtttgaacgttgctacaacgcaatgattaatgccgcgttaaaacatgtgttcgggcgctcaaacaatcctgaactgaataaccgcctgctgtcgtttttctgaggtgatgatgaagcaacgtaaaccaaaaaaatgcaaagtgtgcggctcctcgtttgtgccgttccgctcatatcagaaagtttgctgtggtcagtgcgcactggaactggtcagaaaagaaaaggcgatagcttcagcaaaagagcaggcagacaagctgaaagcgcgcaggagggacttacagccccgcagttactggattaagcaggcacaacaggctgtgaatgcttatatcagggagcgggaccgtcatttgccgtgtgtttcatgcgggacgttcgattcagcccagtgggatgcaggccattaccgtacaacagctgcggcacctcagctcagatttgatgaacgcaatatccataagcaatgcgtggtgtgtaaccagtacaaaagcggaaatctcgttccgtatcgcgtcgaactgattaaccgcatcgggcaggaagcagtagacgaaatcgaatcaaaccatagtcgccaccgctggactgtcgaagagtgcaaggcgatcaaggcagagtatcaacagaaacttaaagacctgcgaaacagcagaagtgaggccgcatgacgttcaccgtaaaaaccattcctgacatgcttgttgaggcatatggaaatcagaccgaagtggcccgaatactgaactgcaatcgtgccacagtcagaaaatacattggcgataaagaagggaaaagacacgctatcgtcaacggtgttcttatggttcaccgcggatggggtaaagatactgatgcgtgatatccggcaggttcttgagcgctggggggcatgggcggcaaataaccatgaggatgttacatggtcgcccattgctgccggatttaagaggctgatccccgaaaaagtaaaatcacgtccacagtgttgtgacgatgacgcgatgattatatgcgggtgtatggctcgccttaacaggaacaacagcgatctgcatgacttgctggttgattattacgtgttgggggagacgttcatggcgctggcacggaaacatgggtgctctgacacctgtataggtaaacgccttcacaaagcggaggggattgttgaaggcatgc

SEQ ID NO: 873 - DNA, 2827 bp, Escherichia coli
caagatgaagccgagcgtattgtcgaaaatactgcatatactacagaacgtcagccggaacgcgacatcaccccggttaacgaagaaaccatgtcggaaattaacgcccttcttacttccatggaaaaaacgtgggatgacgacctgttgccgctctgttcccagatttttcgccgcaacatttacacatcttcagaactaacacaggctgaagctgtgaaggttcttggattcctgaaacagaaagtcacagagcagaaggtagcagcatgacaccggacattatcctgcaacgtacagggatcgacgtgagagctgtcgaacagggggatgatgcgtggcacaaattacggctcggcgtcatcaccgcttcagaagttcacaacgtgatagcaaaaccccgctcaggaaagaaatggcctgacatgaaaatgtcctacttccacaccctgctggctgaggtttgcaccggtgtggctccggaagttaatgccaaagcactgacctggggaaaacaatacgagaacgacgccagaaccctgtttgaattcacctccggcgtgaatgttactgaatccccgatcatctatcgcgacgaaagtatgcgcacagcctgctctcccgatggtttatgcagtgacggcaacggccttgaactgaaatgcccgtttacctcccgggatttcatgaggttccggctcggtggtttcgaggccataaaatcggcttacatggcccaggtgcagtacagcatgtgggtgacacgaaaagatgcctggtactttgccaactatgacccgcgtatgaagcgtgaaggactgcattatgtcgtggtcgaacgggatgaaaaatacatggctggttttgacgaaatggtgccagagttcatcgaaaaaatggacgaggcactggctgaaattggttttgtatttggggagcaatggcgatagccagtagcaacgaggtgcaaatgatatgacaattaaggaatactaccggtgttcgttctaatccagcgcgggcagtctttcgtcgatgccaacaactatccggttgaagtctgcaaaatcactctgacgcaggtaatcttccgcaggctggatgggagaaccagagccgcttcaattagcgcatttaatgcagaatttgagcgaatcgatcacaacgaactacacatgattaaagcagaaattgagaaggaaaagcatattgccagccttcgaaaaatgcgccgcatatcaatcaactgacaaccgccttcgggcggtttttaatggcgaaaatatggattcacacagtatcaccctcaaagaggcctgtaagtttctcaagatatcaaggccaacagctgttaactggatacgaacgggccgactacaggcaacccgaaaaaattcttccggtaaaagatcaccttatctcacaacccggcaagcctgcattgcagcacttcattcaccgctgcatactgtccaggtgagcgcgggtgatggcataacagaggaaagaaaatgtcactcttccgcagaggtgaaatatggtacgcctcgtactcgctcccgggcgggaagcgaattaaggagtctcttggcacaaaggacaagcggcaagctcaggagttgcacgacaagcgaaaagcagaactctggcgagtagacagactgggggatatgccagatgtcactttcgaagaagcctgcctgagatggcttgaggaaaaagccgacaagaaatccatcgattccgataaatccagaatcgcattctggattgagcatttcgagggaataaggattaaggatatatcggaggcaatgatctactcagttatcagcaaagcgtataaccgaaaaacaaaggagagatggaagttgcaggtggaggctgcattaagaaaagggaaagaaccaccagcctatatacctaaatcggtgagcacgcaaacaaaagcaacacacctggcaatgatcaaggctattctgcgcgccgcagagcgagactggaaatggcttgaaaaagcacctgtaatcaaaatacctgccgtaaaaaacaaacgcgtgagatggctggaaaaagaagaagccaggagactcattgatgcatgttctgatcccctgaaatctgtagttaaatttgcactggcaactggcctgaggagatcaaacattattaatctggagtggcaacaaatcgatatgcagcgacgtgttgcctgggtaaaccctgaagacagtaagtcaaaccgcgctattggggtcgcactgaatgacactgcctgcaaggtgttgcgtgatcaaataggcaaacatcaccgctgggtgtttgtttataccactgctgccagaaggcctgacgggacaatgacaccaagcatcagaaagatgcgcctggactataacacatcgtggttaacagcatgtcgtcgggcaggaattgaaaatttccgttttcatgacctccgccatacctgggccagttggttaattcagtcaggtgtaccactgtcagtacttcaggaaatgggcggctgggagtctatcgaaatggtgcgtaggtacgcacaccttgcacctaatcatttgacagagcacgcgaggaaaattgacgacatattgggtgacgatgtcccaaatttgtcccaccctgaggtttttgaggatgcaaagaaagcataagtaattgaattagaatgagttaagctcacgctttcaagtggtgagcaacaactttaaagatcttggcccggaagtcagtttccgccgtatttatgaatacgctggcggcgactggcaggaagataatggcgtctggcaccagaacgtgttcg

SEQ ID NO: 874 - DNA, 245 bp, Escherichia coli
  modified_base (223)..(225): a, c, t, g, unknown or other
tgacagtgcaaagacggcaaccagcagggcggctgaagccggacaaaaagccagtgaagctgcagaagcggcgacccgggcatgcgagtctgaaaaggccgcggcagcagacgcgaatgatgccagacaacatgctgaaaccgccagagtggctcatgaggccgccggagacgttcttaaaacgtgctgagactgccaaggcacacagggataggcgataagnnnaaatgcaagagggggggggg

SEQ ID NO: 875 - DNA, 1477 bp, Escherichia coli
tccgataaacagaccatgcggagttatttatggattttgaatttacgggtgaagaaaccccggaacaactggaaaaaatgctggaaggacttggggatgtggatattgacagtcacgcacaggacgtcgtgacggaagataccacggaaaaacatgcggatgaggaagcacagactcagacgggcgataacaatgtggcaccgacgccggatgccagtgtggagcagacgcaggacgtgaaggagccggaagcgaagggggtgctcacccgcgacggtaaacacgtcattccctatgaagtccttgaggctgaacgttccggtaagcaacgggccgaacaggaagccgcacttcttcgtgggcagatagctgaagaaaaacgcagggtggaactgctgacgtctcagatccaccaggccggtatgaagcccacaccgttaccggaaaacgaaaaaatttctgatgagcagattgcccgtatcagggagatgtatccggaaattggtgacgcggtggcttcgctcatccgtaaaaataactatctccagtcccgtgttcagcaatcagcacagcaggcagaaggtaatggtggtgaggatttatcaccggttcttgatgcgatgaatgccgtgccggtgctgaaaacgtggcaggagtccgatccagatcgcttctcggttgctgtatccatcgacgggaagctccagaatgaccccgcatggaaagacaaaacgctcactgaacgtttcgctgaagtggcccgtcgtacgcaggttgctttcggtgaagtcagtgagtcgtctgctgacaacaaggcagacaaaacggatatccggaaaacggcggaagagaaagtgaagaccgctgaacaggagcaggcagtacctgcttccccgtcagatttaggcaccacggcttccgtcggaaccggtgataattttgaacggttacttggcgcttctcattcagaggcagaggcgattatgcgcggtatgacgaatgctgaaatagacgcgcttctggagaagctcgggtaacttactgaaggagaactgaagtaatgacgactgtaacatcagcccaggcgaataagctgtatcaggtggcgctttttaccgctgccaaccgcaaccgctcgatggtcaatatcctcactgaacagcaggaagcgccaaaagcggtttcgccggacaagaaaagcacgaagcagaccagcgcgggtgcgccggttgtccgtatcacagaccttaacaaacaggccggtgatgaagtgaccttcagcatcatgcacaaactctcaaaacgcccgacgatgggagatgagcgtgttgaaggtcgtggtgaggatctcagccatgctgacttctccctgaaaatcaatcagggacgtcacctggtggatgcaggcggacgtatgagtcagcagcgcacgaagtttaacttggcatcctcagccagaacgcttctggggacgtac

SEQ ID NO: 876 - DNA, 1061 bp, Escherichia coli
caccaaagcgcacctgttcggccagcagacgggaaagacgggagaccgtcacttccagttccggaataacatgtccctcgctgtctttcgggctgatttcttcagccagccgagtgacgctcatccccacggtatgtgtgccggcatcactgaagctgaccagaaccggccagatggcatcgaggagacgttgtttttccggccggaaagcgtatttgcgaccgacgaacgtccgtttctgtacataaaaaggatgccgcgacatgcgcatgcgcaggctctgctcgccggtcaccgggtcctttttcaccagacggttataggcgtgcccgagctgccctttcagcgctttatagcgctcaggacgataccaggacggattttcgcatttgggtttggtggagtgctcaccgcgacggcgcttcgtgcgcttcctttccggttcaaccaggaaagtggtcgcccttcccgcttcatagtcttcccagaaacggatctgctcttcgggtgctaactgactccagtgtactgcgttatatgaagtattcttcagacctgccacaagctgtcgcttatggcggagcgattgtgccgtgtatttatacactgcacaggttgaatctctggtacggtttcatatatacttatcccgtattctgtgaggcccccattatttttctgcgttccgccaagttcgaggaaaaatagtgggggttttcctttatggtcttctgaaacttttttcagccttccggcaccggcaaactgccgtcgtttctgccatacgtcctgaatgccttatggcgcattctgccgttttctggctttccggaccgcgaggatcccaaaagccactgaataacgatccgcaatataccccttttccaccgctttgaaaagccgacacgatttctcagagttacagttgccctctttaaccccctaaaaagcgtcgtttttttgaactctgtcaaaaaaatgaacaatttcacaaaacgatctttttatgctgctttttttcttcttttccagtagaagagattcgccgaattttttttaaa

SEQ ID NO: 877 - DNA, 6220 bp, Escherichia coli
  modified_base (6153)..(6153): a, c, t, g, unknown or other
gaacaagtctgatatcgttcagttccgtcggcttcagtaaccccgtacgacgcagtacccctttgaccagggcaacaacacgctcccatgccgccacgaatttaatcggctgcttctctgccatatgcgccagaaattcacccgcctgcacttccggtgattccttaccataagacgcatcaaccttacgccaggcttcacggatggtggcgttatcactgtcacgggttttcagcacggtcttaataatcgtctgatattccgctggcgtgactacatgctccattgcatggtgaataatctcgtgacgtaacttctcgcgaacggtccgcccgtcagggatgttatccgccaccaggacaatttcacgtttatccggacgatagaacgcgtgcaccttgccgtaaccgtcgaatgattcacccgccagtgcttcagcctctttctgtgacttcaccacgcggaccttcaggtcactgtccttaatgccactaatcacgccacgggcaacagcttcaacctgcgggaccggactgcctttggcttccgcactacggttaacatccgaaatcagattgccttcaggtgtgcgggtcacgcccttacgggaataaaacgcaactcccttgtccgtctcacgggttttcagtgttcggaacaagtgatcgaatgcctcacgaataccgccatccagttctgcattcgtcggataagcgtaggtgtccggctgtccatggtcatccgccttacggatattgaccagataatcattctccacgccagccatacgcgctttatcctgaacataacgctcaaaggctcgcgccgccatttcaacatccgttgaccagtacggttttgaacgaacgccatccaggcgttcagaacgacgcaacatgtcactgctgttaatggctttcatcacgcctttaaacgcgtcgtaaacctcctgacgtaccggatattccgcatcaacatacctgccgtctttaaatacgcgcacggcacgctgtgcttccgtcatatagtcgccacctgacgtgatcttcccgtcagtggaaacatcataacgaccaaaataattatccagtgaatggaaccattcgtgggccagcgcccccggtccgttaccttttgtcaggttgattgccacctcacccggctcatagtgtgccgccgccttacccttaccacgggcaccaaaagcaagcccaagacgaccgttcagagaaagcgcttttgtcggcacgttcagcacgtcagccaggtcatgcagcgagtcataagcccggttcaaatcagcctgacgacgcggactttccacataattaccaaactgcacaccacgaaaaccaaacgcatcactgaactgctccggcgaaacatcccccttgcggcgttctggtccggtacgatcgcggttggtggcgttacgctgctcctcacgcgagacttcacgcagcgccttcacctgattaaccagctcatcacgatgtgtgcgcacataatcatgtgcatcacgggcagactcaaaaccgcccttcagtttctgcctgtttttgccataaccgataaaaatgtcgccactggccttatgccggtacacgtcaaaggttattctgtcatcagcagaggttgctggcgtttccctttctctggagccttgttcatcgaaatatgctttcgcctttttcagtaactcatcccggctttccgagaaaaagaggtcgcgccccttgctatcacgaagcgaatacatcatttgcggcggatcgtaacgttttcccccgacaaacgaataaacaccggacctgacacgatagccggatgctttatcaatctgcaatgcagaaagcgtacggagcagtttccaggtatccgacatgctccgtaaccccggcttactgtccatcatatcagccagtttcgctgccggaattttcccctccagcataccggcagtagcttcgcgaccgcttttaacaatgctgatccatttctgcatgttacggcttgttctggtgggaatttcactgcgatacaacgccatcattgccagcgtgtcactatccacaccttctttttccagacgggcataatccggctttggaaacagtttgctcagtggttgtgtcgcgtactccccatcctccagcgttttacccatagcttcagcaagctgcgcataacggtgttttgccgcgcccttaatctcctcgccaaagtcttcaattttcgcaccacgcacctgctggtgagtgctcggtttatctaccggcaccggcacctcagtatccggaacatcggttatggtctggcgattatccccggtctgtctgcgtgcttctgcctgctgtgccagttccggaagggagtcacgaaccatacgagggagtgattcaggctgtggcatatcaaccccacgctgactttcaggtgcaggaagtccttcacgcactggtgctgtggcgttctgctcatccggtgacggcagaccacgacgaactgtttcgccctccagtatttccccctggcgaccagcggcattttccggtgcctgcgcacgtcctttctggaaactctggcccttcacctcaccggttgtggtaaaacgaccaccacgtccggcctgattttcatccggcgtacgcgccacttctcctggtaacggatatccctgtccgggatgaatatcgccgggagcgggaaggcgtggacgctcagttaactcctgtgctgtcggaccggcatcaccttcagccatctgggaacgcaccagttcttccgccgtcggcgcgttgccacgggcaagacgggcctgcacttctgtatcatcccccgtaaaaccacggaatcgcgggtcacgcatgaacgcgggctgttccatcggatcagcatcagtaatacgctctccgtcagccagagtgttaatggtctccgttgccacatcttcagagaacgcaggattatccatttcaacggcatactgattctcgcctttcttcactacggacggtttcaggccggtggcgctggcattgcggaaaacgtcgctccccagagcacttttttcatcccgtgaaataacggttgtccggacgcaccttttcaatgcgttctgctggtctggacgcaccactctcgttaatttcaatacgaacttcatccggatcgcggaaccgcaccgtcgggtaaatactcccgtcgccatcatccgcattttccggctgtggctgtgcctccggtctggcctcccgctgagggcgaagcacatcacgtattgcctgtaactgctgctcttcagtatcagtacgcccttccttctggctgagttttcggtattcctcaagcagttcagggcgcggcttcgccttcagctcatccatcaccgcctgtcgcttcgcctgttcatccagttcattcaacagctggctggcggcttcccggcgatgaacggcagacgtgtctccctcatgtgccatatccgcatcagcatactgttccagaagctgctcgcgattcatcccctgcatagattcacgatgctgtgccaccggatcaaccggttcgggttgcggagccgattcgtcctgaggaacgctttcagcctcacgcatggctgcttcatctgccgcctgacgttttccacgatatccggcagccgcaccgaatggtgcccccattgcagcaccaagggctgcaccttcgatcgttgcgtcagccacgccctcccacggtgacacatccattccggcggtctcacgcaatgccgtgttttcctgatagcgtgaatagccaccctgcgccgcattaatcgtcccctgttccgtggcatttctgacaatgccgcttttaacggtcttcgccgtgccccgcatcgccagattaagcaactgagcatcgcccagttttgccgccatggcattcacagccagcaattcaggatcggttgccagctgcgcacgcacctcatcggcaacacgctcttttgccagatccattttctggcgatcagtaagctgcgcgtgctgcggatcggcatcaatggacaaaaacgtctgctgaaatttcggtgactgcgccagctcagaataatcagcattaagaacagcatctgccgccgccattgcactccgcccctgcgcactgacagtggaatgggtgatcaggcccgcctggaaaaaatccggcatttttttatcgacagcttcggctgccagtgccgtggctctttccggctgcatccctaccgcgatgtattttttctccagcccggcggtcagcacttttcgcagagtgacatcacccacctttctagccacaccgccagcaaccatatcaggtacaagcgcaccaatcaggtttacacccttcgccacccagaccgcagaatcattatagccttcggtcatcggcgtattcagcgcacgaactgcacccggcgacatcttaccggtcagccattcatcagtggctttggcaccatcactgacagccttaccggttgccttcagacctttaccgacagtatcagtaaccgcgtttttgccatcaggcagggtatcgatgacctcatcagcccccctgctgccaccggcaaaaatatcctgcacagttgcgacacccggcagccccatacggctaaactcatttaaaatacgcgcccctgtttttaccgggctctgaatcatcgcatcaccgagtccacgggccatttcccctgttccccggacggactgggcgaaacctttacccattgttggcaatacatcgcccaggctgaacgacgtactgttatccttccagcgattcggatcagagaaaaatgcttcatagctgtcagtttcgccgggttgctgaatgttcaggctgttacgattctggttaccgagttgcgcctcaggacgctgttcctctgaataggccatacagactccataaaaaaacccggcacaatggccgggcatcaggaaatggtattaatggaatatcgtgaattactgggcgtaattctgtttcagtccacggataaactgagatgcagatgaagcactttcatctctggcctgttcccccctggccttttgaatacggagaaaattcgcatacccgttctccagcaatttctgattctgaggttccagcatttcaggctgacgggccgctacatttctggcaaatgacagcttatcaggatcatctcccgcccagttgataacctgttgctgaagtttttgttgctgaattttctgttgatgcggttgtgaaccagtcgcagcataatattcatccaccgcagcctgagcattaccgccattcttgatcgcgtccgccgctacgttgctggcccccttctgaagctctttcagagaaagtccctgctgcttcggcataaaataaccataatttttcgatatctctgcaaatttgctgcgatccctgacctgagcgatagccttatcaacgggtatcgccagcacggtttgatcatcagggtgcgcactgccgtattctgttacaggtttatgcgcggtggagccatcgctgtatgtgagatcaaggccaataagtacgtacccttcctgctgcgctggtacgatactgccaatcctggcctcttttatcgttttttccccggttgaatcaggcatgccaatacgctgttgtagttccggggcaaacacgccggaaagcacatcgagattttccggggtattcagcgaatcgatcgccatgtccggcttatcaccaaagattttttgcaggttgatcacggcctgacccgctttcgctgcatagccttcgtttgacataagaattaatggatgtccctttggcagctgcccgaacagacgcgttgcagcctcctgatcgccagcctcaattgcttttccaagcgcttccattagtggctggctatgggcaatcatatcgttatactcaagccgtcgctggttgtatttctgcaactggagtcgctgctgctccatacccagtgacgcattccggtaattctggttagcgttaaactccctttccttcagtgcataattacggtcgtcaactttggctctgtaatcaaagttccgctgatcaacgtttttattatgttcaaactgagactgccaaggcacacagggataggctgtgatnaaaaaaaactagctcagatatgggggggaccccccccccctcagataaaaaaaaaaatatttttttt

SEQ ID NO: 878 - DNA, 4813 bp, Escherichia coli
atgaagtgatgttttcggaagcgtatctgccgtatgcatggccggaagtgaatcgtcacacgacggcagaagatattgtagctatctgtccgctgggaacgtcactggtggtggcgacaaagggggagccttatttgttcagtggggtatcaccgtccacaatttctggttccaaaatcccttccatgcaggcatgcctgagccgaagaagtatggtggcgatggagggattcgtgctgtatgcaggaacaaatggcctggtatcggttgatgcaggcggcagtacagccgtggtaacggaaaaaatcatttcaccagaacagtggcagagtcagtttaatccgtcgtccattgtggcttactcatggcgtggtgagtacattgcctgttacacgaaaccggatggtaagcaggatgtgtttgtattcaacccggtgaacatggatatccgctatctcagtacaccgtttgactgcgcatgggttgatctcgcaaaagatatgatgcgcgtggtgacaggagacaaaatgtcagtgcttgccgggggctctctgccctccacgataaggtggcattcaaaaattttttcattacctgaaagaacctctttttcctgtatcagggtgaaatctccagcacctgagcgggtggggatcaccattatggctgatgatgttcctgtgattaattttgcgccgggtacgtttaagggaagtgtggtgagacttccggcagcaaccgggcaaaactggcaggtgatggtatccggatttgggcaggtggaacgaataaccctgagtacatcgatgtcggagttaccgatatgagcaaaaaaccgtggcgggcggggaaggatttatccgctgttgtggaaaatatggaaattggcaccgggcagcgtggcgacggtcgtcatgcttttgtgacccgtgaagagctggttggccttaaactcgcccgacgtcgaacacagggtggtgcctcatatgcactgaatccgggtattgagattgacagtactttaatgactgttgattttcccacaaaaccgctgaattttaaggcgacaggaggatttggctcggttcttcttgaatgggatatgcctaattatcgcggacattcactgactgaaatctggcggggtacggaggatgaccttgctgatgcagtgctggttgccacgacgccggggcaggtttacggcgatccggttgaccctggctggtcgggattttactggatacgttttgttaacgcggcaggagtgaaaggtccatggaatgctgaaaaaggcactcaggcacaaacacagatcggcgtgaaggccatcattgaccagatccgcgatgaggctgcaaagtcgccggttgtgtccgagctgcgtaaagaaataaaaaacgcgcaggggcaggctgtaaaggatgctgcaattaagacaaccgaagttgtagggactctcagggaagaaacgacaagaacgattggtggtattgaaacccgcattagcacactggattcgtcaaccagtgaatcgcttaatgaggtcgacaagcgcatcactaaactggataaagaaggcggtgaggccttcctggcaatgtggtcaaaaaaagcgggagttgatggtatcactgcggggatcgggattgtcgccggaaaagacagtgaaggcaggcctgtaagtcaggttgcaatttctgcgtcgcagttgtttgtctttgacccgaacaacccggataacacagcctatccgtttgcggtatcaggtggcaaggtagtgatcccgaaagcgatgatttatgacgcggtgattgaaacactggtgtcgcggaaggttgtggcggatgaggtaaaagccggggtaagtatcacttcgccagttatccggagtgccgttattcagaacggaaactttcaggttgattctcagggtaacctgaatattggaggccttttcagtgttacgtcacaagggcaactgacaattcgttactctaatcagaatgtaggactggtgatccgcaatgataaaattgaggtttatgatcagaatggacgactggctgttcgcataggcagattacgctgatcaggaggtgagtattggaatacggttttgccatttataacagaaataacgttaatgttacgggcgtgctgactccagtatttttcctggacagatttacagcggagtctggctcaaagacgtacactaataaacccgacgggaaatcattgcaggctgtatgttgtttatttccctggaataatgtatttgcggatcggaaagtaccgaagataaccattaatgacaatacggtgacgtggtcgaatcttgagcagggtatgggatcttatatttatacattctggggataagtgttatgtacggtttgagcattatgaagccggatggcagcgtatggataagtccaggttttacgccgcagtgtctgatcaacaaaggcaccataccggcgactgaaaagtctttttttaaaacatcaatcccgtcaggcaaaagttgttttttctttatcagaacagagaagaaggccgatgtcatgtacacgcatgaacagattgatggatatcatgcactaaggcttcatgtaattgtcaggggaacgaaccctggtgttacgacggtttatgctttcgcgaatatggttactccaccttctgagtatggtatcgccatgtataacccggacggtgagatgatttatcatggcgaaatgatgctgcttgacgcgaagttaatacctgttgatatcaaatttgaaaaggaccttggatatccatgcgcaatcatgcctgcactggtcgggtattataactggaaaagaactccttatgatcgaccgatttataccacatccactggtgctacaggaaataaaatatattcctgtgagcattattccggtggtgcaacatgggatattcgaaagccgtatatagataaggtcctggttattaatacatcagtatatgattagttgaagcgagtctttaatattcatttaaaatgtctaaaaagatgtattattaaaaagtttagcgtgttatctgaatacaggatatcttaaatgaagagtatagcaacactggttgtgtgtgcaatctccgggattgcctgtgtaaatttatctgcacatgcagcagaaggagagcatacaatttctctggggtatgcgcactttcagtttccgggactgaaggattttgtaaaggatgcgactgctcataacagggagactttcagtcatttcgtcaacagaaactacttttcttcattgggcgaatatacagatggtcgggtcagtggatatgaaggcaaggataaaaatccacagggcattaatatcaggtatcgctacgagataacggatgattttggcgttatcacctcttttacatggacgcgttctctcactaactcacagacatttattgatgtgcagtcagccgatcataccaggaagattaagaatccggcagcttctgccagaacggatatcagggcgaattactggagtctgttagcggggccttcatggcgggttaatcagtacatgagtttatatgcgatggcagggatgggcgttgctaaagttagcgctgacctgaaaattaaggacaatattaacagtagtggcggattttctgaaagcaacagcacgaaaaaaacctcccttgcgtgggctgcaggtgcacagtttaacctgaatgagagtgttacactggatgtggcttacgaaggttccggctctggcgactggcgcacgagtggcgttactgctggcattggcctgaaattctgacctgtatccggtaaccgtttactacccgctgtgatggcgggttttttattgcccgtacagggcaaaaaccgtaaattatgcgtggatgcctttcggctgatggctggagggtgaacctgaaggcctgatgtggaaaggccccgagtcaacttaacgttaacccgaggccctaacacttcgtaccttaagcaagtagaaggttagcgcctctctgtaaaaggagtcaagcgctatgtcgcaaaaatcgcttatcaccgtcacaatttgcatgacggttatcttcaccatctggatgttgcacggttcactgtgtgagttccggctgaatttgtggggagcggagtttgcggcgttcttacagtgtaagcagtaggaaaaccgcgacggggacgagagtccccgtcaactggttgctgaggttcagccgatatggcacccgtttcaggtgagagaatgaacgataaaattctctggtatatgcagcgtgttgtgagaaattcccgcaaccctgaatttatgaatgaagttaaagacgcctgccttaaaaagcaggcgttttgttttgaggcacctgatggctttttggtgctgcgttctgtgctcagtgctgatggtatcccttatgttctggtgttgctgggcgtgtgtacggggagtaacagcgttgagcgttacctgccggaggtgaagacattaacccatctggctggcggacgctgggctgaattccatacggcaagacggggatttatccggctgggaaaacgactgggctttgagcgaatgccggatgatgaggatggcttcatggtgttcaggatagcggtctgactgccacagtattcatcatcgtgtgtaaaccaattgcaattcacattctgaccctgccccggcagggttttttgttatccagggggccataatgggcggaaaaaaaggcggtggtgataccaaagtaaaaccaacagcagcgcaaatag

SEQ ID NO: 879 - DNA, 819 bp, Escherichia coli
  modified_base (792)..(792): a, c, t, g, unknown or other
ctcttctcgggaaacggattttcagtaccgttgatccagctgattgctatctcagtacggttatccatatccgttttcttctcaaccatgttgaagtgaccgcccgccttctgaccgtaagcatttgccagcgcctgagcccccagtaacatggcgcggtcaatattggttgcagcagcgacctctttcgtggttgccgtcaggttattctctgataccagaacctttgacccctgatagaaacggatcggcatacccgcatacttacgaaccaggatattgcgccacatcgcacattcacctttgaacagcggatgattaaaaccttttgcacggttcacggcacgaaccatcatctggttccagtccttaccggacgtcgaggtgtaccagtcattccactgacgcggcgtgacgtacaggacgtaatatggatcttctccgtgaagttcatcaccggacagacgaaccggctgtaacggatgcgccatttcgtcaatgaacagggagagattgtccaccaggccaatagaaaaaatatctgccgcttcaatctgctcaaagcttgtcgcatcaccgccaaaaaagtgacggtcatgtgtcggaggcagtacatcgttgatcatgatttttttgaattcagggtgctccgctgtcggcagaatagtgtcgtcagcaacaaaatcaccacgagctccagcaagatgcactatcgcacactggtcctgcaggtcattaaagtacgtccccagaagcgttctggctgaggactgccaaggtaaactacgtgcnctgctgactcatacgtccgcccgcatc

SEQ ID NO: 880 - DNA, 2382 bp, Escherichia coli
gtactgagataacggatatccatgttcaccggactgaatacaaacacatcctgcttaccatccggtttcgtgtaacaggcaatgtactcaccacgccaggaataagccacaatggacgccgggttaaactgactctgccactgttcaggtgaaataatcttttccgttgccagtgctgtattaccgtttacatcaacagataccagaccgtttgtcccggcatagagtacgaatccctccatcgccaccatacttcttcggctcaggcatgcctgcatggaaggaattctggagccagaaattgtggacggtgataccccactgaacagataaggctccccctttgtcgccaccaccagtgacgttcccagcggacagatagccacaatatcttctgccgtcgtgtgacgattcacttccggccatgcatacggcagatacgcttccgaaaacatcacttcattaccggcaaacccggcggcaataccattagccatcaggcaaaggcctgtcatattctctggcggcggcaggtaatcccatgtcgccagagaaggtccaaggtttttccccggtattttgtccgtgtaactgagcacggatgcatccagttcagccacaagtaaaaaatccgcctcccctccacctgatgcagagcgataaatccggcggcgtttaatactggcattctgcaatggcaccggagacagcgtcagctgtaccgcagtccccggagtacggagtgttacctccagagacgccggacctggcggaccttcttcaccataatctgagacaaaggtttccgtataaaaccgggtttcgtcatcattcgggttatcgtcagaaacatcaccgccctgctgaacagtacagacaggtgctgtcgtcggcgcgggatcccagacgatacgatgatgccggatgattcccgtccccttttgtggcaatggttgcatccgtcactttaggaaaacgcccgtcagtgtagtaaatacgcccgtgggggtcctgagcgatcggactgcggatcacatccactacatccgtccatgcaaaccagaaatcgtcacggtaatgaaaaatggttttcggcttaatcgcgaatgttttctcagcctctgacatctggtgttcaggcgtgatcactccatagcgaaaatgacagttttctgccagtacagcagaatgatctggcagcatagatgcaataacgcctggcatcatcccgcgcatagttgttatatcgatataaggcatggttgtctggtatccgaaaatttgaatggcaggtgagtcactgaattgaagttttaaaggcggcatacaattgcgcctgtgcagaatacagatttccagaaatcttgaaaaattacatcattattatcagcatccgtccggaaaaatttctctggcaacttaaaacaatatcctatatatccggcgtctccggtatgtagaacgtgaagtttttaaaattattcatttaccatttaactaatttttagatcctgggttactcccgtctttttcattgcctccacgaaagcggaactaacagaacctgaccagtaatactggaacccactaacaacgccctgataaatcatggtttgtgtagcaccacctacgtttacggtgatgttacctgctttaccaccggataaataaacagcagctgtcggtgtagagttcgtcaaaaagtgagaaagtgtaacgacagcccccaccagtctcccagaaccacagttttcagcgtttgtaattgtccctttgcttttttcttctaatggccaatcagctccaaccgccccccagttttcaacttgatccgaagagttccatttatagtaagcggtttctattttacaacccatagctcgccccaccatttgactcatcataaaaggtttatccaatcctagtttagtgccagcagcccccatccattgctcacctgtttcgctcttagccgaagaacctacccatcccgatgttatccccatttcatatatccttctgaaattcgtgaggtgagtatcatccccacaatttaaattcagtagaaaccagaaactacaacagctgtcgtttacttctcccggagttctttaatctcatgacgaagtgttttaaagccttcgactaacaatgcaattatgccgttgtagttaagacgcagacgtttttcaccagatataacgtctgcgtcttcagttaccagttcaggcaaggctttttgtgcatcctgagcaattaaaccaaccgacgtttgccaaccgtcggcagagtactgtatctcgtaaagataaccagtaagtgcctccagacgatctaacgcattatccagttttaccagatttcgcttgttgcgtttatccg

SEQ ID NO: 881 - DNA, 1458 bp, Escherichia coli
ttataaacgaattaatgcaggcgatcgcaggggagcgtgtgaagcgattcgctggtggattaaggacggtggcagagactgccgtatccgctcaaataattgctacggtcaggtatcccgtcgcgaccaggagagtgcgctggcatgctggggtatcgacaggtagcagaatattttgctgaaaaatgacgtttgctcacgcggacggataacacgaaatcctgcgaactggcaaaatgcaagtgaataaagtcaggaagattgtttcacgctgaggcaccgtaatggtgtctttgtcatttctgcgcttcgcacaagcgtaaataaaccaaagaacctttcaggatgagccctggtggataaccggcagtggtctggttaaccctctttgggctggttattcctgtgcgcagggttcatcactaaaaggaaataaccgatgaatatgatgaccgtgccgtttcacggcgattctctttatgtggttaaccataacggtgagccatacgttcccatgaaacctgtcgttgcggggatggggctggcctggcaatcacagttggctaagttaagacagcgttttgcgtcaactataacggaaatcgttatggttgctgaggatgggaaacgacgcaatatggtgtccctgccacttcgaaaacttgcaggctggttacaaaccatcaatcccaacaaagtaaaacccgaaatccgcgacaaggtaatccagtatcaggaagagtgcgacgatgttctctatgaatactggacgaaggggggtgtcgttaatccccgtcgaatgagtgtgatggaagaactcaatcaggcctgcgctgacatgaaacgggataaaaacattgccagtgtgtttgctaccgggctgaatgagtggaaacaggttaaagccgcgcatgtatcaaaaatccgcacattgataaacgaagcgaatctgctgattgattttgtcctggctgatacaggcaaagggaaaataacaaaggcggattgatggagtggtggctaatgatatcggataaactcataacgctggcgaagggcctttgtgtaatcgtcggtatttcattttcactaatgctggttgttctttttctttccataaactggatggcgttgacttcggcagggctggtggggtgagcataaaccgaatgctttccgcgtttaccgttattctgctggtggtctgtggtgcgcttagtctggggctgaatcattaccgtgataacgccatcgcttacaaagagcagcgcgataaagccacatccatcatcgcagatatgcagaagcggcaacgtgatgtagcagaacttgacgccagatacacaaaggagcttgctgatgctaatgcgactatcgaaagtctccgtgctgatgtttctgctgggcgtaagcgcctgcaagtcgccgccacctgtgcaaagtcaacgaccggagcca

SEQ ID NO: 882 - DNA, 1592 bp, Escherichia coli
gcccaccgccccgccaccggacagcaccagccccgttttcatttctgtactcatgcagcccccttctgaaatatttcatcgaccatactttcagagaggcgttctgcagagcagaggcgaggcatgcgaaccggtaagtgttctgcagcctgcgtggttgaccagatcaccggatgccgctcttcactgcaccagtcccccagccagttaatcgcgtcatgccactcgttatctgcctgctcccggccctgaccaccaagccagtccagagtgttcagacgcacggttgcactaccgccactctcctgtgccatctgcgttaatgctttatgtctgagaatatccagtagctggttaacctggcctgtttcgccctgacgtatcacatcaccaaacgcgccccagcgaagctcttcaagtgccacataacaacgtccggcaggggaaaatgacgcatatcgcccggcgctccaccatgagaatatctgctcaagatgtaactgcgcccgctgaacctggtcaacacggtggagtttttcttcaagatgattcagtttatggtgaacctgatcggccagggtgagtaactgctcccgcgtatctgcggaataatgcgccagcctggctgtatcactgaccagtgaactgaccctgtcgtttacccgggtaatcgcgtagtttgtggtggcaagtgacgttgtcatctccgtcagccagcgcagggacgcctcaacgccctgtgcaagcgacgcattgatggcattctgccgtgcagcgccttcgccggtcagcccctcttttaaacgccggaagaacgtgcgctctccggccgtgcggatatgctcctgtgcaacatcgattccgtttgcgaaatcaaccacaaatttttcaggaaaacaggtgagtacctgacatacccggttatcagcaatttgttgaataaatggtgaagtcacagcagtgtctccagttcttcctttaacgccttactgtcagtaatcaactcgggaaccctttcatttaatgcctgaagacgcccggtaagccgttcctgcgcctgctgatcgcgtttatgatcttcagagctctgaatcagcgtgttacgtagctgttcaactttctccctgaatgcgcagaaaaaggcatcgatttcctggcggacgggctggttaatattctgctcaatggatgtctgcagttccccgaaatatgcccgggtcagagacatcacttcctctctgaccgtgttcatattgatcacgctgcgatgcacgatatcaacatattcttcccagccccagtcactggtgcccaaccacccacaaacttttccccagagaccactctgccgacgatggcgtgtgatcttctctggtcgttcttccagaagagtgcttaagttggttttcatcgcgagccgggtctgtaactggctgactaccgggaaagtgatttttacggtaaagccctcatcctccaggcgggcattgatacgtccggcaatcttttctgcggcatacagggccgtaccacgaaaaccagtttcaatacctttgacgattttttccagctcaggccggaactgtgcttca

SEQ ID NO: 883 - DNA, 961 bp, Escherichia coli
  modified_base (935)..(935): a, c, t, g, unknown or other
  modified_base (938)..(939): a, c, t, g, unknown or other
tttgtatttgttcacagtggtttcagagataaagactttccctgcggcgaagcaacgcaggggattaaatgatggggttaagaatatattgcaggtttgctgtttcaggtttgcagcttcttaaagttctttgtttgcggatttatgtggataactgaaacaacgtggccacgttctgatgactgatgcgtggttttatgggcagatatgcccctctgaggggatttaaggtgactactaaggattttgggctgagcggaatctgcgccgaaagccccggaggggctggcgatgattcagtgctgagggaatgatgctgtctagtgcggtggcggggcagccagcgtcagttcaagctgacgcaactccctgatggccagtcgcttcagatggtcatcggaacagaaataggcttcatccggcggcagacgcttccggagatactcagccatctcataaatctgctggtcaacaggtaatttcttcaggcggttggcacgcttgctggctgcggctttttctcggcgcttcttcagggcatcctggctgcgctgcagataccagcgttttctggccgcatgaacggagatatcttcatcctcacgcagaacaccttcccgaatgagctgctggcggatttcactttcacgcagtcgtttctgctgctgttcgtgaagtttaaccatgtcgacgcccagcatctgccagccagccggtgttatccagacataacgtggcagacgctgacgatgttcacgatcccacatcgtttcctctgaaacccccagcacaccaaaacgcacctgttcggccagcagacgggaaagacgggagaccgtcacttccagttccggaataacctttcctttgctgtctttcgggctgatttctctggccagacgggaaacactcatcccacggtgtgtgtgcccgcntcnntgaaggccaatccgatccgatt

SEQ ID NO: 884 - DNA, 9357 bp, Escherichia coli
agtctctgcgtgaaggaaataaaaacgagttgcagcggacgctgatgaattatctgctggtatgggaactgccggatccggatgaagagtatgtttgtggggcagatactgccgaagggctggagcacggagaccgctcatcgctggatgttgtcaaacgcagtaatggcgagcaggtggctcactggttcgggcatctcgatgctgaactttttgctcatctcatttcgcaggtctgtcgtatgtataacaacgcgtttgtggggccggagcgtaataatcacggacatgcagttatcctgaaactccgggaactctatccgacacgttatatctacaacgaacagcatcttgaccaggcatatgacgacgatacgccccgccttggctggctgacaacccgtcagagcaaacctgttctgaccgaaggaatgaaaacgcttctgaataatggaatatcagggatccgctggtcaggcacattatcggaaatgaacacctacgtttatgacgcgaaaggctccatgaatgcacaggaaggctgctttgatgatcagctcatgagctacatgattgcccaggagatgcgcgccagaatgccggtgagggtaaaacagaaaacggataaacgcagaaccacacactggatggcacactgatgaaaaatgaaattaacaccacagcgatgaaaaacgatcatggatccacgccgcgtttttctcagcgtcagttactgtctctctgttctgatattgacagtcagcctctctggcgtgatgccgcaaacaaggcctgtgcgtattatgatggcgaccagctggcaccggaagttatccaggtactgaaagatcgcggtcagcccatgaccatccataacctcattgcccccacggtagatggtgtactgggaatggaggcaaaaacaagaacggacctgatagtgatgtcagacgatccgaacgatgaaacagagaaactggcagaggccattaatgcggagtttgctgatgcgtgccgtcttggcaacatgaataaggcccgctccgatgcctatgcggaacaaatcaaggcgggcctcagttgggtggaggtcagacgaaacagtgatccgttcgggcctgaatttaaggtgtctactgtcagccggaatgaggttttctgggactggctgagccgggaggctgatttaagtgactgccgctggctgatgcgtcgccgctggatggataccgatgaggcaaaagctacattcccgggaatggctcaggttatcgattatgccattgatgactggcgtggttttgtcgataccacggttactgaaggccagcccagtccgttgatgagtgcatgggaagagtatcagtcatgggatcgaaagcagaacgaatggcttcagcgtgaacgccgtcgtgtgctgcttcaggtggtttattaccgtacattcgagcgtcttccggtgattgaactcagtaatggacgggtggtggcctttgataaaaataatctgatgcaggcggtagctgtggcatccgggcgggtgcaggtgaaagtcgggcgggtaagccgtattcgtgaagcctggtttgtcggaccgcactttattgtggatcgcccctgcagtgcgccgcaggggatgttcccgctggttcccttctggggataccgaaaggataaaaccggggagccatacgggctaatttcccgcgccattccggcacaggatgaggtgaattttcgtcgtatcaagctgacctggttgcttcaggccaaacgcgtgattatggacgaggatgccacccagttgtcagacaacgacctgatggagcagatcgaacgtccggatggcattattaaactgaatccggcccgaaaaaatcagaaaagcgtcgcagatgttttccgggttgaacaggattttcaggttgccagccagcagtttcaggtcatgcaggaatcggaaaaacttatccaggacaccatgggagtgtattccgcatttctcgggcaggattcaaatgcaacgtcaggcgtggcgatcagcaacctggtggagcagggagccacaacccttgccgaaatcaacgataactaccagtttgcctgccagcaggtgggaagactgttgctcgcttatcttctcgatgacctgaaaaaacgccgtaatcatgcagtggtgattaatcgcgatgatcgccagcgtcgccagaccattgtcctcaatgctgaaggtgataatggtgaactgaccaatgatatttcaaggttaaatacacatattgcgctggctcctgttcagcagacaccggcgtttaaggcacagcttgcacagcgaatgtcagaggttattcaggggctgccacctcaggtgcaggccgtcgtgctcgacctgtgggttaaccttctggatgtgccgcagaaacaggaatttgtcgaacgtattcgtgcggcgctggggacaccaaaatcaccggatgagatgaccccggaagagcagcaggccgctcagcagcaacaggcccaggagcagcaacaacaggaactgcagatgcgcgaaatggcaggccgggtggctaaactggaagcagaagctgccagggcacaggcagctgcgcaacgggataatgctggcgcacaacgggatgtcgccgcggcacagggacagcgttatgtggatgcgctcaaccaggcgcatacggcagaaatcattaccggcatacagaatatggaacaggagcaggaagctcttcagcaacagatgctacatacactacaacagcggatgcatgaattgccgctatgaatatcctgaacttaacggaaccccgtcatcgtacggggtttttgtttccggagataagcgtcccgggagcggtgcgcttattcgcgggggcagcgataagccttatttactcaaccattcggatctgtccgataaacagaccatgcggagttatttatggattttgaatttacgggtgaagaaaccccggaacaactggaaaaaatgctggaaggacttggggatgtggatattgacggtcacgaacaggacggcgtgacagaggccgccacagaaaatcatgcggatgaggcagcacagacacagacgggcgataacactgcggcaccgacgccggatgccagtgctgagcagacgcaggacgtgaaggagccggaggcgaagggtgtgctcacccgcgatggtaaacacgtcattccctatgaagtccttgaggctgaacgttccggtaagcagcgggccgaacaggaagccgcacttcttcggggacagatagccgaagaaaaacgcctggttgaactgctgacgtctcagattcaccaggccggtatgaaacccgcaccgttaccggaaaacgaaaaatctctgatgagaagattgcccgtatcagggagatgtatccggaaattggtgacgcggtggcttcgcttatccgtaaaaataactatctccagtcccgtgttcagcaatcagcacagcaggcagaaggtcatggtggtgaggatttatcaccggttcttgatgcaatgaatgacgtgccggtgctgaaaacgtggcagaactccgatccggatcgcttctcggttgccgtatccatcgacgggaagctccagaatgaccccgtatggaaagacaaaccgctcactgaacgtttcgccgaagtggcccgccgtacgcagctcgctttcggtgaagccagtgagccgccttctgatgacaaggcagacaacacggatatccggaaaacggcagaagaaaaagtgaaagccgctgaacgggagatggcagtgcctgcttccccgtcagagcttggcaacacggcttccgtcggaaccggtgataattttgaacggttacttggtgcttcccataccgaaattgaagcagccatgcgaggcatgacggacgctgaaattgacgcgattctggaaaaactcgggtaaccactgaaggagtactgacgtaatgaccacagtaacaacagcccaggcgaataagctgtatcaggtggcgcttttcacggctgccaaccgaaaccgctcgatggtgaatattctcactgaacagcaggatgcaccaaaagcagtttcgcctgacaagaaaagcacgaagcagaccagtgcaggtgcaccggttgtgcgaatcacggacctcaacaaacaggccggtgatgaagtgacgttcagcatcatgcacaaactctctaaacgtccgacgatgggggatgagcgcgttgaaggccgtggtgaagacctcagccatgctgatttttccctgaaaattaatcagggccgtcacctggtggatgcgggcggacgtatgagccagcagcgtacgaagttcaacctggcatcctctgccagaacgctgctgggtacgtactttaacgacctgcaagaccagtgtgcgatagtgcatcttgccggtgcccgcggtgattttgttgctgatgacaccattctgccaacggcagatcaccctgaattcaaaaaaatcatgatcaacgacgtactgccgccgacgcatgatcgtcattttttcggtggggatgcgacgagttttgagagtattgaccagtctgacctgttcacccttgcgctggtcgataatctctcgttgtttattgacgagatggctcatccgttacaaccggtacgcctgtccggtgatgaattgtatggcgaagatccgtattacgtcctctacgtcacgccgcgtcagtggaatgactggtacacctccacgtccggcaaggactggaaccagatgatgacgcgtgccgtaaaccgctcaaaaggttttaaccatccgctgttcaaaggcgaatgtgcgatgtggcgcaatattctggtccgtaagtatgcggggatgccgatccgtttctatcaggggtcaaaggttatggtgtcgaacaatgaccttacggcaacgatggcagaaaaggctgctgcaaccaacatcgaccgtgccatgctgctgggggctcaggcgctggcgaatgcgtacggtcagaagggcggcggtcacttcaacatggttgagaagaaaacggatatggataaccgtactgagatagcaatcagctggatcaacggtctgaaaaaaatccgtttccccgagaagagcggcaagatgcaggatcacggcgtgattgccattgatacagcagtgaagctctgattttttcctttccccatgccgggttatcgcccggctttttcaggagtcattaattatggcaaagactatccttgccccatcactgagtgaacggatctatacaggtacgcacggtaatgagtcggtggcagaaggcgtatttacagtgaacgctgcggaagcggacagtgttattcatcttctctcactgccagtgggcatccgtatcaactcactccaactggtttcaacgggcggtctgggtactgcaaccgtcagcattaagtccggtgagcatgctctcatcgataacagcgaagctgtttctgcaaaatttgccagatatgtgccagtggagccgtacaccacacagcgtgacggggagctggttactgtcaccattaagactgccgctgcaaccggcaccctgaatgttctgctgcgttataccgtggtgggatactgataaaaaccttccggcccgcgtcatgcgggcttttttacccggggaattatatgagcgaaaaaattgccgttgtctatatcggccccaaacccgtgaaaaaggatacccttaccgggagtcgtacactgttcccgcgtcttgagccggtgcatgttgacaatgcgtttgcttggcagttgctggccttttctgacgtctgggttcgtcatgaagagcttgatggcgtactgaaaaagcaacaacaggatgagcagttgcggcaggcacagcaggcgcaggaaagagaacaggttgctcttgcagaagcggagaacagttttgtggttagcgttggtggtcaggatgtggatttgagcaaactcacgtccgcacggctggcaacgttgtgtgaggcagaagagctgaatattcacaaagacccgaaagaaacggctgatgcattccgtatccgtgtgcgtgaggcatttcgccgtcgtgttgcggagactgaacagcatggcggaactgactgattttttaccgtatgtccgtcgccatatcagtggtccgctgaacattatgatgacggatgcgttatccatgtcggcagtggcattctgccgtcagtccctgttgtgccgccgtgaagccacgctgtcaccgtcagctggagaggactgtgtgctgccatatgacgcggagaatgaagagtgcgtacatattattcgtatcctcgctgacgggcgtgagctttttgccggtcatgatgtagaaatccgcccggggcgggtaatgcattttgcctgttcgcccggagaggtgagtgtgctttatgccgttgctccgaaagcagggagccgtcaggtgcaggatgaactgcgggcatggtctgaagaagtggcagcaggggcgcttgaacggttgttcatgcagaccggggtttcatggtcagacccgtcgcgcgcacagtatttctctgtgctgttttctgagggtatccgtcgggcatatcgcgacacactggcgacaagtccgtactcctcataccgcaatcctgtccgcagacaaaggttttactgatgacgacgattacagaaatcatcggacgtgtgaatacacaactggttgacccgatgatggttcgctggcccctgcaggaattgtgcgattattacaatgatgctgtgagggcagtgattctggcgagaccggatgctggcgcaagcctggaaacaatcagttgtgttccgggcgcccgtcaggttttgcccgatggtgtaatacaacttcttgacgtgatatgcctcagtgacggtagtgcagtcagaccattatcccgggaggtgctggatgcgcagtatcctgagtggcccacaatgaagggcattcctgaatgttttatcagcaacgacctgtccccgcgcgtattctggctgtttcctgcccctgacaaagagataagtattgatgcagtggtaagccggataccggaggcagtgtatgttctgacgcaggacgatgatacgccagttccactggaagaggcttatgttaacccactggtggactggatgttgtttcgcgctttcagtaaggatgctgccggtggcgcagaatcggggctggctgcgcagcattatcagagttttgttgagcaacttgggatcaaacagggggcagacagagcattgtctgcccgtaaaaaagtgtttaacggaggtggagtgtgagtgttgttgtttcggggacgctgaaatctcctgatggtgaggcgatatcaggagcaaatattaccctgacggcgctgacagtttcaccggatgcgctcagcggcaccagtgcgtcggcagtgacccgtgaaggtggatattacggaatgacgatggatccgggggagtatgcggtttcggtgacggtgaaagggaagactgctgtctacggacgtgtgcgtattgaggggaccgaaagtacggtgacgctcaatatgctgttacgccgcagtcttgttgaggtgagcatacccggagaactgctgacagatttccggcagatacagaataatgtggctgatgaccttgccaatattcgtcgcctgaatgaagacacggcgacaaaaaacactcaggccacacagtcaaaagaaagtgcagcagccagtgcgaagagtgcatctgacagtgcaaagacggcaaccagcagggcggctgaagccggacaaaaagcgactgatgccactgaggctgcgacccgtgcagtcacagcagcggggaatgcagaggaaagctcgacccgtgccggagagtctgaaaaagccgccggagctgatgcagaaaaagccagacagcatgctgaaaaggccaggctggcgcaggagagcgccggagagatccttaagcgggcagaggctgccactgtcagtgctgaagaggccagacgtatggctgagaatgcacggggccccggggcctcagggagaaactggtccgaagggggatgtcggtcctaaaggcgaaacaggtccagtgggccctcaagggcccgcagggccgaaaggtgagcgtggtgacgttggtgctcagggggctgtagggcccgctggtccgcgtggtgagaagggcgaacagggggagcgaggaccgcagggaataccaggcctgaagggggataccggagagcgggggcctaaaggggaccagggggatatggggccaaaaggcgagaaaggtgatccgggaggtcctgcaggcccgcaaggtcctaaaggtgaacgaggagaagccggaccacagggaccgatgggagcacgaggtgagcgtggggagactggcccccgaggtgaaccaggtcctgcaggtccgagaggcgaacgaggagagaccggacctcagggacctcgtggagagccaggtccggcaggcagcgctgcaaatgtggctgatgcgacgacggcacagaagggaattgtgcagttaagcagcgcaacggacagtgatgatgaagcgaaggcagccaccccgaaagcggtgaaagcggcaatggatgtggcaaatgaagcgaaaacaaaggcagaagaggctgcagcaggaggtggtgttcccggtccgaaaggagataaaggggactcggggccagcaggtccggctgggccgaggggcgttcagggaccgaaaggtgatcccggcccccagggaccaaagggggatactggcgctgctggggcaaagggtgagaaaggagccaccggcgcaaccgggccacagggacctaaaggggatacgggagccgcaggcccggcaggaccgcagggacctaaaggggatacgggagctgcaggcccggcaggcccacagggaccaaaaggtgacaaaggcgatccgggggtggctggaccagcaggtccggcaggtgcgccggggccgaaaggcgataaaggtgatccgggagtagcaggtccagcaggtccggaagggccacagggaccgaagggacgacactggagcccccgggcaaggaacagaactgcttactactgccaatacatggactcaggcacaaacttttaatggtggtattaatggaaatttgacggtaaacggaaacggatcatttaacgatgttcagatccgctcggataaacgcaacaagcgaaatctggtaaaactggataatgcgttagatcgtctggaggcacttactggttatctttacgagatacagtactctgccgacg

SEQ ID NO: 885 - DNA, 6075 bp, Escherichia coli
gctggaagtattgagtacacgctcgtaagcggccctcacggcccgctaacgcggagatacgccccgacttcgggtaaaccctcgtcgggaccactccgaccgcgcacagaagctctgtcatggctgaaaacgggtatggcttagcagggctggggatgggtaaggtgaaatctatcaatcagtaccggcttacgccgggcttcggcggtttcacacctgtgctacatgtaaccaccgtatgccgccttacatgcgctgacgcgcattatttgccttgtttcgtctgaaagtaatcactatgattaaatatgattaacaactaatcggatatgcaaatgaaaaacaataccgcacaggcaacaaaagtcattaccgcgcatgtgccattacctatggctgataaagtcgaccagatggccgccaggctggaacgctcccggggctgggttatcaaacaggcgctttctgcatggcttgcccaggaggaggagcgtaatcgcctgacgctggaagccctggacgatgtgacatccggacaggttatcgaccatcaggctgtacaggcctggtcggacagcctcagtactgacaatccgttaccggtgccacgctgatggaactgaagtggaccagtaaggcgctttctgatttggcgcggttatatgattttctggtgctggccagtaaacctgcggccgccagaacggtgcaatccctgacacaggcaccggtcattctgttaactcatccacgtatgggagaacagttgtttcagtttgaacccagggaggtcagacggatttttgctggcgagtacgaaatccgttacgaaattaatggccagactatttatgtattgcgcctgtggcacacacgagaaaacaggtagattgtgtgtggggacaacttaacatagcctgcagatattaattctggaacattattatcagaccagatattttgcattccattaaataatcttgtaggagataaaatgaattacgatgaaataacgaaaattaccgctgaacgtattagcgactacatgactgaagctgttaatacagactctatagccgttgcggaaatgtttcataacgctgcatggggagtgcgaacattgtggtttgaactcgtcacaaaaatagatatagatatacataaaaagaacaggtatgcgagttatgatcttagaaggaaaatcgaaatgcagcatgaagagtttcagaaaatgacagagcgcgagcaagtgcctttattgaaatcgccagaataatagaaacagtacaagtacattgctgtattgtgttttccttgaatattgaatcgcggtgcccatgtactacgattcctttcgtgttgtttatcattgcacactttccccgactgagcgtaaacactgactactttcccctcaaactcctggacggcgaatgcaaaattggtctgttccagcatagaatatgttactttttcatgaccgaacccgaaattttgcgcgtcaataagagacgttgtgtaaactcagtccttttatctggcaggttaacccctatcaatcttaggatgaaaccacgccatcctctgtttgcctggttattaatttcataaagacgattgttttcctctcgtagttttgtccactctaaacaaagtgttatatcatccagttctgtgatgtgtttcacttttccattgacagttacagtgtttattccatttcctgtgatcatcatcttatgccttttttatcttcatttgggaccgtgcttttcttcggagtatcactattcgttaactgctgtttatcaataaaattcctgatgttatcaagttatacggggtactggcatctgtatgcccgttcatgtttattcaggatgaataaaatcttctccgcttctgaatcacacataacattctcttcccattttttctgatacgtaatgtccacctgttatcaggagtgtttattgcccagaaatattctcctgctgtgcctgcatcctgagccacttttgttctaatgtcgccagtctgcgaccggcactctgtgcttcagagtctgagacctgccctttggggtgaccatccaggccataacgtgggacgccggcgacagctgtccgctgcagatatacgcggcgggatgtgatgcaggacactgcacagagccattcgtccatggtcagttctgtctccgggtgttctgccagaaatgccgatatatcattgtttatgccaattttcaggggaataaatccaccaccttcagcacgaagatgaggaaacagggcctttattttttccacgcactcgtgagtatactcacgggtccagtgggagggacgtggaaaacggtgtcttttctttttcttcttcctggctggcgcttcggggatatgtgtttcgacggcagatgaatttattccggcggggctgattctgccgtctgttcagtaaatacaggtgcgataatatctgttttttcggataaggacggtggcgaaaaagtacgacgttttttcaccacaatgacgggagttttcctttcttcctgattttttcccataaatacctcggctggctggttttactctttaataatatcacaattcataaattagtaaatttcccatcaggtgatttttcatggctaataagtccgttctctgagtatttatactcgaggtagtaacagttatggcgtgacagtcgaattgatattctactgaaccctgacagaaacatggttgatatattctctcactttaatgttgtcatgatataaataaaaacaattcatttgaaaggatatcagaagaagatatcggggcgcacagttcatctctgcctttgtttcatggggtgttctttgtatattttacttactgtttaagcatgtacataaggagtgctttcattatgccaatgatacttgtaaagaagaatccccggggcaaagtgattcgggagcttagcagtgaggaagagactgcagtaaagacggtctgtggactgaaaaagccagcaaccatggcactacataacctggccaatgatattctccgggaaatgcgtgagtatgatgcatggttacagtgtgactgtattccgggagattcgccggccatgaattttgctgctcttaaaaacaatacgggtactctttatctgtccagttttaatcatgagcatgcacctgaatgccccatgtatcgtcagttatccggaaatgaagaggaaacatattccggagcaagccggcatcccgttagcacccgtataaattacagaaacttttttaccacctgatgacagtaattctgttatcagactgcaggcccgctctgcttaccataatggtgagagctcctccgttcgcaagaaacgtccgcgccttgcccgtttactcctgtctcttattgacgatgctgggctgaataaactggattccctggctaatccccgtatccggactaattatcgtgagtgtcttgatgccatacggcaggttacactgcagcaggagtatattcggggaagatccttatctgaaattatccatttccggcctggaatgtctgaaaggtctcaggagcggttaatggaaacgctggagaattcagaacgacactggcctgccagaagaaaacatatgttctttcagatttttatggcgcagcacatctgtcgtgatgctgtggaaattcactgggcgaacggtaatattcaggtcatcagacctgtgcgggggatcagtattaatggtgaagcgcagggcggaatacgtcccccttactgggttattcttgcttttgccggagtgccgatggcagaatcatctgcagtgaagggtatgctcatgctctttatcaactgacatgtccggtgcctgtggacagcaaactggaacgaaacacgctcactgctcttctgaatgtggccagctggcttaaaagaaagccaggtacgccggaattaagtctggaaaggcccctgtttgatacagaagtttatgttaatggtgaaaagaaatatgtcctgccggatttcattgtcacagcaagggctcctgacggaaagacggccagagtggtcatcgaaacgatgggatatgaagacagtgattactgcgcgagaaaatccaggcagcataccggcatgaagcagattggtgttctgcataccgatccaccgaaatggctggataacgatcatcccccttttgagaaacatatgtacggtgtttttatgcatctcaggtactgagatattttgtggctcagttctgtaacttttcccgtaacattgtctgttgttacgggaaagtccggtttttgtattgcaccagagaatactcagactgtgatgctgccacagcgtcagcaggctttctgaacggtgtaacattacttcatgttaatgataatcactatcattaaatcttgacatgccattttctccttaataaattaatactgtatatgtatccatatgcgtaagcagttaattcatttgttttcctcagaggatgaaggagataccgaatgtctgaccctgtacggggttcagtgagttagctggcctggatgtaaccactcattcaactcaattctcttagcgtgggaaaatttcccttttccaagcggacccctattaatatttgttttgttttaggttctattcaacataggtcatcctaaaatacattgaagataacaagataacaagataacaagataacaagataacaagatagcaagataacaagataacaaggtgttatcttgttatctcaaggtgttatctttgttttacttctgctatcaatcgtgatacctctgtttttgatagtgttttaagtgcttctaccgccgccctgacaacatcagaacgattcactctgcctttacctgaaaccatctcagccgttataagggcatcaatgtcttttaggttttcttcaaaaaaagaaatactcactggttttgctttgcttacaaccgatgatttatctgatgactttttggtattatcaaggccagccgtgccaccgttaataaatgctgcctcgtcacgaggtgaagtgtttgctctatttctcacagaataacctctttcactaacgcttcgatttcttgctgggctttatcattttgcgtttcaaaaattgtcattgattcggcccaagcatctcgatgtgctttacgatcacatacccgggagtttgccagatgcatttcagggtaatccttaagtacttcagctgcctcattggcttcattaacaaacatatttgtgggcgtcatgtttaaaacgagatatccccgaacatcctcattaaaatcttttgctgctgtaaaaacggagcatgtatgaggcacaacatccaggtccatctgagatgggcgcaaaggagaaatgaatacatctgcggccatcaatccactacgcatttctgcgctatcacggccagcacagtctgcaataacaaaatcataggatttttcgtgttcctttaacatggctttgatgttacctgtcgcgcctgtaaccggaatatgagggagatcttcagggcgattgttgtaccaggttaatactgatttctggtcatctgcgtcgacaataatcactctattgcctagtgacatcagatacgcagctatagataccgccagtgtacttttacctaccccacccttttgactacctaatactattatcattatagcctcatattaagctgttaagttaacaacttaatattgccatctgaacgcgaaccatgcaattatttttgttatgttaacaacttagcaagttgttaagtatttgatttatagattaattaagataacaagataacaagataacaagataacaagatagcaggataacaggataacaatattatgggtggattacatattcataactgggctactggcaaatctgtccatctggtggtatacgcaggagaaagcatttcccgtttcatttgccattcaggggcggttcctcgccccgcaaaccacactttcccttttcccgactggttcagttcatcga

SEQ ID NO: 886 - DNA, 587 bp, Escherichia coli
acacacgtgaacttccagcacatgcagcttctggccgcaagttagcgcacgttaaagcccgctcgacgctttctttctggtattgaagggattgggatgggctaagcattattggcgtcctgcatcatgagaaagacaatcatggcggcgcggagtggagattcaccgcagaagtagtagccaggaatattttcccattcccaacaaccttcctctaaatcacctcctgaccatgcgcaccattctttttccgctgtcatccacatagtgctgattttgctttcagtgattattggccacgcatattcaggattattgcaaggattgaagcaatttccgtttgaagaacggaagccattaatatcccttttttgcgtctgccaaataggacctctttcgtcagtggggatctcagaatcgaagtctgcttcgtcatcaggtatgaagaaatgctcctccatatctaaagcctcacatactcgtctgttaatttcaaaatcacttaactgtgaataatccattgtcatttcctcgcacgatgtcttagccaccggatatcccacaggtgagccgtgtagttgaaggtt

SEQ ID NO: 887 - DNA, 3533 bp, Escherichia coli
  modified_base (23)..(23): a, c, t, g, unknown or other
acgtttgagctcccgtatcagcngtgttcaggatagcggtctgactgctacagttttcatcattgtgtttaaaccaacattgtaattcacattctgaccctgctccggcagggttttttgttatccagggggccattatgggtggaagtaaaggcggtggtgataccaaagtaaaaccaacagcagcgcaaatagcacaggaagaagtggcctggaaagggtggcaggattatcaaaaatatcctccgcccggctgaagataacttcatggaaaaggtcgatgacctgaacagtgagcagcagtacgacaatatcgctggcacaacaaatctggggtatcagaaacagtttggcgaagcacgaaaggagctggcgggtaatcttgctcagtccggtgttgacccgtccagtggtcgctttaacgcggtaatgaatgcgaaccagagtgatcaggtaaccgggcagattgacacaaccacacgggggcaggtatcgcaggcagataagtatgttgccgggctacaggatgttgccgctctcggttctggtcaaaaggcggatgcgttacagagttttaactcgctggcagacagcagtctggcaaaagctaaatcggacgcacaggcggcgtttacgaaacagcaggggcgagcctctcttgttggcgctggtctgggtgcggcaggtgcatatgcgatgcataaggctggcggtagcggaggaagtggcggtgctaaaacacctggcaccggcgctaatgccattcagcatcaggctcagaactggagactgtgattatggagtacggtaaatacgaaacacttgcgagatacggttataccggagcagcccgcccacagggggactggcagacatcagcagcgctgacacgccaacaatacgacgactggcgaaccagatatttaccccgcgtagcaaggctggctgaccttggcgagaacaacagcctgatgaatgcacagcttgcacgggtgggaggccttgccacttccagtctccgtacagcgcagatggcgcaggataaccagatggcgagatacggggtaaaccgcccggataatcccaacagtaacacactggggttacgtaatgccctggcaattgctggcgcgaaaaatggtatccgtgaagcagaacaggatcgccagatgaacatactgacgggggcttctgcaccggcaagacaaaaactgagtgttggcggaaaactggtggcagcgtaagggggcaatatgggatacggtttactggatattgtgaatcagtcgcggcgtgaggcattacagggaataagtgatgccgacagacgacgtgaagaaattgaggccgcgaacaaacagatggcggcgcaacagaaagcgcagaacaaacagaatatcggcacgggaattggtacgggtgcagctatgggcgctgctgttggtggtctccccggtgcggctattggtgctgtcataggtggtattgctggttctttgttttaaggagtggtgaatgagcggatttgcacagggtttacttgccggattcagcacggttgaccaggcaatgacccgtcgtaaggaacttggtttgcgagaagcacagcttgctcaacaacagaaaaataacgagcgcgattttgaatttgcacagtcgcagtttgaacataataaagacgttgatcagcggaactttgattacagagccaaagtcgacgaccgtaattatgcactgcaggaaagggagtttaacgccaaccagaattaccggaatgcgtcgctgggtatggagcagcagcgactccggatgcagaaatacaaccagcgacggcttgagtataacgatatgctggcgcgcgatcagcctgtgatggcggcgcttggaaaggctgtggatgctggcgatcgggatgcagcaatgcgtctttacggccagttgtcagagggtaatccgctgaggctgatggcgaatgatggctatgtagcgaaagcgggtcaggccgtgaacaacctgcaaaaaatctttgatgacaagccagacagggctatcgcttcacttaatacgccggagaatcttgatgtcctttccggggtgtttggcccggaactgcaacagcgtattggcatgcccgattcaaccgggaaaaagacgataaaagaggccaggattggcagtatagtaccggcacagcaggaagggtacatacttatcggccttgatctcacatacagtgatggctctacagcacataaacccgttacggaatacggcagtgcacatcctgatgatcaaaccgtgctggcggtgcctgttgataaggctgttgagcttgtcagggatcgcagtaaattcgcggaaatttcgaaaaatttcggctatttcacgccgaagcagcagggactttctgcggatcaacttcagaaaggagccagccaggtagcgataaaggttgcacaggacggcggtgatgcgcagggagcagtgacgcaatattatgcttcgatgggactgccgcagtatcagcagcaaattcagcagcaaaaaattcaacaagggattaccagttgggcgggtgatgatccggataagcaggcatttgccagagaagtggcctcccgtcagccagaaatgctggagcctcagaatcagaaattgctggaacacgggtatgcgaattttctccgtattcaaaaggccaggggggaacaggccagggatgatagcgcggcctctgcatctgagtttatccgtggtctgaaacagaattacgcgcagtaattcaccattcccgttaatactatttcctgatacccggtcattgtgccgggttttttatggagtctgtatggcttattccgatgaacagcgccctgaagcgcaatttggcaaccagagccgcaacagcctgaacattcagcagccgggagagactgacagctatgatgtgtttttctccgatcccaatcgctggaaggacaacagcacgtcgttcagcctgggcgatgtattgccaactatggggaaaggtgtcgcccagtccgtccgggggacaggggaaatggcccgtggactcggtgatgcgatgattcagagcccggtaaaaacaggggcacgtattttaaatgagttcagccgtatggggctgccgggagtagcaactgttcaggatatttttgtcggtggcagcaagggggcggatgaggtcatcgacactctgcctgatggaaaaaatgcggttactgatactgtcggtaaaggtctgaaggtcacaggcaaggcagtcagtggcggcgctaaagcctcggatgaatggctgactggcaagatgtcgccggggcgcagcgggcgctgaatacaccgatgactgaaggatatgatgattcagcggtctgggtagcgaaaggggttaacctgattggtgcgcttgtaccggatatggttgcaggcggtgtgactaaaaagctgggtgatgtcactctgcgaaaagtgctgaccgccgggctggagaaaatacatcgcggtagggatgc

SEQ ID NO: 888 - DNA, 491 bp, Escherichia coli
ccacgcatcagtcatctgaacgtgtccacgttgtttcagttacccacataaatccgcaaacaaagaactttaagaagctgcaaaccagaaacagcaaacctgcaatataatcttaccccagttacttaatcccctgcgttgcttcccgcagggaaagtctttatctctgaaaccactgtgaacaaatacaaagaggccttcgcttgcagcggccaaagccgcgccgctcagaatctaaaagcacctcccacgctgacgcgcgggccccgaacctcaccgttctgaaaccacaacaaaaagacatcaggaataaaaacaccacacaaacgcagcaccgtgcctacccctcataactgaaaagcgaggccgcccccgcccaaagggcgggaacaacatcgcttttaattatgaatgttgtaactatactccgtcatcgctgtcagtcttctcgctggaagtattgagtacacgctcgtaagcgcctcacggcc

SEQ ID NO: 889 - DNA, 12586 bp, Escherichia coli
  modified_base (12491)..(12491): a, c, t, g, unknown or other
  modified_base (12493)..(12493): a, c, t, g, unknown or other
  modified_base (12497)..(12497): a, c, t, g, unknown or other
  modified_base (12549)..(12549): a, c, t, g, unknown or other
  modified_base (12557)..(12557): a, c, t, g, unknown or other
  modified_base (12563)..(12563): a, c, t, g, unknown or other
  modified_base (12571)..(12572): a, c, t, g, unknown or other
gaacagagcggcaataagtcgtcatcccatgttttatccagggcgatcagcagagtgttaatctcctgcatggtttcatcgttaaccggagtgatgtcgcgttctggctgacgttctgcagtgtatgcggtattttcgacaatgcgctcggcttcatccttgtcatagataccagcaaatccgaaggccagacgagcacactgaatcatggctttatgccgtaacatccgtttgggatgcgactgccacggccccgtgatttctctgccttcgcgggttttgaatggtgcgcggcgacattcatccatccactcggtaacgcagatcgggtgattgcgatctttgcggtaaatccggcatgtacaggactcattgtcctgctcaaagtccatgccatcaaactgctggttttcattgataatgcgggaccagccatcaacgccaaccaccggaacgatgccgttctgcttatcagggaaggcgtaaatttctttcgtccacggattaaggccgtactggttggcgacgatcaacaatgcgataaattgcgcatcgctggcatcacctttaaatgccgtctggcgaagagtggtgattagttcctgtgggtcgacagaatccatgccgacacgttcagccagcttccctgccagcgttgcgagtgctgtactcatccgttttatacctctgaatcaatattaatttggtgacgggcgatggtttcagccatgtagcggatgtgttctgccatgcgttcctgaaaatcgacatcgtcatcaaatgcacgggaaatagcttttttgctggccccgtgacgttgcagattatcgatgcatagcgattcaaacaggtgttggggcagacctttttccaggtcgtctgccagctcagcttcagtttcttcacgggcaatttgctggtagtgtcgtgcccatgactgctcttcaatgcgatcggggataagccaggcattcatgatttatcacctccgaaattttcaagcctgttggcaatcatgatggcgatatcagggattgctggcgctgtggctatacatgcggggttggcgcacaaaccatagacggcggcaatcacgagctgtcttttccagtcgagagttactggctcagaattggcgtcatcgccggacgtatcactgcctggctcgttctgaacaacggtttcgccctcctgagcggcatcaacagagttttcctgaatgatcttctcctcagtttgtgctgagtcttctccatcagcggcgtcattttctccaaaagtttcagcgtaagtttcatctcccattactggaccacagtcagggcaatggccgccaccgttccgactgcatgtggtgcaaaccttttccacttcctgttgcattactggccctggctgttgctcttctggcccgttttgttgcgtatccgggctgttttgtcccgcttctggggcaatttgttccactttggactgattctggtcctcagtgtcgcgagtctggatccccttcacccacttcggatcagcagggttactgatgcattcaacgaattctccacgcgaggcagccagtaatttgtcggcatcgactggattttttggggggatgttttccctggctttattgagttcctccctcagttcctggtatttcgtttctacagatgagacattttccagtgattgcgtgtcctcattatgtttaactggaatttcttccactgattcaggcgctgcctgttcattagccattgtgtccgatgcttgttgcttttcttcatcgccatgttttccttctgctgttccgcactgcggcatcggtgctgatgagcgaccgcaggcaatttccacgatttccggatccgggttagcgtgatcggtttcggtcaacactttgttgagatattcagtcacgcgtgccgggatggcctcaatgccgattggtgcttctttcacggaagccaccacaatggcgcgggaataatccagcccaccgggcatggcgataaatttgtcgcgaaaaacagaaaagggcggcttattctctgacacgatttcttcaacgcgttttgcgtgtgctgggtgcaggttataaatatccacatccattgaacgggccagaacgccggtggctacatctcgtgcgagtgatgtcttatcatgtttgaatccttcaccacgatcggtaatatttccgccgccagcgttagcaccggaaggcgtacgggtaatgcctgaaacataatttccgttctgccattcttttgtcagcaggccctgatcaaggtagtcagttttcatccaggtggaaatgaacttgtcgaattcagccgggctgattcgatgatttgcagagtgggggaatgctttccctacagattcagccaggcgactaaggtgatagttcgtcagtttatccagttcatgatgcgcggcgcgcacagcagtaagcaggctctgaaggtaactgtcctctgtgtccatctccatacggatcacgttattgcgttgttctggtgtggcatgatgccggtattttccatcttcatctttgctgaataagaagaggtgaaggaagcgatgagtaaggctcagagtggcgacgggaatttcacactcagaacagtcatcgtcgctgtccggggattcgcttttctccacatcatccggaatagttccgtccaggttatcgttgtcatcgccagcagttgtggcatcttcaccgttgatgttgtcatcgaaggggatagccatcatggtgatgccatcgttaccgcctttttcatagcggttgcagaattcagtatcaaacacgccttccggtggaaggtcattcacgacggggaaatttacgcgaacgggttttttgaaatcatcctcgtcgtagcctgcatcgtccatggctgcaatgcagcgggaaactgcgacagaaagttttctggcctcggtccagaaaaaaccgcctttgatgccaaggcgttttctgactttatcgttttttgcttcgcagtgtagtgcaaaagtctgtttatcagcgctcattgtatttaaacctctggctggattagaattagcggccctttgtctgatttctccgaatacggtgacgcagggagaaatccggtagcctgcgctgccggatttttatttcagtggaaggttgcctggtttgctgttttgtgagttgtttttcccttttcgtgctggcattcagggcagtcgcactcagaattttctcttgcaaactcaagagcctgtgcaagtgtatggatttgttgtactccaatgttgcttctgacaacttcacgtgcagcatgaatatatgggcttggtgttttgccatttaacccacataaaacaaaacgactgtccttatattcgttatttccaacttctgtaagcactgaaaaagaaaatacaaagtcgattttgtattctttgcatattttactgatgcgttctgcaatttctttgagttcatttattgcatcaggactggttttggaaaatatttcattttgcgcaagttctttcattttgatttttccgtgattgataattaatgcggttttatttcggcttgtctgttacagatatggaaggtgtattttattactcgtcacaacgacgctgcttttacgggtaagccatcgcgcccgatgaaaactttaatcatgcagtcggtaatgcatgtttttgttgtgaagttacgaatatagagttttctcttttcaatattgtttgctgaagcgatatatgtccgaccttcatgaagaacataatcgccaggcgtcacgcactgacgtggtatttcatcagtttcgaagtgatgagcaatcataattatctccattttcacaaatgaactttgttgatgcggtgcctggtgcctccaggtgacgttaaccagttaacaactaacgccgggtcaggggacgatgactttccgtgacatcctgtcggtttaactgttccgcgtgcgcatagccgcattcaccgcatcacaaaattcactttaaaaagggcggacatcagcaatcggcaaaccgatgtccgccaagggctacacacagcaatgttgttattcacaaccggaagcgcacggtcgaagaaatctaacgacaagccttcaatgggtaagagtcttcgccgtgcactttcgtgttgtaccctggctttcagggtaatgtctgttcagtaaactgagactgccggaactcacccgtgtccggcgcacgatctccacctcacccgtggagaactcctcaactacaaaccccgtaaggagagtgaatttatgacacaagaagaaaaagtgatgtttctgatgcggctggctgtcgatacccacaacacacaattcagggagaaagatatacctcaaaaggcagttcctgccgcggtagataagggcggtgctattgccgtattttacgatgcatttgaatcattttttgatgaaaaactcgacgctgttagcgacttcggaacatcgagtaataaataacgttcattacggttcttaaacaacaatcagtgggtttgatgttgttcttttcaagctcacttgccatcacttccattattcttgcacttacacgaattatttggtggctgtaagcgacgcaactgtcgctgatattgctgtttatttctattacttcattttcactggcggcgctaaatttggatatgccgtttccattgtcctatttcagtgctttttctgccatctggatgcgtgtcagcgttgcggaatttgggctaagtcgataaacctgtctggcatcttccagaagcagggcgataatgtgcttcagttctgtttcattcatagttaactccggtagttgcaatttattaatatcaggcggtcagctctttaagcttctgaactgctttattcatttcatccatacagtcgatgaattcgtccagtttaagctgcatttttccggcggcctgaagaatttcaagttttaagggcgcaagttttttgttgaatgcatcatcttcctggcgttttttctccgcaatttcggcggctttcagcaattcttcagcctgttttctgagtatttctggtgaaggtgaaactgctttgaggttattcatttcaggttcctgttgttgcagaattaatttgttgcattctctgcgtgagcgtttcattgcagattcgcacttcttgcaataaatggctctcccgtcacgcttgctggcatctgaataaaaatcattgactgattttgtctgcccgcatctggtacataattttgattgaaggtccttaatgattgtgacgtttccttcccgtttgggatatccatattttttgtggcggaaaaaggttactccgttaccagaaccttcttttctgaccttaaatacaatgatgctttcccgtttatcgataaaatctatgagctggtttctctcctttcctgacagttcggcaaatgtcttaacttttttagtaacttccgtaaggcgaactccatcaggcattttttcaacgaagtttttaatctctgcaagcggacgccataatttttgcggcaaaactgaaggcgtggtcatcaatcacctcgccgtcagttgttttgatttccggtagcctgccgcgtaaatggctacgtttggaagacatacaccagtttctggttgcttatgtccaaactcattcgcgtacacaatggctgctcgctccagattgcgtctgtattctttctgttgccagatcacgtcctgtgccatgaacttaattggcttagcgtcttctatgcgctcaggcgtttcgtgagtacctttagcctgaatctgcgctctgcttagagtagggcggtgtaatacttctgaacttattgcttcttcgcgggccagcacgccgttagctaatgcctttgcctttaaacgctcacgacgatgagagcgtgaattgcctttgaactgagttctgcgtgtcatatagacctcctgatgaactttggtggtgtggtaggtgggagacccatttcgacctgtttcggcctacttcaattcggcaatagtcccgcaggccccgccgctttacgtgcgacatattcccgtccatgaacccttcaccacaccccaaagttcactttggttattgcgctttgtcagcgccgtagattcatatttgaatcgttgtatattcaccgccctggtgagtagtgcgtcctgctgatgtgtttagtatcaccgccagtggtatttatgtcaacaccgccagagataatttatcaccgcagatggttatctgtatgttttttatatggatttattttttgcagggttgagtggcttgggaggtgatcgagagatctgaattgcgatgtttagtgagttgtatctatttatttttcaataaatacatttggttatgtgtctttaggtgggggggtgaggcaaagaaaacccggcgctgaggccgggtttttctaggctaccagagactcaatccaagagtctctggtatggaatggcaacactcgtgcggtatcattaaatagtagtgatagttgctgtagctcaggtgttaacccatcgctgtcaactattacaaatctattgtttatgtcaggaacgacctgacttaagtcaacaatcttcccaactgttgagtgggcagtattccatcccttactgctggcaaggcttaccgtaaacccgcgttttggtggtattagtcgagactcattccttagcgttaacggaacagtaatgttatgcccactaatacctttcactttttcctttaaggctagtcgcttcccaagccctgctgattttaagtaactgattacacatttttcgaacttatcgtctttgacctcagcataccaatcagcagtttgggcggatgcaagaatcccaccacgaataacatttgcagttacctgtccaacggacgactcatctgcccacgcagatatctctccagagtcatttaatgaaattccttgcgaagcgagtgatgacctgatcagatcaattttctttttagtcaggtggatgccgcgtgattcaatattcatcaatgtatcgcagtagtctgtaaccctatactgaccactcatctcttgaacgaatacacttatctgctcacaatcatcgtagtatgtgaatggactaataacgcgcagcaacgtgtcgctcattgggtggcattcaaacccgagcttagatatgactgttgaacacgttacatttcccatgataactgacctgatttatcttgattaggtaaaggtgggctgccttcatatatgatattaagcgcctcgcaaaaataattccagtagccaaaaaaatcatctggcttgatgttcgtttcaagcttaagtgcaatttcttccccagctgattcgaagtacatgtgatagtgaggacctcgagccacctcaacaaaatctggatggttcactatagatttattacggtgtggcttgttatccgcagggtacggatcaagcgcgtaaatgcgcctgtcatgaagaaacatcacaaatgaaatcttcactatatccaccccttcaacgataggaggacgccagtgaagcataaatcttatgcctgtgattgggttgccaatttcatcaaaagctttgagatccaatttaaaccagattggggttcgtccctcacttccggtccatgtaactccgctaaaagttacttttttcaagcgagtaatagcttggtcaacctctttctgggtaggcttaaagtcgccttttttagccactgattcgtatcaccatgaaagctattgttaatacctgtgcttcttgtcacccaaacgtctcttcaggccactgactagcgataactttccccacaacggaacaactctcattgcatgggatcattggatattgcgggtttagtggctgtagaaacatctgaccgctatccctgatcagtttcttgaaggtaaactcatcaccaccaagtctggctatgcagaaatcacctggctcaacagcctgctcagggtcaaccagaattaacatcccgtcaggaaaactaggtttggatcctgttggcgcggtcatggaattaccttcaacctcaagccagaatgcagaatcactggcttttttggttgtgcttacccatctctccgcatcacctttggtaaaggttctaagctcaggcgagaacatcccggcctgaacatgagaaaaaacagggtactcatactcacttctaagtgacggctgcatactaaccgcttcatacatctcgtagatttctctggcgattgaagggctaaattcttcaacgctaacgttgagaatttttgcaagcaatgcggcgttataagcatttaatgcattgatgccattaaataaagcaccaacgcctgactgtcccatccccatcttgtctgcgacagattcctgggataagccaagttcatttttctttttttcataaatagctttaaggcgacgtgcgtcctcaagctgctcttgtgttaatggtttcttttttgcgctcatacgttaaatctatcaccgcaagggataaatatctaacaccgtgcgtgttgactattttacctctagcggtgataatggttgcatgtactaaggaggttgtatggaacaacgcataaccctgaaagattatgcaatacgctttgggcaaaccaagacggctaaagatctcggcgtatatcaaagcgcgattaacaaggccattcatgcaggccgaaagatttttttaactataaacgctgatggaagcgtttatgcggaagaaataaagcccttcccaagtaacaaaaaaacaactgcataagtaacaccgctcttttcacaatggacattcgtcctacgtcgctgacaaagcgagtcccaatatatctgaccaactaaggccatatgcgtttccacgcatacctttcaactaactattcactattggaaatcttaagaaatggaacaaacaagttacagcaaactatcacagcgcgatatcgatcgcgctgaaacggatttacttatcaacctgtcagctctgacgcaaaggggactggcgaagatgattggctgtcatgaatcgaaggtcagtcgtaccgactggcgatacatcgcggcgattttatgcgcgtttcagatggcatctgatatcagtccgatcagccgggctttccagcatgccattaacgttcatgcaaataaaaaacgtccggttggggccggacgttctgagcaaatcctgatgaatatctgatattcaggcagggcatggagcaatacacgggaataattctgccacatctggaagaatttcgccagcaacaacaccaaccgcagcagcctgaagccgattgggttaacccgggagataccgggaccgtctgtgaagatgtgcagtcacaccaatgtgcagtcacaccaaccgcagcagcctgaagccgattgggttaacccgggagataccgggaccgtctgcggtatggagtaaatcttgtatgcgaggggactatgcgtaattacgcaacaatttcacctcagttctggttaggcgaaacagggagaaaactaaggaagtctggtccggaatgtatggtagtggcgttgtatatgatgacctcgcctcattccaatatgctgggcctttattacctgcctgttttgtacattgctcacgaaaccggacttgatcctgaaggggcttctaaggggcttcaaatggcttgcgaggctggtttttgcagctatgaccatgattctgaggttgtatgggtgcatgaaatggcagcatggcaggttggtgaatcgctgaaacctggcgataaccgttgtgctggggtaagaaatgaatattccgcgttgctggaaaatccttttttatcatccttttatgatagatataaggatgatttccacctggatgtcagacgtgaatcatgtcggaaaattgaagccccttcagagcccctttcaagccaagaacaggaacaggaacaggaacaggaaagggataaaacccttctggtccatggcgaaaaaatcgccacggacccacagggggatttttgtcctgttctgactgaacgtccaggaccagatggcacgacaccggaagcagattccgggcgttgtgtgcagcaggtgctgatcgtcgaaccggagcaacaacgccaaccgcagcagcctgaagccgattccgcgatgagcgggaagccgattgggttaacccgggcgatgccgggaccgtctgcgggacgagttgattatcctgacgtgttcgaacgggtctggcgtgaatatccgcatcgggcagggtcaaacccgaagaaatccgcgttcaatgcctggagggccagattacgcgaaggggtgtcaccggatgtcgtgctggatggcgtgaggcgttacgcaagatacctggaggctaccgggaaagcgggaactgaatttgttcagcaggcatcgacgttttttggcccgaacaggaatttcgaaaatccgtggtcgctgccgaaggctggcgcagtcagcctgcgttgcgtgaatcacatttctgaaccggacaccgaaattccgccgggtttcagggggtaatcagccatgaaaaacatttcgacaggagggattcttgaacgggtgcgccgtctggcaccaccgcacgtggcagcaccgttccggacgaccgacgaatggcgggaatggcaactggctgagggccgtaagcgcagcgaggaaattaaccgcctgaatcatcaggcgcgggttgaaaaaatcctgaaccgtgcgggcatccagccgcttcacaggaagtgctcattcgggaactaccgggtgcagaacgacggtcagcgccatgctctgagccaggcgaaatccattgtcgatgaattgatgaccggttatacaaacttcgtgttcagcgggaatccgggaaccggaaaaaatcatctggcggcggctgtgggtaatcgtctgctgaaggccggtaaatccgtgatagtggtcaccgtggcggatgtgatgagcgcgttacatgccagctatgacgacggactgtcaggagaaaaatttttgcgtgaactgtgcgaagtggacctcctggttcttgacgaaattggcatccagcgtgagacgaaaaacgagcaggtggtactgcaccagattgttgaccgccggacggcatcactgcgcagtgtcgggatgctgacaaacctgaatcatgccgcaatgagcacgcttcttggtgagaggattatggaccggatgaccatgaacggtggtcgttgggtgaattttaactgggagagctggcggtcaaacgttggacgtcagggtatgtgagaatttttgacgaggtaaattttcgatggaaaccgtattgcatgcactgaaagcgatgggaaaagccaattctgttgaactggcggcgcggcttgatatcagccgtgaagaagttctcaacgaactgtgggagctcaaaaaaaatggcgttgttgataaaacgggtcacacctggtttctggctgtcgaaggtgaagccggggtaaccgaagggcaggcactacaacctgaagcgccggatgtggtaaccgaagaggtcgctccaaaagttaccgcagacatgatgattgagtttatcgatcaggatggggctaaaacgtgtgaggaactggcggggaagttcggtgtcagcactcgtaaggttgcttccacgttggcggtggtaacagcaacgagacgcctggtacgcgagatcagcaacggaaaattccgttacaaaatgcctgatgtcgaaaacggcgatttgagcgctttatcatcgcagaataagcaatcacaccatgacgcagaaaacagcgtggcaggcgatgaaatgaatcgttttccgttggcatcagagagcacggcaaaggccagtacagatgagtttatccgagaagttccatcattcaccgaaaaatctgccagttcggtgatgcttccatcgctgcatgctgccagtcgagaacttcgtcgcgccaaaaaacaggtccagaagtgggagcgagtctgcgccgcgctgcgggagctgaacaagcaccgggatattgttcgacagattgtcgattcatccggtcgtattgtgtcggaaaagtgattgccggagggcttgtggcaaaagtttttacacaagaagagcgggagaaaattaaagggcaggttgttgaactcgtacgccagagtgggcgcgagacgttacgacaactggaaactaaaactggggcaacaagatatctgatgagcgttctggccagagaactggttgccagtggcgatgtatacaactctggttacgggttattcccgtctgaacaggcgcgtaaggactggcaaaatgctcgcaaaaaactctcaagggcaaaggtgaagaaacctgcagtggttgatccggaccttatctggtcgttaccagacggcgaaatacgccgctacgacaggcgncngaanataatctgtcgcgagtgccggaagagcgaagttatgcagcgcgtactggcgntttatcanggtaantttcaggnngtagcgcagtgagt

SEQ ID NO: 890 - DNA, 2544 bp, Escherichia coli
  modified_base (124)..(124): a, c, t, g, unknown or other
  modified_base (213)..(213): a, c, t, g, unknown or other
  modified_base (225)..(225): a, c, t, g, unknown or other
  modified_base (231)..(231): a, c, t, g, unknown or other
  modified_base (236)..(236): a, c, t, g, unknown or other
  modified_base (240)..(240): a, c, t, g, unknown or other
  modified_base (375)..(375): a, c, t, g, unknown or other
  modified_base (380)..(380): a, c, t, g, unknown or other
  modified_base (432)..(445): a, c, t, g, unknown or other
  modified_base (449)..(449): a, c, t, g, unknown or other
  modified_base (451)..(452): a, c, t, g, unknown or other
  modified_base (454)..(454): a, c, t, g, unknown or other
  modified_base (483)..(483): a, c, t, g, unknown or other
gcccactctggcgtacgagttcaacaacctgccctttaattttctcccgctcttcttgtgtaaaaacttttgccacaagcccccctgaaaattacctcatgaccagaaatcaaaacttatcctntgaaaccaggcggaatttctgtatccggttcagaaatatgattaacacaacgctgtacaggtgaacgccccaggcggatgaccagttcntcccatttttcncggagntttgncggnctcatgatgttttttacccaagaacgaatcccgctggagacgcccaaacatttcacaaatttgtctgtgagttctgccatccagcatccgcattgtgcgaacgtcattggcccatgctgtccagttggttctttnggtcncatgatctcgccatcatcactggcggcctgttcgtagagacccacgatccgnnnnnnnnnnnnnngcgnanncnccagatcctcctggctaccccactggcgntttttcgcactaaacacaactgcgccagggtgccggattaaaaaatcctgttcagccgtctgcgggtccggttgcgaagcgtccggacaagaagatcttttatctgacggatcaggttttaatactgacggatcggggtcaatcatcgcccccctaatcggcagttttttatcaacagttgatccatcaaaatttgacgggtcaaccgttgaggggtcaatatttgacgggtcaactgttaacgggtcattttttgccgggctaatttttcttttcggtttatatgactcacgcgccgccgccgcagctgcttcgagtttttccacattaagccgatagatattgcttacattacgcccaccgaccttacgctcttccttcgtcagccagccctctttcgccagttctgcaatagccgatttcactgtggattcacttcttgcaccgatctgacgccggatagtttcaatggcaggccatgacacgccctcgtcattgctgtagtctgcaagacgggccataaccgccaccctggataagatcatgccggtgaaggcgcacccttcccagacaagaccatgaagcttgctgctcataaaacccccgaacaccgtgcttttagtgcatcaccacagcattccctgccgggccgccgcgattcatctggtcatacaaaacaaccgctgacgcaacaaaatcatcgacatccttcaccagccgatccctccgttcgacgatctcacgataatattcagaactgtggctgcgcatacgggccaccagcaaaggcggcatcgccttttcgatcgccggtaacagagcctgcattttttcaacagcatcaggggtgtctttctctacccagcggaaaattttctgggtattgcgagccagggcttccggatggctgtcgtcatacagttctgggaacgtcatacccaactcaaaataagcctgggttattccagctgctggaactttttcgccatcaggacgcgcccaggcattcatcgccatgcggatgtgttcatgcttgattttcatgaatcaactcccatcagctttttcgtagtagttttattcctgccaatagttaaaattgcatcggcagaaaataatccgtttgatgcaagagcgattttttcagcgtaatttgtttcgccggtatattctgtgcgaggcaattttccgttatccatccatttatagattgctctttggctgacaccacaaacgtcggccacaacagcaacgcgaacagttttgattacatcttcaagtgttttctggttcatatcaccctcacaatgtgaactttgagtacatgctataacagaactgacagtacattcaagagcgaatatcattgaacttatggttcatgaagataaagcgcgtaaagagttcgccagtaggcttgcgctagcctgtgaaaacgctggttatgaacaacatggaaggcaggcagaaattgcccgtcgaatgaaattaacaccaaaagcggttagcaaatggtttaatggcgaaacaattcctcgccgggagaaattaagggaattagcaacactaataggaacaacaccaacctatcttttgggagaggatacagaagaaagtggacaggtacgtttctatcaggagttaaatccaagacaaaaaatcatcattgaccttctggacgagctccctgacagtgagacagatgaacttttaaaaactcttgaagagaaaaaacagaagtacaatgcaatttacgaagagttagcacgaaagaaaaaacaaaaagcctcttaaaccagcataaatccggtagcgccttcctccgggtttgtgcttcactttatcccatctcatttttttacacacaaaatgtaccaaaagtactttacaacaatgaacgcaaagtacattatatacctgccaccaccccgccccacagaatgcagggcaatacttcgagttaccaggcagtggtcaggggttaagtagccagcccgaggcgtaagaacatgacggcagggttcaactttaataactatgcagcaggtttttgttccgcta

SEQ ID NO: 891 - DNA, 338 bp, Escherichia coli
tggccagacgggaaacactcatccccacggtgtgtgtgcccgcatcactgaagctgatcagaaccggccagatggcatcgaggaggtgctgtttttccggacggaaagcatatttgcgaccagcgaacgtccgtttctgcacgtaaaaaggatgtcgcgacatgcgcatacgcaggctctgttcgccagtcaccgggtcctttttcaccagacgattataggcatacccgagctgcccgctcagcgccttatagcgcgcaggacgataccaggtcggattttcgcatttgggtttggtggagtgctcaccacgacggcgtttcgtgcgcttcctttcc

SEQ ID NO: 892 - DNA, 917 bp, Escherichia coli
gaattggcctccaaggaacggttaaccggtaggctggtacatcgattcggattggctcaaggaacggtcatttgctgttctttgcgtttaccgcttctgaaatagtcattcagctcctcttccagtgaggtgcagacccccgtcagtaattccccggttttagtatcgatctcctccatggccattctgacatcagcggtcacctgctcctgacagtccgcgatttcccggatatccgcaagcaggctggagatatgcgactgcagtgactgaatgctttgctgcagcccctgatggcgtaacaacagatattcactgacattttccgcattctgcatcagttttgcggcagcagaatcaaccgccagtgccgcagctctggaatgtgaactctgtatgacttccgttatcagttgatcgatcagggagccttcccacaggtctgtcgccccttcagttgccagttcgctgtctttacagacgtattcttttttcatgcgaccgaaagcttccctgacaaaatcatcgacccaggcttcatcaacaggaagctcaccgttttttcgtaactcatgaagcgcacggttagccaggtatgcctgacgtgatgagcctggataaacgcgggaggcgggcagcacatcactgttcagcattgccggaactttctggcgtacggcatctgccccatcgccattgcggtctttctcatcaaatttattgaccagcacaaacaggcggccggctgatacgtcagcaatggcattaagctctttacggacgtcttcatccgcttttgagttcatctgggtgtaatccatcacagccagaaccgcagaggctttctgcagttgatcccgcatcatcacttccatctgcggttgtccggcctcattagggccggggtatccagcagt

SEQ ID NO: 893 - DNA, 4302 bp, Escherichia coli
gtatttcgagaaggggcttgcaagctgagttaacagaaatgaaaacggggctggtgctgtccggcggcggggcggtgggcgcttatcaggcgggagtggttaaggcactggcagagtgtggggcacagatcagtatggtttcaggggccagtatcggggctctcaatggtgccattatcgcggcttctcccgatttgtcagaagctgccgcacgcctggaggcgctctgggagcatctggggaataatcaggtgctgtcggtaaaccgatcggtttacttttcattgctgaaaaaattgttccaggcaatgaacctctgccagatccccggacgtgcaggagtactgcttacgacgctttttcgccatatatcgacaatcaacgggttcgaaaatctgatgactcagccgttgttgtcagatgagcccctgacagcgctgatggatcattatcttgatactgatgctctggcagacgggctaccgctgtatgtgtcgctgtaccccacagaaggaggcatgcaggatattattgactgcattcgtgctgaactgggtgccggaaccacgaaaaacgccgtttttcagcatatccagagcctgccccgcggacagcagaaagaggctctgcttgcgtcagccgcactgcccctgctgttccgtccccgtgaagttcagggaaaaatgtacggtgatggtggtatgggaggatggcgaaatatgcagggaaatacccctgtaacgcctctggtcgatgccggatgcaatatggtgattgtgacacatctgagtgacggttctttatgggatcgccaggcttttccggacaccacaatccttgagatccgtccccggaaaagactgaaacatgcaggtgatggtggcaacagcggcggtctgctcagttttacatcggcacataccgacgcctggcgtcagcagggctatgaagacacgatgctgacgatggagcatatccggaaaccgctggcagcacgtcaggcactgacccggtcagaaacggtgttgcagaaaagtctggagaaaacggaagaggcagattcggcactgagaaacgcgatggcccgacttaaataaagacgctccggagaaacgccaccgcctgtggtggtgtttttctggctggtgttattgaaaatattttcagatatatattacctggacgatggttaagattaatttatttaattttggagagaaaactcatgaaactgttaaacattcttttatctgttgttttaactgtaagtgcaaccgtcgcacaagcagaatcggcattgtggaagcgtaacagtgttgccggaactgatatgttcagtattggtaatgtttctattaactgcacgactaatccagaagacaacaatttgctaccgcactatgtgtggatttacggtcatacccccaccccgctaaatcagtacgattctgatatcatttttatcatcaacggtaaagagtatccggtcccacctgtcgacggaacacgaatgaatgagaacaaatgggtacactttatcgatgctatcggtgaagccacgaagttcgacgttttagtaaacggtaagaaagtcgacagctataccacaaatatcaaaaatgtgaaaaagactttgggtaacaaattctacggcagttgctggagcacctggttccaggaataattgataacgtggtgtaaaacacctcagtttaatttaatacagtgagtgaaaatgaatatcataaaaatattttctgcttcagatgtcacatattttattaactgaatgattaacaggagaatcagatgaactggcattatgaaaaaaatggtgtacgttatgataacgtaacagaggaagatattattgaacgtatccgccgtggtgaactgaatgcatcaacactggtgtggcaacagggcatgctggaatggcagccagtttcagccacatcactggcggaaatactgaaacaaagtgaagttcctccggcccttccgggtcaccgcattcccggaggcgttgtctggacgctggcatttgcccctttgattggatacatacttgagatgtggactgccgggctgaacggtatgtcatttgaacgggcttatgatgcagtcagcgaaggccagtactggtttatctctctgattctgaatattgctctgggatatctggatgaacgaaaactccgtaaatctggcgtggataccacagcatttggctggctggcatggttgatcccggtttatctgtggcgtcgggcaaaaatcctcgggcaaaaacctgcttatttctgggtctggttggttatgctgatactggtgttatttacggtctgatattctttatcgcagagtttactaaataatcaggttattagtgttcttaacaggtaaatgatgttcatcatggaacggatatattttatttgattcaggagacagtcagaaacatagtataaatatatcgccatgttgaaggtcatatcttcaggtatttgtttaataaacaagtcgggggttaatcctgacctctcgagtggattataagtattgcagaaacagtttttatacttttatttaatatcagaaacaatggagtaattatcatgaaaaatatcatcactattttaatgattgcagttatcagtttctttactgctaatgtatcagcaaacaatgccgttcctttaccaaccaacctgactgatgttactgacggtacagaattctggtgtcagggtactgatactatcgacggaggttgtgaatacctgggcacatccaaagacatgcaatacggtctggtacacgccatggggggtacagcgtgctgggatggtttatacggcgtaattaatttctataccggtaaagcccagaccatcaaatacaacaacaatcaaagttgtgaaggcaacatcaccgccagtttcgttaccctgaaaaacggtaaaccgggcgttaaactttacgacaatacgattcataaggttgtcgggcttgacgaaatcaaattttaatgtatgaattatagtatcttatctgcgcgttattaatatcaaatgtaaataaagccccggccattatggcaggggctttatttttactgaaaatacatgacgggctgtacattacttttattttccgaagaccctttctcacgcaaacagacagttgctgtcataacagcttaccgcaatgtgtttatccaggaatgcatttccggcggattatccgcaacgcggaaggtcagcgacgctggcgctgccggaattctgaacccgatgtaggcaaataacttaatgcgtggctcaccagtgaagggcttcccggacaataaacctcattcatttcacccatcaggccgcgtcttctccgggagacgcggctttttcatttataccgcttaatcattcataaggagcagataatgcgattagcaagtcgttttggttatgcgaaccagatacgccgtgaccgtccgctgacacatgaagagctgatgcactatgtacccggtatttttggggaagaccggcatacctcccgcagtgaacgctatacgtatatccccaccatcaccgtgctggaaagtctgcagcgggagggctttcagcccttcttcgcctgtcagacccgcgtacgtgacccgggccgccgggaatacaccaaacacatgctgcgtctgcggcgggccggagagataaacggagaacatgtccctgaaatcattctgctcaactcccatgacggtacctccagctaccagatgctgccgggttacttcagattcgtctgccagaacggctgcgtctgcggtcagtctctgggagaagtgcgtgttccgcaccggggaaacgtggtggacagggtcatcgaaggggcttacgaagtggtgggcgtttttgaccggattgaggaaaagcgtgatgccatgcagtcgctggtcctgccgccaccggcacgccaggcgctggcacaggcggcactgacttaccgttatggtgacgaacatcagcccgtcaccaccactgacattctgacgccacgacgccgggaggattacggtaaggacctgtggagtgcttatcagaccatccaggaaaatatgctgaaaggcgggatttccggtcgcagcgctaaaggaaaacgtatccacacccgtgccattcacagcatcgacacggacattaagctcaatcgcgcattgtgggtgatggcagaaacgctgctggagggtatgcgctgatgcctttccctgaagcgcagttctgactcatgtccgtcctg

SEQ ID NO: 894 - DNA, 389 bp, Escherichia coli
atcagggggaatattgctctggcagcagcagtacgacattctttatactttatccccgtgcctgaaaacatgtgctaaggaaacgggaatggcaaggtccgattacgatattatcaatctgtctctggaacatgaactgaatgagtggctggcagagagaggttatgccggactggcggataaccggaaccgcctggaagaagtggttacccgcaaattgcaggacagcttttatatcaacgtttcctgggatgcgctgaacacagcatacagtgaacacccggagtgggtttcagggcttgtctccggggatgagaattaataaatggattatgctgccatcaggcagtgtgattgccggcagggatttcgttttattctgtttcttc

SEQ ID NO: 895 - DNA, 10696 bp, Escherichia coli
  modified_base (2611)..(2611): a, c, t, g, unknown or other
tcgctctcgaccactgagctaaagggccgggcgcaggataataacggtacgtaactaatcctgcaatatcatccgttctgactgactaaatcctgaacttccctgaccgtctgctcaaaacgttcagtctccagctcaacgccaattgcacgacgccccagcgacattgctgctttgacgctacggacataaaaagccagccactgggggaggctggcaaactcgtagagcaaaatgctgttacgcaaacttcgttacagggtcatcctgcaatacaaaaaatacacaatatttagaaaactaatagtgccatgtgcgatttttaagattttgttattaattgtggtcgcaccttcctttctgtgtactttccgtatagctcacaggattctgggtacaaaaaaccgcgcatcggcgggttaagcagcgtggcaatgtaaccactcttatcatgatatgcagatttttacgatcgtaaactattttttcgctgataaaatacagaggttctccctcccggcaattcacgctcaacataccgatccatctcaagcctcactcccagcatcatcagcatgccttcaacaatcccctccgctttgtgaaggcgtttacctatacaggtgtcagagcacccatgtttccgtgccagcgccatgaacgtctcccccaacacgtagtaatcaaccagcaagtcatgcagatcgcgattgttccggtaaaggcgggctatgcacccgcatatcaccatcgcatcatcgtcacagcactgtggacgtgattttactttttcggggatcagtcccttaaatccggcagcaatgggcgaccatgtaacatcctcatagttatttaccgcccatgccccccagcgctcaagaacctgccggatatcacgcatcagtatctttaccccatccgcgatgaaccataaggacgccattgacgacggcgtgctttttcgcatctttatcatcaatgtattttctgactgtagcacgattgcagttcagtattctggcgacttctgtctgatttcccctggtgcagatcagtaattcaggtatcgtttgaattttagcattcatcaaatgttctccagttcggtgatttttatccccactctaccgccaggcactttcacgccgcgaattacgcgaatgtcatcgaattgctcgtcgtcttccgcaaatccggcgtggataagagagtcgagtaaacctttcaggatgttatcgaggtcgcgacggcgggaatctggtggttcagcaataattgtgatgcgaagtcgtgatttagtgaaaatgtctaatctgagttgccggatgatttgctgtacgtcttttcggtatttctggcctttatcgctgatgtagtactggcttccccgtcttcgccagtaggtattcaccgtcggcggccagggaagcacaaactcatattcattcatgacttaatcttcccctccttcagcaatatcgcctgcgtcctgatcacgccttccaggtggtaaagtctggcgtcgttgttgtcgagaattcgggtgcgtcggtcgatctccgcgtggcagtcactacaagcccatgcaccgatcaggtcgtcaggcttcattcccgttccgcaaattccagccatccggtaatgtgccagaactgtcgtttcaggattgccattgcatacgccgtaaatccgtacctggcattctctaccgcgcgcttctttgcgtaggttagccattaagcagcctcccctgttactttcagcattccgttatcgagcggctttctggtcagccactgttgaccacgcccggtgatttttgtggtgaacgagatctgtattccgtgatttgtattgaccgctgtttctttcactgtgaaatagccgcgatccatatattcctgcattggcacattgcgccgggaacctgaagcaataaggattttgtgatcgcgcatccacgcaaacagtttgtttggaccaataccaacaacctttgcaaagtttccaatcaaaattccgctggcctcgccaactcgatcggcaaactcaactttaggtgctgcgagagcaagctgtttctccagttcagccttctggtcttcaaggtcggccgcaaggcgcaatgcctcagaaaaggtttgtggtattttcggcggttgccccttcgagttctcgccagcggtcaacaaggcgagcggtgaattccggcgacaactgagcgacgacaataatgctgtctcgcttaccttgttcgccttcgaatatatacacgcttgtgaatttgttagggctaattgtttgtttattttcaactttttgcattgaaggaagttgaatcaccccacgctttgccagacgttctattgatattctgacattaccgtgttggcttcccaccaactcagcgatttcaatgcttgtcattttgatggcattgctatttatcagctcattcattgtcttcttcctcgtacattgagctattcggatcgctcatcagttctgcgcagcagtgctcacacacgtgaacttccagcacatgcagcttctggccgcagttagcgcacgttaaagcccgctcgacgctttctttctggtattgaagggntgaataatccattgtcatttcctcgcacgatgtcttagccaccggatatcccacaggtgagccgtgtagttgaaggtttttacgtcagattcttttgggattggcttgcgtttatttctggagcgtttcgttggaaggtatttgcagttttcgcagatgatgtcggtgaaacttcgtcgctgtcgtctcattcgtacctcctgtcggtaaatctgacaccctgaccaatagcccatgctgtcgtgtactcaatcagacttgccatacgcttcacgctcatctgcgcgctgctttcgcgaatgttgacgtattcgccttcaaggccgggcaaaacatcagcttcctgttttgttgccactgcatgaccgctaatcaacaaaaccttccattgttccggttttaaccatttgccgcaccattgaacctgacgagcgatatccgccagcatcgcgtgaaattttgcgttctggtcaaggttgcgcttgtagtcagtaatgcggatggtgactggcttgtctttatcgagtggtgttgcgaggatggcgttgattgcggcttgctgttgttgcttacttcggaggaagattgtttgcttcactgaacactcctttattttttatgcctgtaaccccattcttccagcaaccttgcggcgtaccacccaagaaacaaaggaaagaacattacaatgagatatgccacgccacggtcaatgttcgaaattgaccagattacgatgtaaccagtgcaggacaggaatattacaaaccccaaaaagctacttcgtcgactcatgctcactccttcactttgattccagcggcgcggatggattcatcgatatcgtcacggtcgtacacagcaatagcatcactgacaaaccatacaggcaactcaatttcaatagctgctcgcgatgcctgccacgtttgccagtggccttgaacatcgtccatcacgtattgaccaccaatatcaccactgccaatttcatggtgattttcagggtaacggataaggtctgatgattcgcctccacgtcgcaaccaactttcttcaaactgctttcttgattcgtccatcgatacttaccctcagttcaactcacaaaacgccacgccatttttgctacgacaacaggcataacaccgataatcacccagacaaatgcagcgccaaacaacgtataccatgggtctttaccgtcattcacaagacgaatgtagctatgcagaacaataaaaaacgtcagaagaatccatccaacgccaacgcatttgaatgcgacgagcataaactcagccacgatttactctcccccaaataaaaaggcctgcgattaccagcaggcctgttattagctcagtgatgtagatggtcatacgtcagccccttgtgcatatcgtctgccacgcgcagcaggtgcatttgatgctgtgcaaatctgtctggcttcatcctggtcacatgcaacaaagtgtccgttacagaaccgctggtaaaccgtaccaagcgagccaaaacggtttttcgtcacaatgatttcagcaaatggcgcggcgctactgttctcgtcatataccgcttcccgatagagcatgatgattgagtctgcgtcctgttcaatgcttcctgaatcacgcaaatctgcgtttgtcgggcgtttgtttggtcgcttctcaacatcgcgcgaaagctgacttagggagataacaggcgttttcaggtctttcgccatcgccttaaggcttccggagatgtgagcaattgcgaggtcgttgcgatctgctttcggcttctcaatcaggccaagataatccgccatgatgagtgacaggtttggattttcctgtttgtgccgttctgcgattgagcgtatttcttcgaccgataaccgcgaggcatcgactacccatacatccaaatctgcaagctgactcatgccgttagcaacacgcgcccagccttcgtcatccatcgatgcaggatttcgcagcacgctaaccgacatcctcccggcgttggcaatgcttcgctctgcaatctgcaatgcgctcatttccattgagaaaatcaacactccgcgccggacgtcagaaccaggaataacgcggcttgcaacgccttcggcaatcttcagcgccagttcggttttccccataccaggacgagcagcgattatcaccaggtcttctgcgttcatccctccggtgatggcgtcaagttcttcgattccggtcttcagggtatctgactcttctccgttcctcagacgcctgtcaagcgtgtcagtgtagtcagtgatgatttcccctaaccgtacaggtttaacctcgtcacggggctttctgatagctgaaagacgcttcacaagctcatccatcgcctgactcgatgcgtcgatggttccgctctgaattggttcacgcatttcatccatgatttccagcaccagacggcggtgatagttatccgcgaccattccggcatatcccttcaggtttgcggcactcgggcagtttttgctggtcatcaggattgacgtgaaatgctcctctccgcacgcctcggcaaccatcagcgcgtcgattaggtttctgtttcgcgcctgcttgcggataacctcgaaggctttccggtagagcggaattgaaaacgcttccggctccagcgttgccagaacgtcgctggcggttggtgttaatccaccaatcagcaggccaccgataacgctcgcttcgatatcctgtttcatgcaatccccctgtctgcaaacttcccttcccgaactcccgttaacgaatcttccctcagcaggtaatcaaaatcggccgtccagccagtgtcgttgtctccgaagtaaaacggcttggcctgatgtacaaacgccctgacatacgctctgaaaccgtccacgtttggcgttttcagttgcgggatgattttcttcaggcggcgtttgcgtttctcgttgaccgcaacagcgtgtggcagtctgtcaccgacttcggtgttgtaggcgttcaggaaggattcgtagtcgattcgttctgccttgcgacgttcaggtttaacctgcccatcgccgcccccattggggggtaggggggtattatttatattcttgttaataccttcttgttcatgatgtgcggttgtttgtgcggcttcatgtgcgctttcatgtgcggcatgtactctgaaagccgcgccattgctggcttcgtcatgtgcggcatcatgtgcggttgtttgtgcggcttcatgtgcgggtgaattgtccattttttgagcgtattcatggtaatttgtgatggtgatcacacgacctttttgcttctctccatcaatggagatcatcccctctttcacaaaaacctgaagcatccgctcaacctgatcacggcttgctggcttgccatgtctgtcgcataactgaagacctaaatcagctgctgtcacaaccagttgaccgggttgcagatgccattcatgacctttgaaattcgctttgtatggctttctggcggcattcaggagaaggttttcccacagggtgcgaagataaacatctttcgcccatgactgtttcagaatgctccggtacaacggaatgtaaccagttttctggttctccatcctgttgctcctgcgctcgtgtgcggcgctgaaatcgtagatttttgctgtattgctcataactacctgccttgacgaaagacattaagaacatcgttaaactgacttacggatatgtcttctttgagaagcttttccagaaatgtgtttggaatgaacgtatatcctcctcttttggtagagacgggagcaacgccctcgcctcagccttcagaagctcagttctggcaactttcacaaaagagatttgagttctttcatcaatggaacgaaggaagcgcaaacgcttagcttctttgtgtgtatcaggtggattaaagcctttgtttcgcatataattacctcgttggatgttgttaaaattccatttgtatttgatcagaacgctcggttgccgccgggcgttttttattggtgagaatcgaagcaacttgtcgtgccaatcgagccatgtcgtcgtcaacgacgccccattcaagaacagcaagcagcattgagaactttggaatccagtccctcttccacctgctgatctgcgacttatcaactcccacagcttccgctgtcttctcagttccaagcattgcgattttgttaagcaacgcactctcgattcttagagcctcgttgcgtttgtttgcacgaaccatatgtaagtatttccttaacaaataagaagttatgcgcatcaacttatgcgcgttatattcccgcatttcggcgggaatgaggaccatgactgttaaagagcaatttgcttatgccgctttgcggtaagcgctttcttgatacttcagggcgccagctgtaacgacttccagtcgataggcgtctttctctgggatgacttccttccactgagagactgctgcgtcgctaatgcctaacgctttagctacagcacgctgggttccgaagtggtcgataacatctttcttgtacatagactcgctccgaaattaaagaacacttaaattatccactaaaggaatcttaagtcaagtttatttaagatgtcttaactatgaaaactcaattgatgggagagcgcattcgcgctcggagaaaagaactcaagatcaggcaggccgcacttggaaagatggtcggcgtgtctaatgttgccatatctcagtgggaacgctctgagacagagccaaatggagagaatcttctcgccctggctaatgcgttgaagtgttcccctgactatctgatgaaaggagaggaaagtctttcaaacattgcctatcacagtaggcatgatccaagagggtcataccctctgattagctgggtgagcgcaggatgctggatggaagctgtagaaccatatcataagcgtgcaatagataactggtacgatacaaccgtagactgttcagaagattcgttttggttggacgtgaagggagactcaatgacggctccggccggtctcagtatccctgaaggaatgataatactcgtcgatcctgaagtagagccgcgtaacgggaaactggtagttgcaaagctcgaaggagaaaacgaggcaactttcaagaagttagttattgatgcaggcaggaagtttctaaaaccacttaacccacaatatccgatgatcgagatcaacggaaactgcaaaatcatcggcgtagttgtcgatgcaaaactagcaaaccttccataagggggcattcgccccttttttatttcctttaaaaatcaaagccaaacttaagttacgaaagaaaatttaagttttcttcaaaaatactcttgaccattaattaaagagatcttaaatttaagccatcagcaggacgctggtagccaaacggaacagattggcaggctctttaacattgatgggattgtcccgccgaaatgcgggaaccaaagagtagttggctttggggtgacgtgaagtgcagctgcacgacggcaaccggaagataagcacccggcgcgtcaccgccaaagtcaattccataggcgttatgcagccgccaccatattcaagaaagctgcacaagaggtaggaggatttatgtgaatacttacattcaattgagagattaattaaatagaactgatcgagcagagtccatgaaggctcataaatgctcttccatccccgtctaattggcggggaaggaaaccactttgtaataaaaaaattccaaagttgtttcatcggaggtcaacatgacagtagtcattacatatctggctgacgataacgccagaaatcgccgcagagcacgcagacaggctcaacgtgaacaggaaatgcaagagcagcgactggcgcgaaaaattgcgctaaagctctctggttgcgtcagagcagataaagcagcatcactcggaagccttcgctgtaagaaagcagatgaagtcgagcttaaacagaactgtatttactaccgcaagccacgcagtgaaatgggtgtgacctgttcaggccgccagaagcaacgcggaaaatcaattccagcttattacgattgaggtgagatatggaagaacaagcaaacaagattctcgtagaactactgcaaaaagccagcaatggaatagacgcggctgtttcattcagccaagcgcagattcctgatgttgttcatcagttgctgctatggaatatggttgacagtctgattaaaacattaatagccattctaacaatcccactggttttctggtttatgaagaagcagtgccaaagagttgagacaggtaaaatcggtgatgaaggatactcatgggagaggggaaatcccaaatacaggccgacaatggtttgggatagcaaaggagatattaaccttcttatcatgccattggttggagttttgactctgtgggggatttttattattggtgtagtaaccaatatgacttggttaaaaatttggctggccccaaagctttaccttatcgaatatgcagcatcattggttaagtaatttcaggccgcatagtcggcctttatttttggcataaacaacagaataaacactgcactgtgtattcattccaacgagtgaatacacggagcaatgtcgctcgtaactaaacaggagccgacttgttctgattattggaaatcttctttgccctccagtgtgagggcaatttttttgatggaggatatatgagtgaagtaacagatttagttgttattgaaaaagcaaatgcaatgactgtatttcagtctgccgaccagattgaagaaatccttcaaaaggttgaacgtgaagttatgtcctttgtgcctgatatcacaacggcaaagggcagaaaggagatcgcttctctggcgtataaagttgcgcagacgaaaacatatctcgatggtcttggcaaagaccttgttgctgaactgaaggaaattccaaagctaattgatgccaaccgcaagacagtgcgcgatcgccttgatgaactaaaagccaaggcgcgccagcctctaactgattatgaggaggagcaggcacggattaaagccgaagaagaagctaaggcagcagctgaagctctcgcaaagcaaattgagtctgaccatgaaatagcgattttgatggatcgcgaatttgaccgccaaagagaagaggcaagactcaaagcggagcaggaaaagcgagagcatgaagaacgcttaaaaagagaggctgaagagaaagccagagctgaagccgaagcaaaggcaaaagccgaaattgaagcagcagcaaggcgagaagcagaagctaaggcagcagcggaacgtgcagagcgtgaacgtattgaagccgagcaacgagcacagcgcgaagcaaaagaggcagcagaacgagctgaaagagaaaagcaggcagcaattgaagcagaacgcagaaaagcacaggaggaggctgaacgaatccgtcgcgaggctgaagcaaaagagcaagccagaatagcagaagaaaaaagaatcaaggacgaagaagagcgtagagcaaaggataaagctcaccggaaagaagtaaataacaaaatacttgctgaccttatcaaggttggtgcatcagaagatgttgctaaaaatatcataacagccatcgtaaaaggcgaagtattcgcaacaaaaataacctactaataaaaccaacataaggaaccacccatgatttacgcaatcgcgggaggcgctcgcatgggtgccttccaattaaatgaatctttacttgaacgaatcacccgtaaattacgtgacggatggaaaagagttgaggtcttattatgcgcaatgaaatagccatcaatcaccagatgcttcgtgctgcacagaacaaagcagtaatagccagatttattggtgattcaaaaatgtggcttgaagcaaataaagcgatgaaatcagctatcaaccttccatggtatcgcaggaaatgagctttacagataactggtcagacgaagaattcattcgtc

SEQ ID NO: 896 - DNA, 256 bp, Escherichia coli
atcgtcgtagccgtagtggacagcgacacggtggcttcgctcaggtggctgatttctctcagccagccgtggccgtcatactgccactgctctgccgggtcgccgttcaccgtccggtgcgtgatgcggtccgacgcatcgtagtgccagagggtgacaagcccctcatcttcactctgcgtgagttttccggtcaggtcataatgataacgttgcgtccgcccgtcaaagccgccctgctgtaccagccggtcca

SEQ ID NO: 897 - DNA, 1219 bp, Escherichia coli
  modified_base (1151)..(1151): a, c, t, g, unknown or other
  modified_base (1154)..(1154): a, c, t, g, unknown or other
  modified_base (1156)..(1156): a, c, t, g, unknown or other
  modified_base (1158)..(1158): a, c, t, g, unknown or other
  modified_base (1165)..(1165): a, c, t, g, unknown or other
  modified_base (1167)..(1167): a, c, t, g, unknown or other
  modified_base (1170)..(1170): a, c, t, g, unknown or other
  modified_base (1173)..(1173): a, c, t, g, unknown or other
  modified_base (1176)..(1176): a, c, t, g, unknown or other
  modified_base (1178)..(1179): a, c, t, g, unknown or other
attgtgagtaaatgaggagcggctgaagtccggagttacaggacaatggcagaagatagacaacagcccgcaatacgaaaaaggccgcgctattgcgcagagtgattactgtcggatattattcgccagctgaaatattacttcacgttttgttgtttattccttgccgcccgcgtctccctgcgcgggctttttttgtccataagaaagcccctccggagaggggctggagagtggcactatgtgccattgcatggtgccgggtgcctcccggtgaattcagtaccagcacctgaatccgcgattatcccatatacctactcgctgattgcccctccgcacagggggattcaccatgccagtttcttttaacaaactccccgcaaaccagacaacagtcaaccgcctgaattgtgaagtatttaaaaatttctcccgctaactgatacccggctaacagtctggcgttttctttttcagcaacgggaaagcagcaaccaccacacccgccaccagcacaccgtcagccagcactgacattatccggctgctgcaatgccattcacaaaaacagtaagcaatcactttttaccgtaaccggtgataatccagatatgtatctaccccagatgagtaatccgaagttcatccataccacaggtcctggctattctgttgtactcctgaacaagagcaaataattctgaattagccaccatgaactcatcgcaaaccctctgtatagcatcactattcagaataataacgtctcttcccgaaagacgatcaggagtacagaacaaaactgtcaaacggctgaaggcctttgctcgttctgcattgactatatcaatacgctgcctaaggatgaaacaccccgacgcctcatcaatattcactctacccacaccatatgaatgataaatatttaatgctgaaaaaaccattagaccgtataacaaacactcaatcaacacttaacagaacttttatttttgacaaacatataatattttcaacaatatcctgagccaggtatatttcagtataaggctctgccgaaaggaatctggaagaatgaatatggcgcgctgtactggattcgaaccagtgaccgattgcttagaaggcaattgctctgtccggctganatnancnacgcagnanacnagnatngnngtacactactactcttgagcatcgattcgaattgttaaca

SEQ ID NO: 898 - DNA, 2284 bp, Escherichia coli
  modified_base (6)..(6): a, c, t, g, unknown or other
ttcggnaaatcccggaagcgtcaaccagctctccggtaactccggctcttctgcctggtggtttcaccattgaggaggcgaaggaattacatgaagacctggtacgcagccacataagcaaggccttaagtggcgaaaagatgaaaaagaaagatcgcgatgctgatttgcgctggattcatggcgttatagttcaggcagcgtggtttgtaaaagcatcactggagcagaatgcactatcgggcaactatccggtaactccggatagttggataagctgtagtgagcgaatgccgaaaaagaatcagaacgtacttatttcggtgaatttcgatagtgatctggttgagccgctaatatgctccgcacgctataccggaagcacctttcggcgaggagaagcaacgattaagccgggcaatggtgttgagcaggtaacacactggatgccgctaccagaaccgccgcaggaggttaaccgtggctaacctgcaacttgccgtcaaaggtgaatacttcgcagatagtttcccccaaatctggggaaaagcccgaatggcgcggcttacagcaagataaggcctacatgatttgacaaatccgccagagctatcgcatactgaccgcactagaacttcaaagcggtcatccgcacccgatagctttgcggcttttttatgcctgcaatttggcatagtcacatccgtacaaaggtcgggtggagaggcgtaatacaatacccgcaaggggaatatgcccggagcatctttgaaggctctagttgacacccgatcaccagccactaactggtgattgctaactaaaacttcaaaggaggtcatcatgaccagtcaactcatccccgtattcaacggcactatcgacaacgaaacaattcttctagttaacgctcgtgatctacactcttttcttggtgtgggcagaatgttcgcgcactgggttaaagaacgcattgctgaatatggattcattgaaagccaggactatattttgatttgccaaaatgggcaaaccaaagggcgaggaggtgatcgccgtagcaaggactaccacctaactctcgacacagccaaagaactggcgatggttgagcgtaacgaaaaaggccgccagatccgccgatacttcatcgagtgcgaaaagaaacttcgccagagccttttacctgcaccaatgaacatcaactaccctctatcgtggttttcagagcaccacccctactccatgatgagctatgttgatcgaaaaactcttaacctggacgtttctgtgctcttcgacatgccaagcccaactatgcgcatcctcaatgagctacacagcaaaggctataacgttgacgccgctgtcgccgaatttaacgccttcaagcatctgacggaagaaatgcgccgcacgctacaggatatttcaagactgtcagatcgaaattcccgaaaaggcttctcgttaagtctttaaagaacagatcgtttgacaatgctgcattaacggggatatattctgcctcatggtgctcaaaacaccttagcaagtagcggttaccgcgcccgacagacatgcggtttttttgtgtccagtcttcttggtttatgaccgggcgtgcggctaatacaataccagcaatgggaatatgcccgccgactacttgcggttttgagcgcccggtcaccctctcaaaaggggtaaatcaaaatatcaagtaggacgcaaagcatgaaaaccatctccgtggagtccctctccataatttcatttagtaatatacctgtggtgactacagagcttcttgccagcttatatggcacagaaccagattacatccgaaaaaatttcaatcggaattctggacgatttgttatcggtaagcactactttttacttgagaatgaggagttgcgggaatttaagcacagcatgtctttaagaccttctgtgaaaatcgcccgtaacgttcgctccctcatcctctggacagaacgcggcgcagcccgtcacgcaaaaatgctcgaaaccgatcgggcgtgggaagtgttcgaaaaactggaagactgctatttcagtcaaaaaatcccagaacaacttcagcttccagaatcaacgctatctatcaactaccctctctcgtggttctcagataaccatccctacgccacgatgaactatgttgatcgcaaggttatcagccttgatgcttccgtgctcttcgatatgccaagcccaactatgcgcatcctcaatgagctacacagcaaaggctata

SEQ ID NO: 899 - DNA, 518 bp, Escherichia coli
ggggcagggtggttcaaactggcaacggttaccatgccacaagcgagttccatcgtttacatcgcattgattggtggcgctggttacaacgtcggctccccacagcaggcaggcatttcagaactggttctacgagcaggcaatggaaagcccaaagggattaccggagctttgtggaagcgtacagccgtcggattaacgaatttcgcctggatcaacacatccggcgatacatatgatatttacgttgagattggcaattatgcgacgagtgtaaatatccattgggattgtactacaaatgcgtcagtttctatttatacctcgccaacatattcagcgagtaagccttccagcgttaccgatggtgttgtttatacgatgtatagctcacatcagaaacctacaccatcagatattggagcgctgccaacaactggagggactatttcaggtccgttgtctgttactgatgggatcaccggggcactgaaggggaacgccgataccgcgacgaa

SEQ ID NO: 900 - DNA, 485 bp, Escherichia coli
gagataaacggcaactgccggaaaatccgccttcatcaaaaacagaaaaaaaaaaacggggcgaccatcaaaaaacgtcgccccggtgtcatgcttctccagtgcatccagtacggctgcacggagttcagtatgtttcatcgctttattaccatcctcagttgatgctgcagcgcatagcccagctctttcggaagacgctcacgccgtatccgctcaatattctgtttaaacgccgtggtaagcggcaccgccatcgggattttcaccacatcaatggggtaacgatttttcccggccacacgctgcatgacatgccaccggccatttttcagttgctgaataaacgcgccgggaatacgacggttacccaccacaagcacgctgccgccacctttcagggatgaacgctgcccctttttacgacgcctgcggcgcgaaaggacaacccgcgcattacccagcttgattacgggcaaatcccc

SEQ ID NO: 901 - DNA, 1153 bp, Escherichia coli
  modified_base (1145)..(1145): a, c, t, g, unknown or other
agacgggcctgccccccccccttttacccatccccccccaaaaaaaaaaagcactgacagcatcataaacagcattgcaacaggcattcgcatcaaaggagagtgatatggcgttaacacaccacgaactctgtcagattgcgtacaagttccttaagcgcaacgggttcaaggtttgctttcatgaccgctttatagctgtaaccagtaccggagaacagccagatgctatgggattcagaaattcagcatcatgcctgatagaggcgaagtgttctcgtgctgacttgttggcagatagaaaaaagcgtttccgtaaaaatccctcacttggcatgggcgactggcgattctttattagtgagccggaaattatttcagttgaggatttacctcccggctggggattacttcacgttgttaacggaagagtacggaaagtacatggatggcccaggggtaattgctgttggggtaatcctgacgataagccatttactgggaataagcaggttgaatgcgattacatgttatctgcattaaggcgcatggagttgagaggcaccttaatgaaatatatgacggtgtgattgttaataagaaagaaggaaacgcggcatgatcactattaccaaagggcgactgctgacaatcaagcagtggcgcgaaacatacggaccgggtagcaacgttgtactgccagcagaagaagcggaagaactggcacgaattgcactgatatcgctggaagcagagccggtggcaaagattatagctcattacccattaggagttgacgtaggcaaacaaaagttcgtgcaggccattggagagcttcctgactttggcggatatctatttgccgccccgccagcgccggtagtgccggaagaagcaactccggaaaacgtagaaatgctctctggctatgtttccacgtacaaattaaccgatagcgagcgcgatattgctgccgaaatatggaacgcctgccgcacagccatgcttcagtccggaaactttcgggaaagcaagaattcgtcaaccaataattttcgggaaatcccggaagcgtcaaccagctctccggtaactccggctcttctgcctggtggtttcaccattgaggaggcgaaggaattacntgaagacc

SEQ ID NO: 902 - DNA, 1600 bp, Escherichia coli
tgcgtcaccacaaacagcacctgctgatgtccccggtgcaggatgtgtcgccagaaatactcatccacagacagggcacggtcatcggctttaatcagccacagtaccaggtccagttcaggcagaatgtcacggtacagggcttcatactctgcatccctgtcccgactctcgcccaccccgggcaggtcagtgataaccatgctgtgaccgtggccactcagacggaagcgctgcacttcccgggtgccggcgtgaacatcactgaccggggtgacctccccctgaaacagtgcattacagagtgaggatttaccggccccgcttttccccataatgccaatcacgggttcgtgacgggtgagtttgcgcagatgttccaggatgtgacgggaaagcgagtaaggcagggaggagagcggtttttcaattgcctcaatggcatcagacggattcatacatgtattcccggtgaaaaaagacaaaaccccgcacaccggaaaggtggcgggggactcacaacgataatatctgtctgaaattatttaggatgcaggtatcttcagataatcatacctccagaattttgttcttaatagttgagtagtggtatttggtttccctgagagaatataaaggtgaatcatgctgcactgagtttgattctatttgtactgagacaggtatcttcatgattataatcaaaagtcgggtggattggtctggcgctcattattttttcgaataaactcactaattattgtaaccatcccagaggagatgattttatgtataattgtagtgaatcatattcagaatacgacatatcattatctgacgatgaaaactatgacgatgactattatcgtgaacgcccgtgccgggggaagttttcggctatgataatactgaggataatgatgaggcggcatctgattatgcattaaaaataaatgaaaactctgattaatacgggggtagctgataataagacaatcaatgacagatattaacgaataaacataatcaggcgctcaatacttgatttaatctgggcgcctgattaaaatccgaggtgacatataataattttcatcaaaatagtatttatgtactaactaagcaggatttgaacctctatttctgggtatttgttatcacttaatccattactgatcctccttcagcatatgtcgtatccgttgaaggatttacgcatatcggtaacgtcggcaacgagccagatgcgggtacctgacgggagtgagatcattgtcccctcccgctcagttcacggagcaacactgtgagcagctctggtgaaggatttttcagcgtcgttttatcgtagtggaattccactttacaggaactggcactggctgtgctctgtgaaggagtggataaaagcaggggaagaatcgacatcggttctttcggctcatcaggcgttatctctacaggtaataattcaacgccagtgtcagaagaggtcgttattggaagacaccgcgaaacacgcccttcgttctgccagagcctgagccatttgaaaataacattatcattgacgccattttcacgtgcaatctgtgcaaca

SEQ ID NO: 903 - DNA, 550 bp, Escherichia coli
gcccgaaaccggccgcaggggtaacagcctgcggccatttttgtctttatctcttccacaagtaaatattggcaacccgagctggaagcatcatccagagtactcatgaaacgactgtaacagctgttgaaaaaccggaatgcactcttcattgcaaacatttcagggatgaagtgaagatgaattgagacgtagtatccacatcaagccggcgttatccggtgaggcgcaatgttgcgggggctttatccctggtggcattggttgctggaaagagaaaacccccgcacgttgagaggtaaaacctgacaacagaacgggggctaatcttgaaccagaacaattcaagaatagccgcaaaatgttgtcattacaacaaggcggctatatgacgctcgcgaagtttgccatgattttctggcacgacctggcagcaccgatcctggcgggaattattaccgcagcgattgtcggctggtggcgtaaccggaagtaaggtgaaaacgggcgtcaggctgccgtgatggcaatatgcgcccgaaaccggccg

SEQ ID NO: 904 - DNA, 762 bp, Escherichia coli
ctggcgttccatgttgatctcaatttattttccatagcagcggtaatttcagcatcactgataccagcacggcgctgtgcatcccacaacaggaactgcatatcagcccactcgctaagatcgtctggttcggctgcggcttccagtgcctcttttgagagatgtttcagcggaccaatggggccaacgcagccaaatgtggagtcagaccatttgacatgctcgtggcgaatctgttcgcgcatccagtgatgccagtgcaattcgtgccagttcttccgcttcttctgctggcagtacaacgttgctaccaggtccgtatgtttcgcgccactgcttgattgtcagcagtcgctctttggtaatagtggtcatgccgcgtttccttctttcttattaacaattacaccgtcatatatttcattaaggtgccctctcaactccatgcgccttaatgcagataacatgtaatcgcattcaacctgcttatttccagtaaatggcttatcgtcaggattaccccaacagcaattacccttgggccacccatgtactttccgtactcttccgttaacaacgtgaagtaatccccagccaggtggtaaatcctcaactgaaataattcccggctcactaataaagaatcgccagtcgcccattccaagagatggatttttacgaaaacgcttttttctatctgccaacaagtcagcacgagaacacttcgcctctatcaggcatgatgctgaattctgaatccat

SEQ ID NO: 905 - DNA, 10665 bp, Escherichia coli
tgtttgagtgggcggcatttgtgaaggctgaaaagtaagaattggcgttacgagttattcaatgttctgaatctgaatatttagtatgtgtgttaattgtttttactatgcggttctattgtttggcttaatttgtatatgtacacgcttatgtacacatttttcttgagtgctcaataaaacgggatacgaaagctgtttttatgtggctttaaagtgggtttagaaatggcgcaattgtgcttttggtgtgctggtggcgggggtcgaacccgcatacatgttcagcctgtacagactggcaccgactctacccgttgagcgtacaccagcaaaaagagattgaggtagttggctgctggtggtgggggtcgaacccacataaacatcccgcgttctggaagctatacaagcgggtgccgctttaccgattaagagtacaccatacagccaggaaaaatagtaatcatgcgttatgcgtgggtaaagcccgtttcatctggtagtaccagatgagcgggtatcattatttcacctgatttcacgtgatttcgcttaatttcacaaaaattaccttctttcaccttctttcaagaaaaaatacccattaaagcgcctgaatcgctctctggtgcgttttggtgttttgtgacgtccgtgatgccctgaaaggggatttttgcgatagcggcgaaaatataacggttgctgctggtgtctgtggttagtcttgcgtgattttattggcgtgcttctttctaagccgtcgaatgatgtcgtaaatatgggtttctgatattgcgtactctttacgtaattcctgtaatttttcgccgttatcccacctgtggtaaatctcgtattcgcgcaatgctgcgaaaagtgatctgcctgttggaaggtaaagacttcgcccaccagcatagaaggcgattgcagcaacaacccgcttagcgattctgaaagcttctgtttgctccatgccattacgggtaagttctgctactgaatgcgacacgatatcagcaagcgaatcacaccacgcctcgcccggtttgtctccgccgtctatgtcattcatgaatttaagccgctcgatgtcttttggtgcgtgatggttttgctcgttcatccggtagcctcttgcgttggtgtatctggtcctaccagtttaatcaacaacgccataaaacgatatgcacgcacacaatcagaaaggctaaccgactgttccggctctgtgcttacttctggtagctacgccagattttttgcctctcccgtctatccccatttctttttcagtgcgtttaagtgaccgtttcaggtcgccgaaatcatccggttgctccggtgtcctctgtgccttcccgtaacactctgccctgcgcattgccacccgttcgcgttccctgtctgtctccacctgcatcatcacttcggcccatcgcgccgccgctctccggtaaaagcctttcgactccaattcttccgctatgcggtcatgtaccatcgttcaccccatcagaacggaatattgtcaccgtaagggtcatcgcctcccgctggtggctgattaccctgtgtgcctgtggtcctgcgtctgttgccacctggtcgtgccgttttcgcactgattacgctgtctgcaatgacctgataaccctgccgcgtttccccgttctgtccggtccactggcttacctgcatcgtgccggatacgctgattacgttgcctttctcatatcctgccagttggtcggtctgtctgaaaaacacgctttcttaaacaaggcctgaaagttgattttatggtgctttgaaacggtttttaaaatggcgctcgtagtgtgctctctggcactcaatggcgctctgtgatgtggatggtggtatgtggccgccatgcataatggggctgattttgctcatggcccggcaatgggtgagcattttttaccatattcagggtaacaatgggcgaaaaagttcatttctggcatggcctgaaatgccatgcagcccgcgccgcgtgtgctctggtcgggggagaacggcgcggaataatgacagccaccccaccttatggcgggcagtcccacgaaatcccggttatttccgtttattcccggattaatcccgccttttcccgcattctcccggctgttcccggaattaatcgccggggtgtggtggttatctggtgtggtcgtagttttgccgtagtcgttccccctcagcgcaatgacgcggttttttaacgccgctggtaacgcaatgcgggcaggtcatgacgtggctgatatacgcatcacgggcagccagccacgccgcagacggggcgcacatatccgcctgcgtctggccgttgctgtcggtgttgtcttccgtccatgtttcgggctggtgcgcttccggtaaatccggggcaggtaatgcccggataaactcacacaatgcatccggcaggatgaataacttatgcataaatctgatgttctgaatcgctgaaaacgtgcgttttatggtgttttttcgtgatttctgcgtgttctgatgtgctcatttcgctgtatcccttgtgtggcgcgggctgcgcgtgtgttttggtgttcttttttgccgccagaaaacggtaatcaggcatataaacacggctgtaagccgcgccgcgtctggcttcgcgtgattttgtgcgctaaaaagtgcatttttgcccttaaaaagcgttattcgtgattcactggtaaatgctccgcaggccgcgctattgctgggattttcgctattctgtgtggttttgctgtttaacccgttttgcacactgaaattaccttgcatcccgcaccacgtaaggggttaccgggtttttatggtgcgttttttgccgtgcgtaatattgtgcaagttggtgggactggtgggaactgtgggaaccgcctagaaccacgcggctttcagtggttcccaccagttcccacggtggctttttgtgggaaccgtggcggttattttttgttctctgcggttcccaccagttcccgcagagttcccactcaaaaacgaacaataatcatactggtgattttattatttactgatttatatatgttttatttttacggttcccacagttcccaccagtcccaccactttttcagtttttaaaaacgcaatttttgttaattattcatcaattgcgaataacaatgcattctggccgatgacgtaaacgcggtgtttttccccgttaacggaaacgcgttttgtgtatcggcgtttcccgtccgtgtcgcggtcaacaatcgcgccagcatcgtcaagactggccgctatgcgtttcaggtcgtagccgctggccgcctcacatagtgcttccggtaaaaaccagtaaacccggtcgccattgctccccggtcgccaccatccggcgcggttgcttactggttcgctgtatgtgttgcccccttcaaagcgtgaggcatggcgggcgataaacccggcgacggcccggagtattttcacgtcctccgattgcccccggccacgatagtccgaccatgcatcaaacatcgctttcaccgcctccagtgcttcgccctgtttccacggcagaatcccggcagttatcgccatttccccggccagtgcgcacagtgtgaaacgcgcggcggcgcgcgcctcctgcccggtgcttgcggggaattgttcgcgcagtatggcgtacatatccgccagcgtctggccgttgctgtcggtgctggtggtgtcactttcattgcgggaaatcagccagcgcacaaactccggcccggcgtggccgtaatgggtggccgcattaccgcgcagcgtttcggcaaatttccggcctgctccacggcgttctgtgtcgttgtcggggttgtggggtagtgccattccgtggaggcaatcaaacgccccgtaaagccgctgtgccggaatatccagtaaccgcatttcctgcccggccttgatgcgctgaccgccgctttccatgtgtttacccacggtcatttcccctgtggaaataatcatggtgcgccatgtgttgaccgggcgggccatgccggacaccttgccacgctggcggcctgttccgttgccaagctgataaatcagcccgccaatatctctggccggggcttcgccaatttcatccagtatcagcgcggtatcgttccgcatggtcgccagcccttcaagcccggtgctggtggcgttccagttgcgtttaaagttgcggggttctccccatacgctacaggccaccagcgcccccacgcttttcccgctggaactgtcgcccatgaaatgaaatccgccgctgtccacatcaagcagccacagcaacggcccggcgagcgatgcacacacggccagcatggctaccgggtttccccggcataatgcggccacgttgtcgcgccagccctctggcgttcctgcggtggcgtactcctgtgagcctgcttctgttgactgaaacaccacatcaccatcaccgataaccccacccggcatgacaaacagggtcggggtgtgccacccggtggccgtggccgcgagcgcccggcgtttgggtgctgactccatgatgtattcggtcagtgcctgccgttgtttgtagggaatggtaacgcccatgcgtagcagttcctgccggagttctccgccgtctccggcgagcatttccattggtgcggcccattcccgccactggcctgacggcgtgagaaaacgaagtaatcgcccgtagttttcgtctttgctgtcgctggtcatggcgatgacctccagcggggaacatataaacgtgtctgtgttggttgagtcgcgcacgccgtgccagtaaaggccgggtttcagtatctggccgccgtccacctgcacatgctgcgaataagtggcgtagcccggacgcgccgggctgactttggggtgtttcttgcgtggtggttttcgcttcccggatgtgaccggggttttagtggttgtccgggtcatgctccatttcccatagcatcaaatcgttaaagtcggaaaggtctggtgatgcaccgggcggccattccgggaatgtgacgtaacacccggccagcaatgcggcttcgttggccgctctggaaccggggttatcttttgatgtccggtcatcatccccggcaataacgagagatatgcgcgagccgtaccgctcacgcagcgccatagccacatgtttaaggtttcccgcattcatggcacacaccacggccatgacattccagtactggagaagggcggccccggtggcccacccctcacacacgtaaacgtcatgttccggcgcttcaggggccatcaggtcaaagctccccataacatggaaagccccctgcacctgaccatcacggagaaacatttttcgaccgtccgggctgataatctgcacgttcaccacttcgccgcatacgttgtacagggggacaagcaaatcattacccgactgatacagattgccgggctgtagccgttttttcatgagatagggatgagaagggattgccacctccgcccggccaagcaactcaaaggcccggcaggcggtcagtttctggcgctggtggcgttgttgctgctcctgctggcggagtctggccgcctcctgttctgcggtctgtacccgcacccgttgcgcctcccgttgttcgcgggtcattacatcaggtttacccagcgcgggcaggcacagccccagcctgtccgccacaatacgggcggcatcagtctgacgcacattccacaaataagcccccagcgccacaaggtcgccgccgctgtccccggtggcgaagtcgtgccagcatccgtccaccagcgagacggaaaaactgcccgcgtgacggtctgcacgtgtggggttacgacacacccattcagcggcctgccgtttaccttcgggcagccattcaggaacgaggatttccgcatgttgtgccgccacggcggcaacgctgcggattgcgttaatcgtggctatgtcacgcatattgcccgccctccctgatttccccggtgcggcagcgccagttatacgcctccacaacctcactgaatccggccacaagttcagctgtaacagcgatggaatcgcccagactgcgtagttcgtccatgccggggtcgagattgtcgcccatgccggaaagcaggcggcctgtgctaatcagtccttcaagcagtttgcgggcgcagtaatccgcatcatcaaacagggcgcgggcttcctgtgcgtctgcgtttttgatggctgtaaccagtagttcaggtatccgggtgttatacatatcacgcatggcgcacctcctgagccggaacgcggccagcaaacagcaacacaaaatcacgtgccagcatacggcggacggttgtttcatcgggtgcgttgacggatttgcggtgtgggcggtcgttcaggtcggaacggcgaacgaccagaaagtgaaaggtaaattcatggtgtaacggggttggggtcgtagccattctggcagcctccttttgcaaatttaaggagtcaccgcctgagttctcacgctcataaggggcggtgacgctggcaggggtgagaaaaccggcgcaaaaggaaaccggccagcctttcggctgccccaccagcgccaccatagatactgtgcgggctttgccgctgggtatggttgcgcgatggcatgacacaaaaaaagacgctgggcgcgtctgtgtcgccttttgctcattaaacgggttctcacgcccggctggtggatttacaccagcgggggaaatataacgcccaccagcgatggcaggcaagcaatatttacgcatggctggtgttcctctgttgtctcattcgccattgaggaataagccgggcaagatgcgttttgcgcttgtggtagtccatccccgtatcaatcagggttgtgttgctttgctcaaggtaggccatgagttcaggctgttcgctactcatgtgctcgcgtggatctccggttaaacctttggccgcagcccactgtctggctgtcattccatccagtacaagccgggctatcatattggcctctgttgcgtagttatgagggtaggagggtttcccggcagcggcacgctgtaaagccagtgcggcgcacatgggactgtgataactggctgccattatccggctttttagctggtggcgaattttctgtatggattgcggccctacgtgtgccagttcttcttcgcaacggatgaaataacaacgaatggcccggccacggtcgttacgttccaccattgctatttctttggcggtgttcagtgtgagtaaataatctttgccggggcgtccagtacgtgaaatatggctacaggccacatcattcgggcttttccccatttttggggaaatcattttatgcacggcgtaatcattgccaataacaaaaccatattcacttattctgttggttatccatgtcgaaaaatccttcccgatattcagcgcagcatgtagcgcacgtgcacttacagcgttagtttgatggcggccaatttgccccgaaataacaggaatcaggtcggcaagttcacctgatgaaatgggtgtctggttgttttgggcgtgagaacgccccgaccctgttgcgggcctttttggcattttcatgattaaaagtctctgacgggattaattacgcgtgctggttgtgtctttgcggtctgcaagccacttacggatagcggaaacatcaaagcggcttacgccatcgcccagcttatccgggctggggaatttaccttttttaacccagttccatagcgttgattcgctaatctgaaaatggtttatcacctgtgccgggcgcatatagccggatttgggtaaggtatccatgattaaagcctcttacagtgttttggtgctgaatggaggctatacgcaagataagaaaaagtaaaggcgactaaatttagtcgccatttttgtgggtgtttgtggtttctttaaaatgctggcatcttcattttaaaagcggttttttgctttaaatttcattgaaaaattatctttttgcttttgcgtttccgcccaaaattttccattcattgggtaagcgtctggcatcagataacatttttgctattcgtccagcgtcaggtgttagggtgggattaccatcccagaacagatagccgtgtttctctatggcttcggcatgtgatttaagtgtcttgccaacatctttcgggaagtgatacgccacgtacagggcagccgcgagaaccttttcacgttccagcgcgaatcgttccacaccgccatgtgtatcctgcttttcctgattcctgtcatctgtcggttgttctgttcgttggtggccgggtctttgcgcaagtatttttttcatgaccgtcatttctgagtcggtaatgcgcaaattctttttttccggggtatttatccggcgtgagccgccacgtggtgtaaaggtagctgtaactttggacagtgatgggttgtttgtatatggatttaatgtgaatgtgtcctgaatatgaacgcgcgagaactcggcgtaaggtactgtccataagccatacaggagaacattcgagacaaccataagtttcccgtcacgcacctgagcggcactatagtcgctatcaaagaaaaagccagattgtgagtattgatggtaaattgattccggttcgtcgtcatcgtgaaaaagcttagatggttgcagcaattcaggtggaaaataatcgtttgttgctggtgctgaaatactcgcaatgttccactgtttggccggatatccccacttatcgtaatccgtgtagctttggcggtttatggaactttccgggccaaaatcaagtgcgatttttattgtccctttagcccattcagtcagtatttttttttgagtacaccccagtatactggcggctgtatcaatagggtatgtgttttcatacatggtttacgttacctttgacgctaccttaaaaataaaccggggcaggcggtaaggtttcccgcttttcgcgccgtcgcgctatccccggtatgtttttattttgcaatcgcttttgtgatgggggttacgttgtattcatccccctgttccagagccaccagcaggtcggaccataattccagagcgtggcggcgttcattgaaatactgatggcggttatagataccctcaacgcctttaattcggtggttcaggcagcgttccgccactacagggtctaccccaagcgcggcaaggtgagttctggccgtgcgtcggaaatcgtgaacggtaaaacccggcacgccaggcatttcccggcgaaccttagctagcgcaacgggcagagtgctttcctgtatgtgtggaatcatgcgctgttgcattttgcgggctggaagcacccagcggctaccgcctgaaatgctgtgtaattcgcgcaaccatgccaccgctggtggcggtagtgggatatcaatggcatccccgtttttagcgcgttcggcaggaagtcgccatacagcactatctaaatcaaattcatcccactgcgcggcgcacaactccatttttcggcagcaaaggcaaagtatcagtttcatggtgagttcattctcacggctgaatcctttagctgtgcgcatggcctgaaaaaaacgaatgagttcatcacgggttagccatcggtcgcggcttttttcagccccaccagcatctgataattcaaaagcagcggcggggtttgtttccagtgcgtggcgtttgatggcgtagtcgaatatccgtttagtccatcgcaaaacatcgttggcaactgttggtgctccacggtcaataatgcgctgtagcattgcatcaatatggcgcggtttaacatcttcgactttcaggctgccaatctgagggttgatatctttgtttatgcggcggcggagaatatcgggatgtttccagcggggtagtatttgccgttcgtagtattcggctgccagttctgacacgcgaagggcgtttttttcttcctcaatccgtgccagtgccgccgctttccgggcctgcttttctccggccacgtcatgacccagcgcaacacgggcggccagttctttgacggtggcacgggctttacttagtgacaggtcggaatatgagccgatgtgcatcgtgcgttgtttcccggccatccggtagcgataacgccagaatggggcgccgtatttttcagggaagcacaaatacagaccgttgccatcggcgcgtccctcaaagtgttctccggcctttatccatgcccttatctggatatccgttagcctcgcctttgccataactccacctgaatattgaataggggtgtgtacataaacatgtgtccataaaccccgtatgtacacgtgtatgtacacggtttttgctggattgctttggagtatatcggagtgcattacagtaaaaagccccatagaatggggctttgctgtttttgtgtggagtgcctcggagttggctggagtttattccacgttctgaatctgctcgcgcatctgctcaatcaatcactttcagctcaatcgcggagtttgtcacttcggcattgatagacttcgac

SEQ ID NO: 906 - DNA, 7412 bp, Escherichia coli
tcggtgactatacccgatggtgtgaaatcagccagcatgactcctgccttcatatagcggtacccttcacgccagacatggtttaacgctctgcatgctgcggcaataatgtcccggctgtcctgtgtgggcaatggaagcttttccacagcggcattgctgtaacagggttcttttactgcaaagggggatgtccgtacaaatgtcgtcacctgccggcaatactgacgctccccacgtagtttctctgcggcccgctctgcatactgaacaacagcctggtgcatggcatctttgtctgtgattcgttcaccaaaactgcgactacagacaatctgctgttttgccggcggtgcttcttccagagatatgcaggactcgccgttgagttcgcgtaccgtacgctcaagaatgacgctgaagtttttccggatgaatgccgtgttcgcctgcgccagctgcagtgctgtgttaatacccagcgcattcagcttttccgtcagtctgcgtcctactccccagacctcaccaactggctgcaaccccagtagcttcaagatccgattacggttttctgccgtcagcgcgaccacaccggaaaactgtggccattgctttgttgcccactgggcacttttagccagcgtttttgtaggcgcaatgcccacccccatggtgagtcctgtccagctctttacctgttccctgagctgatgaccaaaaatctccggagagatgcaatgatttatcccccgcaaatcaatgaacatttcatcaattgagtagggctcaactgcgggagaaagcgactccagaacagccataacccgttggctcatgctgtggtacagcgcataattgctggaaaatacatgtattttcttctccaggcgcatttgtctcacctgaaaccagggctgccccattctgatgccaagggcttttgcctccgggctgcgcgcgatcacacagccatcgttattgctgagtacgatgaccggttcgttgcgaaggtccgggcggaaaactttttcacatgaggcgtagaaactgttgatatcagccagtgcaaacatcagcgtaactcccgcgtcctgtgtatcacgtgagtgacaacaccaaaaatacagatgttttccggatacagtgtgcggaactccgggctgtctgaaaccggctccagtgccgggcgtgggcgcaacagcagtcgtttgacggtgaactcaccgtcgatctcagcgataacgatgtccccgtgttgtggtttttcggccctgtccactaccagcagatcaccattctgcacgccagcctggttcatcgattcaccgctggcgcgcagaaagaaggtggctgcaggtctgctgatgcaatagctgttcagatccagttcctgctcagcataatcagtggcaggcgaaggaaaaccggcctggcaacgatcggcaaacaacggtcgcacgtaactgtcatcgcctgaagggtcagccggacggtgataaacggtactcatgctgcaggcagccagctgtcgtcctgccagatttcttccagcagagacaggatacgttctttatccttgtcgttgcgggctcctgtgacagatacagacggggcgctgccctggtctatacgcagccagatttccgggtagtgtggtttcagacgttgttcgatttcattctgtagcgcctgaagtgtgcctgatttgaggttttttgtgctctggcggtcgaaaagaatttcaatgcggatcatgttctcatctcccttttctttatgctgtatgtttatacagtattctaataactgaatccgcacacagtcaaatgtcattgttgtgactaaaaaacgctcaattctctgagtgtgtggctgtatgcctgctgtgggctgctgtgtccagcttatccacagcattttgtgcacggttctgtggacaaaatacctggttacccaggccgtgccggcacgttaaccgggctgcatccgatgcaagtgtgtcgctgtcgccggcctcctcacccggtcacgtttcgtcgttcctcctccacgcgctgcggcttcggggccgcacctgcattcgtatgcggtcgcccggtaacaggtgcggcacggcctgatggaggccgcatgtgagaggagaattcccatgccaaactggtgctcgaatcgtatgtattttctggtgaaccggcacagatcgctgagattaaacgactggccagcggtgcagttacaccgctttatcgccgcgccacaaatgaaggtattcagctgtttctggccggaagtgccggacttctgcagatcactgaaaatatccgctctgagcagtgccccggagtgacggctgccggacgtggtgctgtatcaccggaaaatatcgcgttcacccgctggctgacacacctgcagaacggtgtactgctggatgagcaaaactgcctgatgctgcatgaactctggctgcagagcggtactggacagcgtcgctgggaagagttaccggatgatgtcagggaaactatcactgtgcatttcaccgcaaaaagaggtgactggtgtgacatctggggtaacgaggatgtatcggtgtggtggaaccgtctgtgtgacaacgtactgccggaaaaaaccatgccgtttgacctgctgacggttttgccgacccgcctggatattgaagtgaatggctttaacggcggtgttctgaacggtgttccttctgcatatcactggtatacagaacggtatggcgtgaagtggccttgtgggtatgacctgaatatcagcagtcagggggaaaacttcattcaggtagatttcgacacgccgtggtgtcagccggaaagcgacgttgttgcagaattaagccgccgtttcggctgcacgctggagcactggtacgccgaacagggctgcaatttctgtggctggcagttgtatgagcgcggagagctcgttgatgtgctgtggggggaactggaatggtcttccccgacagatgatgatgagctgccggaagtcaccggacctgcgtggataatcgacaatgtggcgcattatggcggatgaagtatgacggagacgggcgggcaaccgcccgtttcttttccggtaaaggatgtcgccgtgctcctctttttactgcgccggctgacgcggcgcggcataaacgctgcctgtggtcagtgtccgcgtccggccgggcacgggacgggcgcttttaccgctcccggctggcgtcggtgacagtgtacgccagcccgtcgcccttttctgatgaacgcccttcaagccgctttcgcggcatagccttgccgtcaaaaagacgacggctgcggtattccacggtcggcctgacccgttaccggacgcggtgaacagcccacaggcagcggggaacgggcaccacaggggtgccctcccggtgccctctgtaagagaaggagtttggtatgtcccgttttgtcctcggtaactgcatcgatgttatggcccgtatccctgataacgccattgatttcatcctcaccgacccgccgtacctcgtcggttttcgtgaccgtcaggggcgtaccattgccggcgataaaaccgatgaatggctgcaaccggcctgtaatgagatgtaccgcgtactcaaaaaagacgcgttaatggtgagcttctatggctggaatcgcgtcgatcgttttatgtctgcctggaaaaatgcgggattcagcgttgttggtcacctggtcttcaccaaaaactacacatcgaaggccgcatatgtgggctatcgccacgaatgtgcctacatcctggcaaaaggccgtccacgtctgccacaaaacccgctgccggacgtgctgggctggaaatattcgggcaatcgccatcacccgacggaaaagcccgttaccagcctgcaaccactgattgagagcttcacacatccgaacgcgattgtgctggacccgtttgcaggcagcggatcaacctgcgtggccgctcttcagtccggacgccggtatatcggtatcgagctgcttgaacagtatcaccgtgccggacagcaacgactgaccgccgtgcaacgggccatgcagcagggggccgcgaatgataactggtttgaaccggaggctgcgtaaatgaactatgccggacacgaaaaacttcgcgccgacgtggcggaggtggccaacaccatgtgtgaccttcgggccaggctgaacgatatggagcatcgctgtcgctttgattccgatgtgcttgttgaacgcctgacacgccagacgctgtatcgcgccaatcgcctgttcatggaagcgtataccgaaattctggaactggattcctgcttcaaagattgagaaggagacgagaatgtacggaacatgcgaaacgctctgccgggcgctggcagcaaagtatccgggagatacgccgctgatgctggttatctggtccccggaagaaattcaggccctcgctgacggaatggatatttccctgtccgatcatgaaatcaggactgtcctggcgcgcctggaggacatcccggaagaccagcggactgaatccggtatttcttccggtgcggcgatggagatcatcaataacgtgagagaaaaccgccaggtgaccgtccctgctgaactgctggcgtccctgattcagaccgccgaacaggcactgtggaaacgtgagtgggccgcccgtgataacggcctcgccgtcccggaatgcgtcacccgccgacaggcggtggttaatcaggcccgcgccctgctgaaaaacaacacacgcgaaaacgactgatgttatcgccgcctgcgggcggcgattcagggagaccatgaatcatgaacgaaacgctgaatgcactgatttgtcgccacgcccgtaacctgctgctggcgcagggctggccggaagagacggatgttgaccagcgtaacccgaagtatccgggctggatcagcatttatgttctgctggatgcgccccggctggcgacgttacttatcaaccgtcacggcggcgtactgccgccgctcctggcctctgccattcagaaactgaccggaaccggggcggaacttgttctgtccggcagtcagtggcagtcgctgccggtacttccggcagacggaacgcaggtgtctttcccgtatgccggagaatggctgaccgaagacgaaatcagggcagttcttgatgcggtgcacgatgcggtacgcagtgtcagttgccgggtggcagaagatgcgcagcgtatcagggcggcgctgaccacaaccggtcagacgttgctgacccgccagacgcgccgctttcgcctggttgtgaaggaaagcgatcacccctgctggctcgatgaagacgacgaaaacctgcccgtggtgctcgatgccatcctgaaccggggcgctcgtttttcgtcggtggaaatgtatctggtcagtgagtgtgtggagcatatcctgtccagtgggctggcctgcgatgtgctgcgtatacctgatgaaccgtcccgtcgctggtttgaccgggatattctgcgggaggtggtcctggaagcccggactgaaatccgcagcatggcggatgcactggcgaaaatccggaaatgatgacgctggcggggaaaaatctccgccttttccagccggtccccggaaagagcaaaaggatgtcgccgcaggctccgctttacccggccatgcggggcatggccttgtgggttttcagttatgtggcctcagcgccgtgtgcgggctgtgccgtgcctccatcgtagccgggcttctgcgggcgggttgcaaggtaaggtgaaccgctgcggtcacccggtccctccttcccgtctgccgtgattttccggtcgttcacccgctcagatttcgcggtctcacccttcaactcccgtcagccgtgcgcgtcaggctgcggcttcccttgcgcccttgcaaccctgcaggcccggcaaagatggaggcacggcaccgcccggtgtcgcggaatatgtgaacaacggaggaaaacatcatgcaatatgcgaaacctgtcactctgaacgttgaagagtgcgaccgtctgtcttttctgccttacctgtttggcctggattttctgtatgccgaagcgtctgtatacgcgctggcgaaaaaaatgatgccggaatatgaaggcggattctggcacttcatccgcctgccggacggtggcggttacatgatgccggatggcgaccgtttccacatggtgaacggtgcaaactggtttgaccgtaccgtgagtgctgatgccgcaggcatcatccttacctcccttgtgattaaccgccagttgtggctgtaccacgacagcggggatgcagggttgacacacctgtacaggatgcgtgatgcgcagttgtggagccacatcgaatttcaccccgaatgcaacgcgatttacgcggcacttgactgattaacggacggggcggcaatgccgcccctgtaaaggagacgagaacatgtactgtactgttaaagaaatcatccgcgatgtactggatacagacgtgccggacagtgaatgcgtttttgccgtggtgctgacccgtggggatgtgcgtcacatagcccaggactggaacctgtcagacgatgagctggaaaccgtcatgcagcggctggacgatgcttttgtatatggcgcatgtgacagagttgtttccgatattgtcaatgaactgatggaagaaaagcgcgccagccgtcatgtgacagtcccggcggtgatgctggaaaaagtgatggcgctggcaggtagtgaaatgaagcgcctgtatgccgtcgggagtgagaacgggggcgacggtgatgcgttcgtcagggaagaacgcgaagcaatggacgttgtgttacaggcgctggacggggagcacatgtcatgaatatcagcacagaaacccgcgaaattctgcgcaattacaaagccgtgattaatgcgcggcgtcgtgaaatggggcagaaaccgctcaccactgcgcagattgttgatgaaatctgcgattttgtggcgaatcagcaggcggttttcctgggcggtcactacatccttcagggcagcagaaacaggtgatacaggggcaggcggtggaggccgcctgtcagcccgcgcgaaaacccctggcaggctggcgcctgccggaaatgcggggtgcagcgcctgcggcgctgccggcccggctttccggtcagaaggtagtgtatggctgtatgcagggaacaggtgtgatattccgtgacactgtcaccgtttctggctgtcttttattgcgcccacttcggctcccggctgcctggcggcatccggtcgtcaggcccgactccgacgggcagctgctggcgcaccgccagtctccg

SEQ ID NO: 907 - DNA, 501 bp, Escherichia coli
ggcatgcatccatccccaccagatggctgaattccacgtcgatcaccggcagtttctgcacttctgcgtattcatcaaaaggaaattcagtccccattgccgcagcaagacgaaccagatcgtttaacgatgccagtccggtaaagatttcctcctccccgtggtattcatttttgagccagccatcatccgccagaatatccagcagttcgcaggtatccccggtttgctgcagggtctgtgcgacctgctgtcctgccggggtggcgagtttttcctgcagtgtgattaataaattgcggacaggctgaatatgttccagatggagaaccggctcagtttttccgggaacgtggcggatgagcgtcggtacagaggtcatggggcggttacggttaggcagaatttcctgccccacaatggcgttgatggtggttgatttgcctgctttcatcgtgccgacaacagccagcaccatctccctgcgggcggttttgattt

SEQ ID NO: 908 - DNA, 391 bp, Escherichia coli
gagtcagacagcaaccggaagtttactgtggaagacgccatcagaaccggcgcgtttctggtggcgatgtccctgtggcataaccatccgcagaagacaaagatgccgtccatgaatgaagccgttaaacaaattgagcaggaagtgcttaccacctggcccacagaggcaattgctcaggctgaaaatgtggtaatgcgtctgtccggtatgtctgagtttgttgtgaatgatgcacctgaacaggcagatgacgccgggccagcagagcctgtttctgcgggaaagtgttcgacggtgagctgagttttgccctgaaactggcgcgtgagatggggcgacccgactggctgcgccactcgtactttgccagggatcggttgtaccaagc

SEQ ID NO: 909 - DNA, 3317 bp, Escherichia coli
  modified_base (1385)..(1385): a, c, t, g, unknown or other
  modified_base (1388)..(1389): a, c, t, g, unknown or other
  modified_base (1393)..(1393): a, c, t, g, unknown or other
  modified_base (1398)..(1399): a, c, t, g, unknown or other
  modified_base (3294)..(3294): a, c, t, g, unknown or other
gattattgctgccatcaggtttcagtgtgattgccggcagggattttctttttatttcgtttcttcccggggttcgggtttgaattttcccagaaagttgtacattggccgcatgcacggatgcggatagccgtcccgcataaacaccacccggggttcctcaacactggtcacggtgacaagcgcaccatgattgtctctgtatcgctgattgacgactttcggtaatggaacatcttctacagtgtggtaacagtgaattaaatttcatgtggtatcactgcgacgtttcctgatgtgcgctgttaattttctgtttttacgaaacattttccccttcttcctgtgtattttattgcgctcctcctttcatgtccttcccatatcctgaaactcacttaaatgctgttgagtcgtcacgcattgcaattttcaatgactgaaatcaaaaaatgatatttttttagataaccaactgtattaaaagcattcagtggaataattttctgcacttttccattaattatggttataaattttgcaatgtgctgtttttgcgatatgtggcagaataaagatctgttcatttgcgttatatcgatcgataaatctgtcatattgctgcagttcagatcattattctataatgatcaaaattaagtcaattctgaacggatttgttacttagcattctggtaccggttggtgtgggtaaataccggaagggcggtagcgtaccactgcaaaacatggtgggaggtatcgtcaggaggctggtgattgttggtatggcatgaataaaaggtttttcgtttgactggaaaattatgttgcaggaacgagagggctgaggaacaaagcttattccggcgctgtccgtccttgctgtcactgacactgatgtctgttttactatcgcctttatctcttcaggcagcggataagtggcctgaatgaagggctggctctgattgtggcgctgacccggcatcactggtcagtgatgtggccgctgaatacacacgcccggctggaaattattaccagtctgttcaaccgtctgcaaaaaacgctccgggccatgccaccggacgaccgtgacaacctgcccctgctgtatcagaccgaaacattcctgaaggcactgagtgacacactggcccggcacgaactaaaacagagcagtaaagtggctttaccggaagccatggtgaagggatatatcacccgcctggagaaacagcctgtgcagggtgaagtatcgtctccggtaacccttccggctcaggcactccggtctgatgctccggacgtacaggaatatcagaccctgccacactcccgtctggtgtatgttgtttctgaaacaaaagcagagcccaaanccnncccnacacnntcccttcagaaatccccgcccacgtttctgaaaccgtttgtggctggtgtctgtgcggcattgctggtggtcagcgtggctattccgggatggcagtttctgacacagccatcaccggaggagcagcattttacctgggggaatggttgtaaaaagcagtgaaaacagtaaatacagagtatcgtgatgaattagtgctcaggggctaccagtattcaataaccagcgtatcggcatcgcattcctgtaattctggtattgactgttatgactaaattcaatgtatatatggcaggcagaaatatgttaacagtcccggagttgtggaaaatcctccggagctaatatccgggagtgccttaacaattttccgtaagttaaatgataatttctgagtgagaatatggtcacgatttgtgttgacggtgaaaataagactcataaaattaccgactggacgctgtgggctggaaatgacgacagagaggttatgctgacctgtcattttcgcagcgggagaaaatatactcgtccgctttctgtatgtcagataacgccaactgtaaatttgcgaaatgttttccttgaaaggaaagggaacgctgtaacatcccgggctgaacgggttattatatatggtgataaatatgctgctgtttattaccgcgagggtgaacgaccctacatcatgaaaacgaccggccttgactttcaacagtgttcagtatttacagagcatgccgtgtttaattacttgtgtagggtggctaatgaacgtattttttatgtccgtggtaataacagaaatatcgatgagaatatccttaggcagataaagaaaatagttcctcatccggataccgccttgcatgcatactgttcaggacagagtaaaaacgtgattcgccatggggtttgatttttccgtttggtcttaatgaaagtcagttgctggctgtcgaacgggcattttcctcacagatttcagttattgaaggaccacctggaacaggtaaaacacagactatactcaatattgttgctaatatattaattcagaataaaacagtggcaattttgtccaataataactcagctgtcagtaatgtttatgaaaagatggacaaacagcaactgggatatgtggtggcacgactggggagtacggagaacaggcaacagtttttttcaacgtcgatttcgcgttctgaggaagtcttacctgactcaccgtctgcaaatgcgattgatgatgtacttcaacaagtgaaaaaacacctgaatgccattaaccaggtcgcttcgttaaaagcagaaattaatgagctgaatattgagtataaatatctgcagcaatggcagagtcagaatcttcgaccggaggagcttttttctcacaaataccgattttcctcacaaaaaacaaccgacctgatggcttatattcattacctttctgacaggcggattggattcagaaacagaattgatttgttgttaaacttcaggatactgaaagtcaaaccattgatgattccggagagaaggctggcactatttacttctcttcagctttcttattatgaaaaaactattcgggaaaaacaaatttctctgaatgaatatgaggaagtatttaaaaaatctgattttaaaattttactggggcgcctgacatcatggtctatgctttatttaaagcaacatctgcgaagaaatgtttcaacaagaagttcattctcggcagagacatacagagatgaatttgaccgttttataaagcgttttccggttattggtagcagtacgcattcgattattaactctatcggcaagggggcccttcttgattatgttattattgatgaagcctcgcagcaggatattgttccggncattcgaggtctttttggggggg

SEQ ID NO: 910 - DNA, 777 bp, Escherichia coli
  modified_base (178)..(180): a, c, t, g, unknown or other
aaccatttgccggagcagattaatgttcagttgcaaaagtcggtcggcttcatcacaaagcagggcgatgttcttttcgtgcattatttaaccttcctaagacgcattttcatgacaaccacggaggaggtcatttactacaaacgatcgtttataacgatcgatataataggggggnnnagcaacgatcgatatattctattaacttgagaaacacaacgcaaggggacaacccgggtatggctgtgtttgcattgtgttttcatggggttaaaaatctgtaacaagagtctggagcatcaccaccgggttcagaagaaaatccagttccataccgcgcgggcaacagagaccaccgtgtcacggacggcacgcagaaccgtacgggcaacagaggcaacacagacgctctccgccgtgtcaaatatccggtccaccgcaccggtaaactgttcacgggcctgagaccggacagactccgtgcgcagctcgtcctgcaggcgggtcatcaggggactggcggcatggtcgggaagtgctgtcatgagcgcactgaccagcgtatccagttcccagccggtgcgggccgatacggcaacaaccggatgtacgggccggaacagacggaataccgcctccgttttctcacgaatgttctgtgcctgtgcgggagaaggctgaataccggccatatcccattcatggcagggctccgttttgtcagcctgcgtcaccacaaacagcacctgctgatgtccccggtgcaggatgtgtcgc

SEQ ID NO: 911 - DNA, 452 bp, Escherichia coli
ggttcagccataccggactcctcctgcgatcccttctgatactgtcatcagcattacgtcatcctccgtcatgtccgccacatccggggaagcggggataacttcattcccgtccgggccaaagcggacgcctccggcaagccctgccgctttctgcatcagcacatcatcttcaggctcttcgtcagcctcgcgccggttcagcagactgaaatccagcggatgcatatccggatcgctgaaaaacaggctgagtacggtgtacgtcagcccggaaaagtgcatatccagcagaacatcatgaaaataatgggtactgtaaaagcggtgccagtcggcatactccgtggatgacatcccggcaagcatggcacgccagtcgggtcgccccatctcacgcgccagtttcagggcaaaactcagctacaccgtcgaacactttcccgcagaaa

SEQ ID NO: 912 - DNA, 743 bp, Escherichia coli
cccgctctggcgacagctatattctggttaacttctataccggagtcggaagttgccggaccctgcagatgaaggcgcattacagaaatcgtggtctgttctaccgttcttcaagaggcggttatggttttgaggaagactgggcagaagtttatacctcgaaaaatcttccaccagaaagctacccagtcggcgcaccaatcccgtggccatcagataccgttccgtctggttatgccctgatgcaggggcagacttttgacaaatctgcttacccgaaacttgcagtggcttatccgtcaggcgttattcctgatatgcgtggctggacgattaagggcaaacccgccagtgatcgagccgtattgtctcaggaacaggacggcattaaatcgcacacccacagcgccagcgcatccagtacggatttggggacgaaaaccacatcgtcgtttgattacggcactaaatccacgaataacaccggggcgcatacgcacagtctgagtggctctacggggtctgccggtgatcatactcatggtaatggtattcgttggccaggaggcggcggttctgcgttagcattttatgatggcggtgggttcacttatgtccagaattcacagtatcaagtaagcccggggacttcttcctatagatcgtattatcaacgtattcagacacagtcagcaggtgctcatacccactcgctgtctggtactgcagcaagttctggcgca

SEQ ID NO: 913 - DNA, 6357 bp, Escherichia coli
atgcttaccacaacatttgcggtgatatctgtcatttaatttgctccagatacaaggaatcgccgcagcatggctacggtgaattttgggcataaaaaaacccagccgaggctgggtcgttgcgttggttatctgtcagtagttatgtactgaaggaggtaattctttattcttaagtctcatccatgcggaaagattcgttggtccgtctggctcattaatatcaacatctcgtgtgtgattgattaaaacgtctctcgccattccgataacatacgagaactcatggccatagtcgtagcatctgccggaatagttcgattgaatttgttttagcgccagatacagttcgcggaataatgcctgtgagcggttggcataatcccataaccatacaaggctgtttgcttcttttgcagaaagctcgttggttttcttctcttgtttgccgataaattcaccttcaagcactaccctgtggatgtactctacggccagcgggatttgttcaattgaaagttcatcaatgctgtcaataccaaaacgctgatgaaccatattgtatgcatcgtcatagcgaagtcctttctttcctaccagcatgtttactgcatcgcgtagcggtgttctttgctcaacagtggttttcttgcctttcacatactctccatgtttgcgaatcgaaggcagaacttctgctgttacccacttgcggaatttgtgcgggactgaacctttattgacagcatcgcggcagcgcagaaccaatgtatacatacctgattcgctaacaatgcttagattctgctcaccaccaagggtgtaacttaaagttactcccttttcatcgtcatcaagtgcagtaagcgccttgcgtgagttagtcagagttaaagcatcacaaacatcttttgccacaaaccacggctcaccgcacttgttgatgacgcggatttcactgtcgccgaatttgaagatggtgaaatcgttttgtgcctttgctatacttttcatgtcaatatttcctaatccgatttgttgataccgaagccctgactgttcccgcagttggggcttcactgttttgatttctttgccgcatcaagcatcacttctgaaaacgtgcgcttgccactgaatactctttctcttctcaatttttcgttcgtgccaaatgattcgccatgaacaaaatttggtctcaaaatggtaagcgcaatctctttgactactgcatccaagcaaatcacactgttaccccctccctcttcaggctgtccagcacccgtttaattacttctgcgctgaatgagcgacactcttcctttgctttttcttcaagaattttttctagcttctctggcatacgcagtgtttttaccttcattgcatcctccgttgtatgtggtacgcatacatagtatttaggtacgcattgatagtcaatagatacctacatatcctgtggtaaaaaattattcaggatgcgccgatgtctgatcgtaagtacaaaaaccctcaagtgaatctgaggcttcctgtagagataaaggaacgtcttattgaactggctgaggctaattctcgttcattaaatgctgagatggtagcagcacttgaggcatggactgaaaaaaataaacatattcaagcactagatcttgcaactatagcatcgcggttgatagagcttgagcatgaggttgagaagttaaaatgtatgcatggcaacagtgaaaaatgaaacgtatcgctattttgttaatattgttcttctctacaatagttttcgccaaaccaaaatcagataatggcgatcttaaaggcctgcaagaactcatgataacttcgaaatttgctggcatgtgcggcacaatcaaacaaatggcaacatttcaagaatcaacaaaaatgcctggcggagatgagttcttacagcgttttctgaccacagagcaagcaagactaggaatgaatccacaggaatttcttgaagcatgccagaagtcaatttcagcttataccaattattacaatctaacttctgataaataatagaaaggattttataaataactttatgaaaaaatcactattaattatcccgcttctgctggctggatgcgcaaaagtaagtgactaccaagcaagttgcgaacaacgctatccaaagcttagtgatatggctaattgccttgatgccagcgtgaagaacgactcacgcatggcatcagcaccaacacctaagctgtatgtccttgctgcgaagatgctcgggcaaggtgtcgatcaaggcaagataagtgacgcacaggcaagacttgagctacagaatctttatgttcaattacaaagccaagaacaagcccaacaaatagcacaaagccaagcattccagcaggctttattgaattatcaggctgtaaacacaatgcaagcgatcgagcaaaaagcgcgccagcctgttataactcaacattacccaacacgcgttgacacatatacaaactgcaattcaggatttggaaacacggtaacatgcaacagtagcagtaatatcaggtagttatatcttatcttttattgctgttctgctgtaatttggcttgaaagtatagggcgtatcgcatttgcagcattatttagcgctctttcataagctggcgttccagttttagtgtttgccaggcgtaagagagcattccttgctgctttggactcatacaagcgcatcattgcaccaaaaccagcctcaagccccattgatacgccaagggtcgcagttgcgccaatcgtccttatcctgttggcttgcgattgccccgtctgagttactacatttgcggtgtctgaccttgctgtttgctgtagaacttcatgaagagcatcaagctctttcatgtgctttccagaaaaaatagtgttgtaaatttcaccgcctgactgagatttcagcttattaacttcagtgatgaacttggctggagagtcccctgccttttccgctattttgctgacgtaagctgcacgcatagcatctttccccttatcatccagtgcgctccagattcgtttcacgtcagatggttttctgcttaatacaacggtatttataagttcaggactggcttcactgcttgccttgttgagcttgttggcaatgtttttattaagcaccttattataaacgtttgcataatcggaatttgctttaaggtattttgctgcgtctgatgcaccgaggtttttagcaactgcgttacgaaggtcttttgacattgcattctctaccatattggtagctgcttttgcctggttggggaagaccatagcatctccctgaacattagatctaaatgctgttctgtgctgacgcaagagatcaaacgtaacatccaaatcagttgcagggtttgctaattcttcacgtaggttacgcaaggatgtaagcaggctttgattggcagacgtcccaagccgttcctgtcttgcgatcgctgtattcagagcattcatggtatttgtggtatcaactgcggcattacccattttattggtgacgtcattgataacagcgccagcggcatccttccgcccccttaacgtggtggtaagagatttcaccacatcatcagggttgtactcaccaaaacggtcaaaataattacttaccagcttactacgcgttgcatattgctccgctcgctttgagcctgtcccgagcaaagccccctcggcatcctgagttaggccgcgagtaaaagcatttttcggccggataacatcagatgtcattgatgtcacgcccatcgattctgatgtggcaattttcttcgccacttctggcgcaatatcaccttttatagccgttattccacgccctattccctttgctgctgcggaaagaacaccctgagcggcaaggttaactccggcatttttagctgcattttgtgcgaaatcgcctttctgatttgcggcctctgccagtgatccaatagccatgcttcctgccgttccaactcctggaactaaatacccaccaattgtttctccagcttgcgcataagggtctgtcggtcgatcgacagggcgataaacatcatccaaaaccttggggccaccaagaccctgactgattgcattaatcagacttgcgccaccctgcaatacgtcaaatggtatgtttaccagaccacgaccagcctgttctgcaatttgccctgcactttgaccaccagtgagccaatcgccagcttgttgcatcaatgatggttcttcacgtgctggttcattattggcctgattaactgtttgttgctgaacagcctgaccagcaaaatactcatcaatggcggtgccaatatcttccgtgctcgtaccatcagggaaggtaaatgtcttaccgtttgcagttactttcatcattccaccgtaaattgaatgcctgattttgaggtatatgatccggattgactctgctgctgttgggtatttgtcggttgttggctattgctctgttgttgactatttgcagcacttgaaaccaccaaagcatcataaacgcgaccagactgaccacgtaatgagttatattggccctgcatttttcgcatttttgtttcagtagcagccttggaatcaccgggctgaggcaggtacattttggaatactcctgcatctctggcagagtaattgctgcacctgtttctgggcgcaaaattgcatacaaggcgtctctcgcatttaccatatattgctgctccgctggtgataggcttaaatttgcaatagtcccatcaccaagagagcgatttattaatgcaactcgcttagggtcaatgcttttactaagctgattcattgagtccattgaatcttttaatcgcaaagcaaatcctgccgccttcttggaaccctcattagccttatctatgatgctttgcgcttgtggcaagctaattggtttaatgccatcaccagatataggttggtttagttttccggcttcctcgctgccatcggtgtaatacttagttaccgagccatcaggattggtttcaaccttaagtaatttcttagcattgggattaattcccgccgctgccgcaaatgccgctgcaccatctggatccgcctttaacatttgcgcgtactgattgtaattctgcattgcggctgttggtgcatatgctgacgttaacgcatttgctcggctaatatcctgccctctcgcctgaagtgcttcaccagcctgattgctgcggattgtctctgccagcctgcctcggtcaatatcacgaccagccatcttgtcctgaacattgaagtaatcaatcggaccaagagcagccattccaaggtgatcaacaaactcaccaaatcctgaaggattctgctgatacatctgagcaacgctgttagggtcaacaccgacgcgagtcagttccttggcgttgttttgcagccatgattgcattgcttctggagacgatgacgcaaggcgtgcgccagccgctaaggtgccgatagaattgcgctgctcttcatcaatgaatcccatgcctttacgaacggattcaatctggtctggatattgagtagccaactgacgcaaagcaccgcgatcaccagacgcataagcattagcgtatgcctgctgaaattctttctgccgctgagcctgcttttcctgctgaaccccccccgcaatacctgaaaggccttgcaaagcagtcagcccaacattgttagcgcctgaacgctcaatatcattgttctgcctgataagctgaagcgtattgccgatgtcatttacgctcggagcgtttgagttgacgccgccgataccagccaacaatccgccatttgatccttgccaagtagccatgattaccccttaaaacaacgaaccaagcaatccgataccagcaccaatgccagcgccccaaggtgttgatgttcccaaaaggctggcaagacctgcaccggcaatcgcaccagacgttccgccactaattgctgtctgaagacttgatggtttgttggcattagcagcggcaagagctgcgctttgctgtgcaatgctgctcatgttgttggcgtacgtctgcccggcgtttgcctgaccttgcagagcaccaagcccaacgtttgccagattgttgtaattgctcatctgatttgataaccaagactgaccgagtgtcggcgcgatcgtagccagttgattgcttgtggctgtcgaaccaagtccacccgtcgcctccgcagcagcaagactctggtaacgcgcctgacctgcaaggtctttatactgctgagagttgtaatactgattaagtgcctgccctgac

SEQ ID NO: 914 - DNA, 2467 bp, Escherichia coli
cagcgtctgaaagagctggagcgtgaaaatcgtgaactgcgccgcagtaacgatatccttcgccaggcttccgtcggaaacaatgatctggcagcctgagttcacagataaaacactctccaagaaacctggggcggttcactatgttaatgttatctccatcaggtaacaggcatatatgggataataacaatggcttgaggaaatggataaaaattttatactagatattgcagtaagtactactgatccccggaataataaagagtttctttggattagttatagtatgaacaatctgagtccggccaaatgtgaaagagcatattggatgactctggaaaaaagatgtctttctttatttatggaaaacggatatgatcttcagacaggagcatggttctgtcttatttcagccaatctatatagctgggaaggactggcgctttcctcatggaaatttgcagattcatttgtaaaagaaaaatgctggcctcatgttacggccactcagatgcggacgaatattcttatctggtatattaaaaatgttattcctgctatgcaaagtctgcctgatgatgagaaaacctactcgtcattaaccttgctggaggatgcattaacattattggctgatctcgaatacaatcttctttctggcaaattttttatcgtttcagatatgctggctgaactcaagagacaaaagagtgatgactcagaaagtactgatgccgcacatcatgattcaggatcacatgatgcgaaagatattcggtcttttagcagtggtttacctacgaatattgactccaattatactgctggaccagaacacaatacgttaattaagaaagataagaaactgcgcatatattataacgtcgtttctttcatatcgggtgctctaataaccgttgtaatgaactatgctggcaggccggaaacagtactgaaacttaggggcatcatacctgatagctttattactgaaatggttatgaactattctggatgttcagtctccctccctaattcagcagactcctggtctaagcttggaaagaagattgatgattttacggaaacactgaatgtaattgaaaatgatggggggtatattactatatctaagttgaaaacgattgcttacgatctgaaaaatacctttcttgagtatgacatgcctgtaaatataaaaatatcagacttatataataaccagaatatgagtaaagttgatatcaacagagagcttgaaatgatacagcataatattaacaagttcaattgtgagattggctatttaaggctgagaaatgagggactattaaaggataaggttagagaaaagtgagatgtttctgtctatcgggcttttcataacgaactcctcttattgagtctgaatgtgtttatcatagaggccgttttgtcttactcagcaatagtgagcacatggctaagtgagtactctatcagtggtgacttatatgacagagactgtatcatataattatctcagatataatgatattaattgttttatgacgataattacaggtaatgataagcagtgattgtcaggctgcttactcgatattacttgggggcgtcggcccgcttgttgtggacagagggtattgttaaatcttgttgtttatggtatttttgtgactgtgtttgttattactttttatgtcggcatgcattatgaaaatttactcgttaacaggagcagttgttattgataccgagtcggtttgtttattatctgactcatctgaaaaaaacagatttatttacagtgagaaaacataacaatcattataactgtcgtgtgagaggtgttgtttgttcatacagattagtcaaggccacggttgatgatagtcctgataagacatttaatgcgtattaccttccttatgtgagaataaaaattacaatatgtggtggacccatacatcccattgaaaaatttctcggtatagaatataccaatgctgaggagttccctcttacatttctaaaggataattatcatggggccttaaacttggtccaaaaccgattgctaaatcgacaggaaaaccggatcaacgccgacgagataataaagatactcctggcaacactccgggactaaaaccgagtaagtctacaggtaagtaaataaaaaggatataaataagcatttataccctgactacatatccagtctactgaaggtgtttctgcagccagatgctcgttccttctatatcatacgcctttgctccataccctttcgcaagcaaagactctggtaaatactcgtcatatttatccagatgcttatcaggaacaactgcagcaagctcaaactctgatggtaaacctgacaataacagtaagcgtcaacggagcaccgtattgacgcttatttattggtgagtactacgttccatggcaggagttcatc

SEQ ID NO: 915 - DNA, 400 bp, Escherichia coli
cggtggtgaaggcagagcaccgggggggggggcgctgaccgtggcattccagccggaaggcgcaaccgacaagagtttccgtgcggtgtctgcggataaaacaaaagccaccgtgtcggtcagtggtatgaccatcaccgtgaaaggtgttgctgcaggcaaggtcaacattccggttgtatccggtaatggtgaacttgctgtggttgcagaaatcaccgtcaccgacagttaatccggagagtcagcgatgttcctgaaaaccgaatcatttgaatataacggtgtgagcgtcacgctttctgaactgtcagccctgcagcgaattgagcatctcgcccagctgaaacgacaggcagaacaggcgggatccagtctcaatcgacaggtgagcgtggaa

SEQ ID NO: 916 - DNA, 618 bp, Escherichia coli
gcagcagctaaacgagacagcagagttgcccgacagcgaattctgagcatgctattgcgaacagacaaacgttatgcaggaaagcactggaccggcaaacatcgaacctggttagccaatcaatcatttagtcagccatctcaacagattgcttttcaacactattgtcagagtctggagcagattgaagatcgcatacttcaactcgaccaggaaatatcccgcctgttacctgagtggtctctgtgcaatctggtctgccagttacaggcccttaaaggtgttggtcagctaaccgcaataaccctggttgctgaactgggtgatttttcacgattttccagtcccaaacaactcatggcttttctgggactggttccaggggaatattccagtggaaacagcattcgtcccaggggaataacaaaagttggaaacagcgaactgagacgtctgctttacgaagccgcctggtcttatcgtacacctgcaaaagttggtgcatggcttatatattaccgaccggattctgtaacacaatattccaaagatattgcatggaaagctcaacaacgattgtgttctcgttaccgaagtctgacagcaaaagggaaaaaa

SEQ ID NO: 917 - DNA, 2545 bp, Escherichia coli
  modified_base (1233)..(1233): a, c, t, g, unknown or other
cgaccgcgccggtatcagaggcaggttcccccccccccaaaaaaaaaaagcgagtagatgcgtaccacctggaccaggcctttccgctgctgatgaaacaactggaactcatgctcaccggcggtgaactgaatccccgacatcagcataccgccacactgtatgcaaaagggctgacctgcgaagccgacaccctcggctcctgtggttacgtttatctggctgtttatccgacaccggcacccgcaaccacttcataaccccgaagctctcacctttagcactaccagttacagagaacttaagatgaaaacattatccgacacacatgtacgggaggtatctcgctgcccgtctcccgtcaccatctggaagacactgctcatccgactgctggaccagcattatggcctcacactgaatgacacaccgtttgccgatgaacgtgtgattgagcagcatattgaggcaggaatttcactgtgtgatgcagtgaattttctcgttgaaaaatacgcactggtacgtaccgaccagccgggattcagcgcaggaacttcgtcgcagttaatcaacagcattgatattctccgggcacgccgggcaacaggtctgatgacccgcagcaactacagaacggtaaataacattaccctggggaagcatccggaggcgaaacaatgaaactggccctgacactggaagccgacagcattaacgtgcaggcactgaacatggggcgcattgtcgttgacgtcgatggtgttaatctcgctgaactgattaacgtggcctgcgacaatggctacttccttcgtgttgttgatgaatctgaccggcccccaacagactgcacgccaccatttgctgccctgaccggcatacgctgcagtaccgcgcatatcactgcaaaggacaacgcctggctgtactcgctgtcacaccagaccagtgacgttggtgaatcagaatggattcattttacaggcagcggatatctgttacgtaccgatgcgtggtcatacccggttctgcggcttaagcgcctgggcctgtcaaaaacgttccgccgtctggttgtcacactcatccggcgttatggcgtcagtctcattcatctggatgccagcgctgaatgcctgccgggtttacccactttcaactggtaaccaggagcaacatgaaatcattaaatcattaaccacagaaaccgcactggatattctgattacngtggctgcaggacaatatcgactgcgaaccgggaattatcttcgacaacgatgaggataaaacggattcggcagcactgttgccctgtatcgaacaggcgcgacaggatgtcccgaactctgcgccatctgcagtttcagcacctgaaccggtgagtctcattcattatcttactcaccacacttcattcccccgacgccagcctgaatacggctggcgttttcatttataaacagaaaggaaaaccgattatgtcaggcatcacaatctcccgcccggaactggtcaacggacatacggacgttatctgctcaaccagtatccgccacattctggctgtacgaaagagtgcgctgctgcaaatcgacacacttatccggcaactggctgaaatctcggtactgacggaaagcattggcggtaaaaccgcccgggactgggccatgaaacaggattttcgctgcggctgctggctcatggagaaaccggaaaccgcaatgaaagccatcacccgcaatctcgatcgcgaaatctggcgtgacctgatgcaacgttccgggatgctgtcattaatggatgcgcaggcccgtgatacatggtaccgctcactggagtacgataactttccggaaatcagtgaagcgaacatttggagcacatttgagcaactgcaccagaataaggatgacgtgtttgagcgaggagtgatcaacgtcttcagagtgctgagctggaattacaaaaccaactcaccctgtaaatttggcagtaaaattatcgtcaacaatctggtgaggtgggaccggtggggatttcatctgaacagcgggcaacaggcagatcgacttaccgacctggaaagaatgctgcacctgttcagcggcaaaccgatccccgacaatcgggaaaacatcaccattcatctggatgagcacatccagtctgttcaggggaaagaggactatgaagatgagatgttcagtatcagatactttaagaagggctccgcgtatatcacgttcagaaaaccggaactggttgaccgactgaatgatattattgcagaacactatcctgacatgctgtcagtatagctttgccagtatgcttaaagatcggaaattgtccgataagatgtgatcgcggctcatacaaaccggtttcagatggcatacccggtggcatactgtctggaaggataaataaaaaagcgcatgttaaacaataacatgcgcttgtaatctggcggtgagggggggattcgaacccccgatacgttgccgtatacacactttccaggcgtgctccttca

SEQ ID NO: 918 - DNA, 258 bp, Escherichia coli
  modified_base (59)..(59): a, c, t, g, unknown or other
  modified_base (61)..(61): a, c, t, g, unknown or other
  modified_base (63)..(64): a, c, t, g, unknown or other
ttggagcgctgccaacaactggaggggaccttattcacggtcgttgtctgtactgatgnancnnggcactgaaggggaacgccgataccgcgacgaaacttgcggcagccccaaaaattaacggtgttaagtttgatggctcggcggatattaacctcacgtcggaaaatattggtgcatttgcccgacgttcgacgggggcttatgcggattcggatggagccgttccctggaatgccgaatcaggcgcttacaatg

SEQ ID NO: 919 - DNA, 2869 bp, Escherichia coli
ggtgagccctccatcaccgcccccggtatcccgctcatgctggcgaccccagacacgcagagtctccggtgtacagccaatctttggggcaatggaacaaattaccgcccattatgagtcatattcgcctgactttccagaactatacgaatcaccctatgacgaacttcgggggaaaaacgagtatttttagtcatcctgtttacctctttctcaggaagtttagtctccaggatttccggggcggttcactactcctattcaaaatcgtttcttgaaatcagaaagggcgtatttcagatcagaaccacaaagagctctctgggattcacttaatacatccttaacaggaataatccctttttttcttgaggaataaaacgccataccatcatcattttttaatctccagtctctcgatatatcaacctcaccaaggtatccggtaacgaccagactatgatacccatgttcattcataatttctttcagccgttgtgcgaaggcaggggttctcgaatgtatccccgaggcgcaagtcaatactctgatatctatgaagttctttggtaaacgtctattcattaatagagtggctaatgctaagggattcaacgttggcccagttgctgaacctgtcccaataactgatgtgttgccatgagcaacgatgtataacgtatcgctcgatttaagaaaggataaaggtgttttgtgtgaagctttcacaccataacattctttattcttcattttctgatacttaacttcggcatcaagaaaagtgtcattttcatccatttgaaatgggaaaaagtaaataatcatattacctcgacatcagaaaaaattaaaataatccacatgcggaaagctctgagcaggaaacatcaccaaggacgaaacctcctctctctgtaaaggatagttatccatccggggcaacctatacctttaccataacttccggcagagtcaccttgctactatgtttaagccctgccgggcaaatatgtcactcaacgaccttagagagttttctgtcaaaagcagcagaggctagcagttactctcttatctcttatctccagtcttgagtgcgaagaggcacataacaaagttatgtgttactgaccactctttcattcaggatgcttaaccccgttatatgcatacaagaaatggggcgccagactgccgtctgcagttccataccgctagataaatatagacacaggcagagtgtcccacataatgccagtctacagtcggatgactcagtttattagtctcattacacagagatacatagcccagaaataatcgctgatcactacctgttttcaggcccaagtcatctgcagatcaagtatgttatattagacaaaatagttaattaaggagaaaaccaatgctataccgatacacgtaaaaggtactccactgccaggatgattgccggcgtcacatcccagcgtcgtctcaaaagaggtaacagttcattaaggcttctgatattacgtgatcctacccacgtaatatggacacaggcctaagcgaggttcttgttttcaaattgttccggactgaggccgccacaccaactgtgccgccgccaccgattgataatcacattcgatataattaaacaccgttgcccgcattatttcccggctgataaagtgttctccatggatacattccactttcagcgaatgaaagaagctttccacgcaggcattatcgtagcagcaaccttttgcgctcatacttccacgcagattatgccgcttcagttgcgcctgataatctgctgaacagtactggcctccacggtccgtgtgaacgataacgttccggggcctcttacgccgccacagcgccatctgcagggcatcgcaggccagttgcgccgtcatgcgtggcgagattgaccagccaataacggcacgtgaccacaggtcaatgaccactgccagatacagccagccttcatctgtacgtaagtacgtgatgtctcctgcccacttctggttcgagccactggcgtaaaaatcctgctccaacagattttctgacacaggcaggccgtgtgcgcggtagctgaccgggctgaacttccgggaggcctttgccctcagtccctgacggcgcaggcttgccgccacggtttttacgttaaaggggtaaccctgagcacgcagttcatccgtcaggcgtggggcaccgtaacgctgttttgaccgggtaaaagccgcgaggacaacgctgtcgcagtgttggcggaactgctgacgcgtgcttatccttgtccgccgctgacaccacgtataccagccgctgcgggccacccggagcacgcggcacattgctttgatgctgaactcagcctgatgtttttcaataaagacatacttcatttcaggcgcttcgcgaagtatgtcgcggccttttggaggatagccagctcttcatcccgttctgccagctggcgtttgagacgtgcaatctcggtagacatctccagttcacgttcagaagacgtctgctgattttgctgtttactgcgccagttgtagagctgtgattcatacaggctgagttcacgggctggcggcagtaacaccgatgcgttcagcaagcttcagggcttcactgcgaaattcaggcgaatgctgtttacggggttttttactggttgatactgtttttgtcatgtgagtcacctctgactgagagtttactcacttagccgcgtgtccactattgctgggtaagatcaacgttccgttaatacacgcacgccattctttgtcaggtggaatccagactgattacaggtaatagtgatatgacaaacatcattgcc

SEQ ID NO: 920 - DNA, 254 bp, Escherichia coli
atcggtttgccgctgaacagatgtagcattctttccaggtcgacgagtcggtcagtctgttgcccggtgataagatgaaacccccaccggtcccacctcaccaggttgttgacgataattttactgccaaatttacagggtgagttggttttgtaatcccagctcagccctttgaagacgttgatcactccccgttcaaacacttcatctttgttctggtgcagttgttcaaatgtgctcagaatgttcgcttc

SEQ ID NO: 921 - DNA, 474 bp, Escherichia coli
ttttttgatggtcgccccgctgtttttgatgaggcggattttccggcaattgccgtttatctcaccggcgctgaatacacgggcgaagagctggacagtgatacctggcaggcggagctgcatattgaagttttcctgcctgctcaggtgccggattcagagctggattcgtggatggagtcccggatttatccggtgatgagcgatatcccggcactgtcagatttgatcaccagtatggtggccagtggctatgactaccggcgcgacgatgatgcgggcctgtggagttcagccgatctgacttatgtcattacctatgaaatgtgaggacgatatgcctgtaccaaatccaataatgccggtgaaaggggccgggaccacactgtgggtttataaggggaacggtgacccttatgcgaacccgctttcagacgttgactggtcgcgtctggctaaagttaaagacctgac

SEQ ID NO: 922 - DNA, 13142 bp, Escherichia coli
  modified_base (12)..(12): a, c, t, g, unknown or other
gtatctcggctnggtcgttcgctccaagctgggctgtgtgcacgaaccccccgttcagcccgaccgctgcgccttatccggtaactatcgtcttgagtccaacccggtaagacacgacttagcgccactggcagcagccgttggtaacttggttagcagagcgatgatggcgcaaatggtgcaacagagttcttgaagtagtggcccgactacggctacactggaaggacagtatttggtatctgcgctctgctgaagccagttacctcggttaagcagttccccaactgacttaaccttcgatcaaaccgcctccccaggcggttttttcgtttacaggcagcagattacgcgcagaaaaaaaggatctcaagaagatcctttgatcttttctactgaacagagatccccgtcaatttagaagaagatgatggagccacagtccctccctgaacatcacgtatatagttagcctgacatccaacaaggaggtttatagcgaatattcccacaaaaaatcttttcctcataactcgatccttataaaatgaaaagaatatataacgaggtttaatttatgagtttaagatactacataaaaaatattttgtttggcctatactgcgcacttatatatatataccttataacaaaaaacaacgaagggtattatttcctagcgtcagataagatgctatacgcaatagtgataagcactattctatgcccatattcaaaatatgctattgaacacatattttttaagttcataaagaaagattttttcagaaaaagaaaaaacctaaataatgcccccgtggcaaaattaaacctatttatgctatacaatctactttgtttggtcctagcaatcccatttggattgctaggactgtttatatcaataaagaataattaaatacccaacacctcatttatagtattaagtttattcttatcaataaaggcacatagaatgcctgtaacaatagcaatcccccagatacctaatgtagttccagcaagcacactaaaaagtaaaacaacaacataactaactccagcatctacagctttcttctctaatgtaagaaatagcggcttccagtcacctgtatccttaatttttaggatatcagataccacatcatatccaaaagaaacatgtcccgtaatcttcaagtacttggcaaactgatctaaatgcttagcccagtcttcatacttaaccgcctccagtgcattgaaaattgcatcacggtctgctttgctgaatttcttatttaatacatccttgtatttctcaaaagcagctagagcttcattcacattgctgattttcttacctttagatttatcagcaagttcctgtgccatttttgaatatttttcaccatatttttcagatagcgtttgataaaagctaactgttgcatccacagcatccttaatctgcgagttcaggagattagtctgtgctgttttcaaattatcttcagcatcatgaatacgtgaaactgctgtacttcgcttattattagcctgagaaatagcctcttggattccatttatctcagagctaatctggttaagacgcgtttctgatgctgttacctgcttttgtttttcctccatctcatcaccagctctcgcccgtagtctggtggcctcaaaaaaaggacgactctgaagcggatcattcgccctaggagataaaagtttaaccctttcatccagttctttatatttagcagatgcctgatccaactcatttcgttttccggacagcgtattcgtttctgcatcacgggcatgaatactggagcttaaacgggtattgagcgtattaatctcttcatccactttcgccagctcagattgtgcagcagcaagattttttgtgccacctccacagcccgggcctcttcactcaatgctgccaggcgtttctcttcatcctcagccagtttcaattggcgttctgtttcagcctgctccttctctatctctttacgtcgttgttctgcttcctgaaaagccttttccgcagcttccgcttctttacgggctttttcttctgcttttgcaaggcgcaaccgctctgcttctgcctgcatcgctgcattattggcatgagccaggtcaataacctccggatgagtggaattatggcgaagcgcctcattcacaatatccttcagatgttgagtcagcgcatcccggtttgcttttgctttagcctgtgcttctgcggcagcttttgctcgggcagcctgttctgcctgcgttttcttcaattgagcagtagaccatttagctgtggcatgaatggctgcagaactttcacttttgctacctccagttccaccaccaccgccagagccactcccgtctggattaccattcaaaagagtaatgattacctgccccttatcatcataaggaacaccatctttatagtacgctacagctgtttccattataaaatcctctttgacattaaaaacaaatagttaaaagcaatatactgtatatataatcactggttttatatacagtttaaaattacgccgctgcattttccctgtcaaccctgtggattttcatttttgtgaaaacgatcaaaaaaacagccacccacaccacgtgctatttccacccgatgccacaaaaaccagcacaaacattaccgttctcagacctcattatgttttactgaaaccatgagatgagacacctatgggacactgtaactttatggcatggcacacactccgggacgcactgaaaatgactggaagatcgcgttcacagttttaccgtgatatgcgctcaggtcttgtcagttaccgtaccagccaggacggacgacgggagtttgaaaccagtgaactgatccgggcatacggcgaattaaagcggaatgagacaccagaaaggcacactcaaggacactcagaaaaacctcatgatcagcagacagaacgcattctccgggaactgaatgagctgaaacaatgcctgacgctgatgcttgaggataaacaagcccaggatacggagcgccggcgccaggaagcagaacggaaacagctacagaatgagatagcccagctcaggcaggctctggagcaggaaaagaaacggggattctggtccaggctgttcggtcactgaacgcgctcagaaactgatgataagataatcttcggataataactcaccgagaataaatactttaaggtagggagacactcatgagacgtaccggaaacaaactttgtcttatcgccatgataacagcaacagtagctctcacagcctgtaccccaaagggcagcgtggaacaacatacccggcattacgtatatgcttctgatgacggttttgatcccaacttttccacccaaaaagccgacacaacacgaatgatggtgccttttttcggcagttctgggatatgggagctaaagataaagcgacaggaaaatcacggagtgatgtgcaacaacgcattcaacagtttcacagccaggaatttttaaactcactccggggcacaactcaatttgcgggtactgattaccgcagcaaagaccttaccccgaaaaaatccaggctgctggctgacacgatttctgcggtttatctcgatggctacgagggcagacagtaagtggatttaccataatcccttaattgtacgcaccactgaaacgcgctgaacgcgattctgacgcagacaccgcaaaaagagatgttttaccccggaaaaacaggaaggatgcgtcaggatcgttttcagctctctgcatagctatgcatgaaagcgaatggtgatcactttgggagcttacggtgttcataccgtcagttttcgacagttttctctccgggaagctaatctgccataagcctggataacagggcacggtgatactccgtaatagcgatcagcacctccgcatactccctgtccccgacacgcttgccgtcgataaagagttttttctgtaacgcccccagtctcataacttctttcagtacccgatcatcagtcagtgagttaactttcttaccgagagctgccgcccgtaaaaaaccggaaacggtcttgccgcattcagcagccctttttctgatttcctggtcttcttctgccgtcagacgaacagggcgactgatagcccgcctgcgcgtattacttccacttcgttttgtcataaaacatggctccgtatctgacatgggtgtcggggcaaagccctgaccagggtaattgtaatagcgtgcatgtatgcgcggtataacaattacacatcctgtcctgtcagcaagttcgaattaccgacaaaggcacggcagttttttggcagtgacagtattgtcaggcagaaatacccgtcaaagcgtcagacggcagaataccggcggtaaaacagtcgaaaagtggtacgcgatataatcacacaacgcagatgacagacagaacggagaaaacgaaaagatgaacaagcagcagcaagccgtactcaacatggcaggattcataaaaagccaaagcctgacgctgctcgaaaagctggacgcactcgatgctgacgaacaggctaccatgtgtgagaagctgcacgaactcgcagaagaactccagaacagcatccagacacgctttgaagtagaaaatagcacagagagataacgctcaggacaggatgccgaacggcacaacagagcgtaaggagaaaatgtcacataaggcgctcttccgcttcctcgctcactgactcgctacgctcggacgttcgactgcggcgagcggtgtcagctcactcaaaagcggtaatacggttatccacagaatcaggggataaagccggaaagaacatgtgaagcaaaaagcaaagcaccggaagaagccagcgccgcaggcgtttttccataggctccgcccccctgacgagcatcacaaaaatcgacgctcaagccagaggtggcgaaacccgacaggactataaagataccaggcgtttccccctggaagctccctcgtgcgctctcctgttccgaccctgccgcttaccggatacctgtccgcctttctcccttcgggaagcgtggcgctttctcatagctcacgctgtaggtatctcggctcggtgtaggtcgttcgctccaagctgggctgtgtgcacgaaccccccgttcagcccgaccgctgcgccttatccggtaactatcgtcttgagtccaacccggtaagacacgacaaagcgccactggcagcagccactggtaactggacaaggtggattgagatattaagagttcttgaagtggtggcctaactgcggctacactagaaggacagtatttggtatctgtgctccaccaagccagttacccggttaagcagtccccaactgacttaaccttcgactaaaccgcctccccaggcggttttttcgtttactggcagcagattacgcgcagaaaaaaaggatctcaagaagatcctttgatctttttgagatccgcccactcctggaacctacaacacatgtgtaaaacgtcaatggagggggctattatcggactgcaacacatttcgtacagcctttacactcggtgaattagcggccctagatgcatccactcattcaaccaactcaattctcttctcttagagtgggaaaatttggttttccttgcagcccccacccgtaaaaactggctgcaaaaaccttgtattactaatggatcctataaccattaaaaacttgattactatctcatttatagaattaggcatattgacacaagcacaaatttaacaataccataataaatgataactattctcatctacattcaaatatataattgggggtgttatgctacaacataagatgaacagcagttcttatgcaaaagttcataatgttagctcattagaagatatcatgagttatcacaatgatgatgttcttctaaaatttcgtaaagaatggaatgtaacaccagaagaagctgatgatatctttaatgaaacaaagaaattcatctggctagcttcaacatgcctaacggaatgctacaatataaaagttcacgagcaattacaaattatagatgaaatgtggcatacgtttattcaatttacagatgcttataccagcttttgtgaaaaatatcttggtgcttacctccaccattatccaaatacaaatgacatgctaaaaaatgagataaggcatgttaatgagcatggtataacattccaagaatatcgttttaacgaatataaaaatcaaattgaaaaaatcgctttttacctaggtcatgaaactgtcgcaaagtggtatggtgattatgctgtaagatacagcataaagaacattaatactataagaattccaaaagaatccatatccagtgattcttacatcgaaaaagtaaagagtatcactcaccttccagccgcagaatttgtaaaaataataatgcgaaaagatgtttggaatgataatggttctgtttgtggttgcagcggtaaaggatgtggcgctgggtgctcatgtaattctagataacataaagcccgtaatatacgggctttaaggattataaattgaattttattgaaaagtacatcatcacatttaataaatgtaatttgttttttattatattattatcaactataagtagttttcttttcgttctattcggatatttaataaaaacagttattgacaataaagattcaataggagaaataaactcattattaatatttatagcatgtttcttatcaattagattccttatgcctgctggatatagcatatcggaatacttgactcaaaaaacaaatatagaattatctgtaaagcttagagagcaagttattgataatatacaaaattctcaccaagagcattttttaaagaaaaataaaggagaactaaataaggttatagaaagcatgctttcttctgcatcatcattattttatacaatatgttctgatgtagtaccattattaatacaaatgattggaataatcataacaatttgtataagtgttaatacattaatagccattgagtttataataataatggcaatctatataatatttgtcataaaaatgacacaacgtagatttccaatgatgaaatcagttgcacttagctccaaattcgcatctggaagaatgtttgatatgatgcacatgtatcctatggataaagctttccataccacggataaaagtcgtaaacgagtaattcaagctgtaaatacacattcagaaaaacaaagaaaagtaaataatgaatttttcctgtttggtatcagctccgcttttctttcagtcatttttagtagtctgattatcctatcagcatactggatgtttcttcatggtagagcaagccgtggtagtattattatgcttgccacttttttattccaagtttttctcccattaaatcgcattggttatctatttagacaaataaaaatggcaagaacagaaattgatttatactgtgccgaaataaacgacataaaaaaaacaaattacacagacaagcaatatcttcatgtaaaagacaatatttgcaatattgaaatatacaacaaatcattcaaccataaattaatattaacaaaaggcgttgttacctttataaccggtgagaatggttcgggaaaaacaactattgcaaaaattctctctggcaatataacaacagaagaaaacacaataaaaatcaatgggatacaacaagaaaaagcaaattctccttttgttaatgtcttatacgttcctcaagatctagatctcatgcctggaactatagaggaaaatatattacattattccggcattaataatttaaatacaattaaaaagctgctacacagatttaagttcgacaaaccactagattatgagatcaaaggttacggacataatttatctggtggacaaaaacaaaaattaggagtatctcttacatctggaaaaaacgtagacttgattattttcgatgaaccgacaaaagggtttgattcacttggtataaaaataatcagtgattatataaaagaggaaaacaaggaaaagcatatcattgttatatctcatgatgaacaacttataaataatatacctaaagcacagattatagatatcacaaaacatgaggtttaaaaatgaataatcttataaaaaaggaaatcatagaaaattttaagaaatataatttccagaaatatccgtttgtattcacggatgttaattataaaaacttaatcaactggaatgatcttaataaattgcttgaaaaagatatattgcactatcctagagttagaaatggcaaatgacaactttcccgaaattagggggtataaaggatttataagatacacatatagccaaacaggcgatagaacaccacatataaatcgccatcagctatataaatgcttacgtgatggcgcaactcttatagtagatcgatgccagtcattctttgaatctgtagatgaaagcagactatggttatctaaagagttagaatgtacatgtagtgctaatctatatgctgcatttacagcaacaccaagctttgggcttcattttgacaatcatgatgtaatagctgttcaaattgagggaataaaaaaatggaaagtttacaaccctaccttcataccctctcgaagatgaaagaagcttcgattatctaccacctaatacctccccagattatgagtttgatataaccccaggtcaggccatatatcttcctgctggatactggcacaatgttacgactcagagcaaacactctcttcatatatcttttacagttataagacctcgtcgattagaactatttaaaacattatttgatgaattaaaaaacaatccatatatgcgggaacctatagagcatggtgattcattatctgataaagaaaaaataaaaactataataactaatgctataaatagttttgatattcagtttgcagaaaacatgcttaaagctcaaagcagaacttatcgctataaaaaaataaaacttgaacatatataaccattaatctaaggggacttccccttagattttttcatacgatataaactgcattttccatccaccattaacctttatccaattctcaataaatgccattaatatatttccatcattttgctttatttcagctttccctgaaacacaagcaatgcctttaaactcacgcattacgacatcatattcatatctttctatgctaggtaaaatcctcgctggacgcatatcaatctttcgtaactgatgttttttatagataactttttgaccatttgttgaaataaaccaatcagcttccaagtaatctagcatttcagtattacctgaataaaatgcattataccattcttttcttattaggtttaagtctgatttaaaattagtcacactaccttcctcatatctaattcctcctctaatctatccccaacattccttactgattttatagcatcatcaatagccacattatatatgactgggattactcttttaagaatctcatcaagtaattcctctgattcaaactgtccaaggcatatatcatgttcatctctgattttttgtgaaataaattcagctagtcctttatatatgtttttttcaatatcagaaattttcattctttatgaagcctcacaaataaattaataatataacatttttcctatcataggaaaattacaactcaaccatactgcaacctggaatttcccaagcaagcatatttaaataagtgcaggataccacctcgaatcatactctaaggaacaagataatttaccataatcccttattgtacgcaccgctgaaacgcgttcggcgcgatcacggcagcagacaggtaaaaatggcaacaaaccacccgaaaaactgccgcgatcgcacccggtaaattttaaccacatgcatagctatgcagccatgtgaatcacgcaggaattgccagccagagactgctgaaacggatttttttcatgctttcggaagcgaagaagacggggaccggagcgggaaaacagaagttcaggggaatgagcgcgatctggcaatagaggcaaaacacagcaacaaaagacacaccagaatcgcgcccgtatgcgttttaacgcgttcctgtgttttcagcaaggtctgactgaagcgcgttcccggtgcccccgaaccaaccattatcccaaaaaatgcaccggaaacgcgctgacaacattttagcctgtctctgattaccatcccagcgaagggccatccagtgtccgttcctgtatttccggctggcgctcacgctccagggataactcatgttcgcgctcctgtatcagccgttcgtcccttatctcctgttctcgctgtataactggctcaagcgttctgtccgctcgctcaagtgctgcacctgctgactcaactgcatgacctgctcgttcagcatcgcgttgtcctgttgcgtaagcgaaaacattttctgcaattccacgaaggcgctctcccattcgttcagccgctgcatatagtcctgttgcagttgctctaaggcgttcagcaaatgtctttccagctccgtcactctgtgtcactccgtcagttgtacccagtccttcccctgatagggaatcaccgttgccgatttcccctgcgggataaccagaaatttccttctcccgtcctgcacaaactccacgccccatgtcttcgcgttcagtttctgcaatgtttcttcctgtatcctgatttcttccaggttcgcctgtatcatcccgccaagataccagagcgtcccgccactcacggtaaacaggaaaatgaccatccccagtaacatcatgcccgtattccctgccagctttaacacgtccttcctgtgctgcatcatcgcctctttcaccccttcccggtgttttttcagtgattcctctgtcgaagctgtgaacagggctatagcgtctttgattttcgtctcgtttgatgtcacagccttgcttacagatttttcgagcttgctgaactcgtcgttcagcattgtctctgtagattcggctctctctttcagctttttctcgaactccgcgcccgtctgtaaaagattgctcataaaatgctcctttcagcctgatattcttcccaccgttcgggtctgcaatgctgatactgcttcgcgtcaccctgaccacttcaagccctgcctctgtgagcgcctgaatcacatcctgacggccttttatctccccgacatgataaagagcgtctatcccgcgtgtgacgctctctgcaagcgcctgtttcgtttccggcaggttatcagggagagtcagtatccggcggttctccggggcgttggggtcatgcagcccgtaatggtgattaaccagcgtctgccaggcatcaattctcggcctgtctgcccggtcgtagtacggctggaggcgttttccggtctgtagctccatgttcgggatgacaaaattcagctcaagccgtcccttgtcctggtgctccacccacaggatgctgtactgattcttttcgagaccgggcatcagtacacgctcaaagctcgccatcaccttttcacgtcctcccggcggcagctccttctccgcgaacgacagaacacctgacgtgtatttcttcgcaaatggcgtggcatcgatgagttcccggacttcttccggatcaccctgaagcaccgttgccccttcccggtttcgctcccttcccagcaggtaatcaaccggaccactgccaccgccttttcccctggcatgaaatttaacaatcatcccgcgcgccctgttccctgacggccagacgcagccgacgcagctcctccccgatggccatcagcgcagccaacacctgaacccgatcaccggaagaccactgcccgctgttcaccttcctcgctgtctgattcaggttattcccgatggcggccagctgacgcagtaacggcggtgccagtgtcggcagcttcccggagcgtgcaaccggctcacccaggcagacccgccgcatccataccgccagctgtttaccctcacagcgttccagtaaccgggcatgttcatcatcagtaacccgtatggtgagcatcctctcgcgtttcatcggtatcattaccccataaaacagaaatcccccttacacggaggcatcagtgactaaacaggaaaaaaccgcccttaacatggacccgttttatcagaagccagacattaacgctgctggagaaactcaacgaactggacgcagatgaacaggccgatatttgtgaatcacttcacgaccacgccgacgagctttaccgcagctgcctcgcacgcttcggggatgacggtgaaaacctctgacacatacagctcccggagacggtcacagcttgtctgtgagcggatgccgggagcagacaagcccgtcagggcgcgtcagggggtttcgggccaaagccctgaaccagtcacgtagcgatagcggagtgtatactggcttaactatgcggcatcagtgcagattataagaaaagagcaccatatgcggtgtgaaataccgcacagatgcgtaaggagaaaatgccgcatcaggcgctcttccgcttcctcgctcactgactcgctacgctcggtcgttcggctgcggcgagcggtatcagcgtactcaaaggcgtaatacggttatccacagaatcaggggataaggccggaaagaacatgtgagcaaaaaggcaaaggccaacaaaaggccgcgccgttggcgtttttccataggctccgcccccctgacgagcatcataaaaatcgacgctcaagtcagaggtggcgaaacccgacaggactataaagataccaggcgtttcccccctggaagctccctcgtgcgctctcctgttccgaccctgccgcttaccggatacctgtccgcctttctcccttcgggaagcgtggcgctttctcatagctcacgctgtaggtatctcggctcggtgtaggtcgttcgctccaagctggctgtgtgcacgaaccccgt

SEQ ID NO: 923 - DNA, 222 bp, Escherichia coli
ggttgtatgtgcgaggttaccgactgcggccttgagtttttaagtgacgtaaaaccgtgttgaggccaacgcccataatgcgtgcactggcgcgacatccgacgccattcatggccatatcaatgattttctggtgcttaccgggctgagaggcggtgtaagtgaactggtagttgccatgtttacggcaatgagagcagagatagcgctgatgtccggcag
